United States Patent Application Publication US 2014/0057251 A1 - sequence listing, part 141

SEQ ID NO: 266571 - DNA, 4493 bp, Cannabis indica
actaagaatgccactgtgtacacatgcgtacacgtagcatattttcattggtccaaaataattttaatcttttttttttttttgtaaaaagattcactattattataaattaacaatcgtttacaacagtagtgaaaataggatagggaatttcccctagccaacaaacgtcttgatccaactctaaagaatgtttagctaaaccatgagcagtatggttagtatttcttttagtatgagagatatatgattcagggaaaaaggataaaagacaacgaacatctaagattaaatctgagaaactagataaatctgtcgatgtagagtttagagcttggaagactctaagagcatcagtctcaatgttggtgatgctaactttgatcatgtttcattaggttcaaggcatcctttgatcctttcttttagttgctaaattccttacttctaagacccttaagccgatttttatttagaaagctatgcagaaggcttggacttttcattttcctatcagtttccttagtaccattatggtatgtttttggctaaatttgggtgtgatgagaagaatcgtaggaatcttgaggaccaaccgtactattttgatcgatgccttatgttatttactaatcttgaggggttagatactcttaccttagaccaacttaggtgtatccctttctaggtgcaagtgcattatattctttttggtaacaaatcccctcagttagctcagtttgtgactgatcagattggtgatctcattgagatttatactttctccttgtatgagtcttttggtcgttatctttgtatcagtgtcctgcttgatatcactaagcctcttcgcagaagcatgaatgtgcatttcaagaaaatttctaggaccaaatggttggaaattaagtatatgggtctctaaaatttttgttatttttgtggtatgatcgatcgtacttataacaattgcattagataccttaaaaatctttgatgagtctattgtccctcctattctgggttacaaggattattttcgtgttcctgctaggtttgcttttaggaagaatccgtttgatctttctaactccatccctttggaggaagtgggatttcgtggtagctcctctaatcaggggcttcaggatgttgtgaaccgattctattttgctattgttatgactgctacgtctgttagcaatgtttcttatgttactttttgcgtgttggcccttctagggtgggaagtactatggattctgaataacctaattttggtaccctacaaaccttgtgtcctatcgatgtttcctctttgggtgttcaaagtatttatattgtgctttcctctaaccctgttatggcttctacagttgtcactaatgttgataaagggaagagtgttgttggctctgtcaaccttgagtctactcttacttctagtgataaaggaaaaggggtggtctattcccctattgttcttccctcaggtgttagtggacctaggcttagtccttttcttggtggtaatccaagttctaatattggtgttaagaggtcctacacgaggcagaatatgcaagtgggaagttcagagctgttcagaatgatgatgttgtggttccctctattgataatctcattgaaaaggcgggtgttgcttagcaaccccgcctagaaaaatgaatcttatcagttggaatgcccagggtttggggagccttagggcatttgcaacctctccctgcttgtgaatcagcaccaaccccatttcctttttgtaatggagactaagctgctttgtggttctagtactagtattaaggctaagttatcttttgataatgtgtttgaagtccctagaagtggattagggagaggtttatttctatgtcagaataatgtaattaatgttaatattttaacttattttgccactcatgtggattgttttgtaaatttgatgataatattaattggcacatctcttgttttaatggcttgcgttatgctcttctaaaagtgatacttggactttattaaataggctttatgatgttgcccctgatttcccttggcttatcattgaggattttaatgattacctttctcttgatgataagagcctttctcttgatgataggagtagctatttaaccctcttcactctgctatgaacaactttcaatcttttttgactaaataaaattcattttctctttcttttactagtaataagtttacttgaaaatatggtaacattttaaaatgtttgaattggtgtattgttaacaaaaagtgatcttatttatatccctttgctttcttatttcatcggtccttttatggttttaatcatagggcctcgaaggttatccttaaagatgatatgataatgtcttagaactagaagattttgctttgagaaccactggctaactgacccgattttttttttctaattagttagtggttcttggtcttctagtcttgctttttcttgtcatgatcctcttaaagattttctttttaggtagtcttgttgtgttcaaaatattattagtttgggcaataatattgacagttttaaacataaaattactactatccaaaaagaacttgattctatctatctttcttccccagtcttcccttgacgttttgctctttaaagaaaaagtttattggaagcagcgttttaaggtaaattggttaaggctggtgataaaaaaactaaattttttcatcataaaacttcatctaaaaaaggtataatattattaggagtattgcttcaaatcatggtgacactgttagtaattatagagatattaataatagttttgttaacttttatgtcaatctttttacttttcaaggttcgaatgattgcgctattgatgatattcttaaggatgttagcagtaaacttagtccttttcaatgtgattttcttccatgtttcccaatttttgtgcaattatttgttgaatcaactctttttgggtaggtgcaacattcacttttgcattcacaatagagggtattaaatcaattatcacattgtttgctccagtaagggattgttggtttagagagcctttgagagcagtcatgctggtcaggttgactgctcgaggaacgactgacggattgattgttgaaggaatggctgatgaattgactgtaagaggaatgactgataaagtttactatgaacccatattttgattgatcgtggttgtttgttgtccgaccatgacattagttacccctgttgttgatggttgtccgatcacttagcttgatccttctattggggttgcgtcaagtgattgcaatggatcaattggaacttggaatcttcttcgactattgcatgttgtcatcatcgaagcagtaaatgactcgagttagacctttagtgcatcattctccttcttgaatgacacattttctctttccactacttgagtgcactctaaattttctttcatttgagctgtgacagtggctagttggtcacagaagctggtctattccgcattgatccctcattcctccatgtgttctgtcattgctcttgtgtgggttgactcaacgatgaaggtcgaaacactttgctcggttgtagcttgtcagggccccatggtgggcgccaaattgtagatgctaaaatccacaatcaatcaaagatgatcgtacgcgagcaccgacaacctggaaaacaaagaagagagtaatcaggaaaccttgggacaccaagatagtgcaaaccgaagagacttcgacggtcaagtcaataagattgttaacaatatagcaaaagagacaagaataaatgactgaactaagttaccacttatcttaactgcaaaaataagtatgtggttttagatagaatgagagagtgaacgatacgtgagaagtattgatatgactgtgattgatctgcctctctcagtgactgagagtggctcttataggcgttcatagaacgatgttactcatgactgctcaccttcttggccactttatcaagaagatcgttatttgcgtggccagtttgattgaccacttcaaagaacgttaaatgagtgataagacttagtctcatatacgggtaggatcatcgtgagctcaatatcgagttatgtgtaatgactatcgttttggacttgtagggcttggtattatgatcgtaccattataactagtcaaatagtccaacctaaactttattttttttagaaacatcgcttatgatattaagcatgagtccactaatggcataactagtattttattgtttgacaactctttcaaaatattatgtacttaattagaaagggaaatttacaattctatacataataaaccctaatattatttccctaaacctaaatgttttaaaatagcccatatatgactacatttcctttatccccataatacccctcacatttgaaccaaaccaatctaaagctttt

SEQ ID NO: 266572 - DNA, 1765 bp, Cannabis indica
gtcaccattcatgtgatgccacgtcagagtgcaaaaattgggataacacattgaattttttcacttgatttagtcaagattagaattggattaccatcacggtgaatttctattcatggagttttaatcccattccactagatgtagaactagttagccttttcaaagatttgtgagtggttccataataactcactagttctcacattttgattcaatcttgaattaattctcttacataatcatgtcttagacttatatgtctacacttttcattatgtatgccattctagactttagcttatttggcttctcgcaatatcatactctaatgatacatatttccataaatgtattttggaatatccctttgtcactcggtctcttcactattttcccattaagtctgttaacatggcttctttactagagtgtaaattacatatttatttcttaactcataagaaacttctcctctttgagtaacatactcaaccaacggtggagattaaatctcacactcgatatacaactcgttttggaatatcctccaagtatttaggaaatcttgaatattgaaggcataacttcattatcctttttaggtaccatattaaactatcttaataaccttccaatattctatacctagatttctagtaaaccctcttagtttacttttaatagatgtattatgcaacattcactaatgcaaaaaataatgtatgtttgaactcattaaatacacttgcatacttaagagtctctactctttctttattatttacaagctttaggattgaaataactagagcatttatttgtctatttgatatttgaaataattaaatttatcaactactttctcaacaaagttaatcctgatttatggcaaaccccccactatttatttcacttgtatatccggcccttttggaactcaggattagactaagattggattatgctgaaagtaatcttattttagtttaggaatagactgaactattttatttatttatttattttttaaaaaatacttaattaaaataaaatatataataaataaataaataataaataactcccacaaaaaaattaaaatgaataataaaaatattatattatgaaaaccctggttgggtgcggaactcttattcccagtctcttgcacaccaagcgcaattccatctataggaactgtttcaccattccccacgcttgccggctgtccaggattagcagcacgcggaacccttgtgctccctgggttttgcgatgtaggatccagcgtctgtgaatttgacggatcagtcaggcctctacgagtttgcaccatcgtattggcggttggatgttgaataaagagcgattcgtgatccttctcttaatgaaatcaccaaaatgttgcttcgcctttagccaacgacaatgagtctattttacaagcgataaatgatatataataacaaatatacgataaaacaatataaagaaaaaggaattttatagaggttcagccccgagcagttcggtaatagcctaatcctcgttatttatattgacttaagatcaaggaagaagattccttttcttatagctcttacaacagtatctctgaatatataattcttagataataatatagtcttagcttagctgcgtttcgactctcccctgcccagtgaatatgcatcactatttatggggctgggaaacttgaggaggaagagtttcatctctcgttacaatgcgtataaacaga

SEQ ID NO: 266573 - DNA, 1287 bp, Cannabis indica
gacctgcaacatttaaagtaacaatgcagatagccatacttagatgcacgactggacgggttggttgtttcatcaccacatctttgttaacctttagagacactggtttctcagactgctgcaacccctgttcatacagaattaacaagctttaattagcagcttcataatttacacataaaagaagtacatttttaagaaaacgatcatttagtggtgcactaatgaactatagactgaaaattcagctgcccattttcactaaccttttgagatgctggtttatcagtctgctgactcccctgttcataaaaatcacacactatagtaagaatcagtttgaaagaaatacacataacagaagtttataagacagtgatcatttaatttaatgcaccagaaactaaaatttgaagtctccattgaacactcataatgaactatattgaaaatactatcctcaccttcctcttatccttcctcttgaggatcttcatatggcacttttttatgtaatgcatcaaatggtacctagaatgtctagagcataactgttcctggacttctgggttctcagtaagccagtcaataatatctttagatttaaccacctcatctttgtctaaagattccagccacgaataaactggtctccactgatcagttcgttgaaatctagcgtgtgggatatcagcttgattatcttctttttcctgctagacgaagaagaacacaaaaattaccatatttagcttcatttcaggtctcaatgaagcaagtgaaacaactcacataagtaacccaattcacctaagaataatcagattcccagaataacaacaacaaatttgaaatttcaaaaaagaaataaagaaaaagagatacctgaatgggggtgggagcaacggggagtcttatgcaattttgaatagaaataagtctttgacagagatcaggacgaggcattgatttaatgccttcaggaatagaatcaagattagagtcaatccatgcctcgacttcggccatggacacagctttggcttgggcgaaggcacagagccaagctcgagccatggtggcccactcgtgtgataggtcactgttgtcatcgttatcagagcttctgtgtacaactcctcctcctcctccttcttcttcttcttcttccacttgtgctagggtttggtgtgcattattattggacatttttgtttccttatttcttcaactactgttctgttgctctactgagacagagaaatgtattgatgacatcattgtcag

SEQ ID NO: 266574 - DNA, 2667 bp, Cannabis indica
tataaaatgggtatatcttaaaggatataaaagtagaaataaaaataaaaacaagtaaagtaataccatgtaattttctcctttagaaaacaaataatctcaaaggagagtgataaaataatgcaaaattttcgtgtgaggtggagcagcaagggcaactgtgccaaacccttagttgaagaggctcccaattttttttaatgagctgattagtttcaaagcaaaaccccaacatgccaaattatattaatggcaatgagctaaattttaatgacaacctatatgagaaagtaatatgtttatttgtttgataaaaaataagaaaaatgtgaaaaggtatcattagtgtctattgtctagtatatttttaggtgtcgtattgctagtaatgtaattaagtactggtctcatataattttaattttttttgctaacaattccatataatttaatataatagctttaaaggaatattgctaactaatcgagggagacatatctaaaaagtattggataccactgatgtccaataaaaatgtgaaaggctcaacagttggcaacatttatttatttgtttattttttattttttgtaagatatcatttaatgtttgaaagtttatagttcaataatttttttttgacaaaataccccatttaaaatttttttccctaatccctcaaaaacttgagaagcctcaaataatgcaattataagtttattaattagtatatttgtgatgtaacaattatctaagaatggaaagtgaatattctacactgttattccatcaaaatgatgaataaaaaaatatggtggagctaaatcaatttgatacaagatgaaaatcatgctgactactatggaagttgttctagtgctcttgatgagaatgttcaacatctactagaactcaataatgatgatattattcatgacatcaaagcccaaggatatgtcactttctcaacagttatgatctttacatcgatattccatttgcaaggaaagataatggcgaacctagaaataattttatccattggggcaaaatttgaaaaacaaactatgaggggcataagtgtaaaaatttacacaaaaaggactcgattgaaaagaaaattatttacaattaagggctaaattatatagctaaaattagactaatgggtaaaaaattaaacaaaggttgaagaagaggaggtaccaaagaaatggcttaactcaaaatatttttaagttaaaaatggtagatgaatgagaaatctgtttgtctctagtagtgcatgaaaggctttaataacaaaattttctccataattctatagatttttctttggagaaaattcaaaagtatatatcataaaattgaagaagaatcaattcaagagaaagtaataaagatgaaaattcttttgatgtaatattattaaaaaaaataaaaaggcaatgtcatgaacaagccaaaagtctaataaaaagaattttttcaatttagtcttaataaggacaatggaaactttaataattccaggaacaataaataacctaattaaggatagcatgtgttttgtctacgggaaagggaactagatattgtgggtgcacaaagattacaatatataatatatatatttatatattccattgtgaacaactatgtaatacttcatgttgatgaaatttctcccattaatctatgttgatgaataaatttagtctagtgtcaaaacaaattgatcaagaagaacaattgaaacgtcaatatagatatgataatagtataaagaaaatgtaaaattaaaactgtgtttcagcactattagagtaattagttagatttctggttaagttagcttattgttacaccaattagttatgttgtccatacaacacaaagtttatataaaggcatgtaattcactaattcaatgacagaaaatcatttctttttatactctctgttctaatatggtatcagatgatacacactaatctttaagatttcaattgaagaatcaagaacaacatcatggtaagaactcgagctacttcttcggctactaccactgatcaagattcggtgatcgatgccttaacagctccaccaccatcataaccttctaccgatgatcaacttcgagttgatttcttaactccaaatctgcgcccagaactcgtggatcgacatgcatatgccttcacaactccaccaccatcatagtattgtattggattaatattatttaacagaatactgtgtttaatattgacttgtattaatatcttgtgtaaaattatattatatttaccatatactcgaccaagggccaagttggagtcgaggttcaggttggggtttggggttgggtcaaggtccgggtctggagtttggggtttggggttagggatcggggtccgaagccaggtcggggtccatggtcgggtcggggtccaagttcggggttcgggtccaggtccgaggttgattcttggtctgagtctggggtcaaggtccacggccgagtccgggtctggtcaggggtccgagtctaggtcagggtccgagttcgatatttaggaccagggttggggtttgcaacctcagaccttttgtaaatattataattgaagctgatacagatcatttgttatgtattaaataat

SEQ ID NO: 266575 - DNA, 2998 bp, Cannabis indica
gaacatcaacttgaagaaatggaaaaaggtttaaatgtgaagaataagtctgtggctgttcatactaagggcccgacttcagttaatgagaatcccgaagatgagatggaagataacatatctgatcaagatatgaatgatccaacttatctttcacttctgaggaatttggggttggaaagatgaagataatgacctttcaccagaatccaaaggaagaaatgcaagcggatcctctgtacctcaagctgcaccagtccatgttaaggtaccgaagagaagcaaagctgaaatgcagagggagcttttgggtttgaaaagaaaagccttggctttgaggcgccaaggagagagtgaggaggcagaagaagtgttgagaatgtcgaaagccttggaggcacagatagccgagagtgaatcactaggaaaagattttcagcctaatagtcgggcagaagctattacaaaatcaccggttgtaattgcagatgacgaagctggtgatgcagtggatatcacggaatcagatatgcatgatccagagatgctatcagttttaaagaatttggggtggactgatgacgaacaagatgctgcaacggtgcatgaaaaacgagaagataacacgtctcttattcaatcttctcctccacttactgctcctgctcgaagaagtaaaggcgagttacaaagggaacttttgaatttgaaaagaaagtcacttgcattgagacggaagggagaaattgaagaagcggaggaattgctgaggagtgcaaaggttttagagattcaaattgaagaactggaggccccaaaacaggcacatctacatgaagcttcaaaagatgagaaacctcagaaaaagaatgaaatcggcgacatagaagtaagcaggaggatgtctcgtgaaacatccggtcgtgttgatttatcgattgataaaagtagcatgggaagtgattctgccaaccatccatcacagctaattgtggaagaccaaatgatattaggtgaaatgggaacaccgaaccccacgggattaaagggtactagcatttatccgcagagtgatttgatgaatttgacagatttcttgacaggagatgattggagtggttcccaaatggctaatgaaaaacaaatggatggattaaataatagttctacgagagacacgacgagagggcatgatataaaacatgaaaaacgaggagtcgttgagaaaccacatcctcatgaatcaaagtttactgaggaacatgcacctgtggctagagaagctagtgttagaagtgaaaaacaagaaagtagagttgccaaagatgagaagccgaatttttctgatgcaagtagtgtcaaagaacatgcttctcagatcaatgaagctacccttaagcaagacattttggctcgtaagagaaaggcacttgctttaaagagagaagggaaattaacagaagctcgagaggaacttcgacaagcaaagttgttggagaaacatcttgagacagacaataccaaatcgataacaaatccagcagctgagtcagtttccacacctagtgtttctcccattgcccaaaaagagctcagtacatcaaacaatgtgtcaaaaccaaaaccaatttctagccgtgaacgcttcaagttgcaacagaaatcccttgctcacaagcgtcaggctttgaagttgcgaagagagggtaggactgaagaagcagatgctgagtttgaattggccaaggcacttgagacccaattggaggagttgtcagcgaacgagtccatcaattcaggtgtcgatggcttagatactgataaagatgtgggtgttgaggattttcttgatcctcaacttttgtctgctttaaaagcaattggaatagaaaacacgaacatgtcgccacaagttcctgataaaatacagtcttcgaaaccaaatgttggtacaagtaacaactctaaccaagaaagaattcaactagaagaacaggtaaaagccgagaaggtgaaggcattgaatttgaaacgatcgggaaagcaagcagaggccttggatgcccttcgaaaggccaaacttctcgaaaagaagctgaattccttttcattgcaatgaagagcagaggttagcacaatttgaacagcaaaatcctcattctatataaatttgctgcattgacttattcctaatttactttcttagttacagactacagtgactctagcaaattgaggtgacaaaatccaagacatgaaactatctcttccaataataattttggtatgaagagtactctttgtgatgtttatacatatatgtgtatattatatacatgatatcagtaaatgaattgcttgaattcagcaacatttcattgacttatgtatttgtgtgcagtgtatattatattcatgtatcatttggtgtaattgatatagagaaatattgaagggtattaccaccaaatatcttatgtatgacttcatattgttatttgtgtaattttaagtttttgcatatttaagtttaataattactattaaaaaagataaatcgcttagcacttgtgagattttactttctagtgctatggtgcctaatagattattatacacttaaaattattttcaaatttcgattgttgtattttaatatttaaatttttctaataaaaaaggtcaaatggttattgtctatataaaattaaccttgaaaattagaccacattgtatatgtggcaagatcactctaataggcaattttcattggagatgcttttaagttatatctgattcgatatttaattacaccaatagtcagtgacgaatctagaatttaaagtaaagaggatggaattttttttgtaaagtagagcgggaaaatcagtgaagagccaaccacaaatattaagggggcaaaaagaaaattttgataaaaagggcacttataaaatattttatatagactaaaatagatatatgagaataaatataa

SEQ ID NO: 266576 - DNA, 3036 bp, Cannabis indica
ctcttttgtttaataattttttttaatattaaacctactgccccttcttattcattctcagatttttttttttttctttctttttcaaattcctaacatcccgctcattctcagactttctctctctatatcttcaagcttttccatttggtctatggaggacttggagcttagaagaggagagtttcaggtcaatatttttgtttttgacgaatcaatattatacatttacgatgaaactctaatgtatctgtttattgatctttccaattttggattttggtaattatattatttatctgggaaaaaatcgattagggtttagtgagtttttgatagttagattgtaatgatttttggttaaaagattggggatcgtgtttgtatggtgtttgacttgtggtgtatttcatcgttagcgtaatcgagaggaaaaggggaaagggaaagaacactaaagttcgacgattttggatagtaatgtgtcgaacactttctttctcttcttcttctttttcttcttcttcttcttcatcatgttacgtttttggtccgaagaatcagaacttatttcatcagaacaattcttgtccacataaactttacttctttaaaatctttactaaagctgagctttcttttttggaaaagaaagagaaattagcttaatttttaaacccaaattggaaaatttctaaacaaaattactgacttacatgtaaagattcaaaattggtaatggttttggcccaacattatgacctgattttggtttcttacaaaaatattacgctcgatgcatattatgcataaattaccgaatcaattcatactgcacatttcaatggtttaagttttcagatgttttatgtagtttttgttgtcttttttttccccatttcatgtattggcttgttgatttgctgattcaaattcactttcacttaccaggtttgagaaacaacctacgaatttgaagcttacttttttcttaaccagaaaagatgaaaagggggagcttggtaaatactaaggctagagaatttccgggtagaataacacgttctcgaacagcggccttggtagtatcagggcagctgcccccttccaaagcacctattaaacagaccaagaagagggcttcgcctacaaatctaaatatggatgagaataacaacaatgttgataatcctcatcttcaatgtaagaagaagaagagggttatgcttcaggacgtgactaatgttttctgtgatcgaaattttttcaacaaaactaaaattcaggtattgttttcactagatatcaaatcttatttgaaagttgtaaagtcaaattttagtttttttttttttttttttctttactcttatagtcgtgttgatttatatttatcattgtgtggatcgtcatatctgtgtcatggtgtctacttgtttgaaaaagtaacggatagatcaatcttgctcttatgaaaggtctgacttttgcataattttggtggttattaggctaagaacgaaaaccctgctaaaagcgctaaaaggggtcaggctaaggtgaacaaagtgaccccttcagtttccactgatatcctttctttgagagctgatttgaaagacaacacagaatttaaaactgaaggggttgtatcttcagaaattttgacagagagcatgcctcattggttcactagctcaaatgggtttggcaaacatgaggacctgtttggaagtcaaacatctgaacttacttcagaacacgaaagtccttcaaaggaaggttagctaagatgagaaaatgtgacatgtttgtttgactttgttgagtctctttggaatcctgtggtgtttaaagcttgtactttgactaacatagtattaacttgttcagttctatttaagcgagtacaataatatctttcggtgaagaatagattgtatggttgaatttcattaactgttgaatttcatttttatttcagaagataaggatgagaaacattattctgttgagaacttcactacatcaattaaaccagacattgttgatgttgatgcaaataacaaggaccctcaattgtgttccacctatgctcctgatatctatgacaatttgcgtgtttcagaggtttgtgcatctaatattctgtttgtgctcctttagagtgagatttaattaacataatttgtttgcctttctttgctctgtttatttgagtgaggagctgatttaaaattcaaattactttgttcttccttacagctttcgcagaggccatgttctaattttatggacacaacacagcaagatatcactcgatgtatgcgtggtattttggttgattggcttgtggaggtcagctatttttttagcctgtcatatatataatgcttgcatctcattgtcatttctaagttttgtttcatatagcttttgatgctttaagtcttctattggatattcaagacacagcagttgatcatgattatcttgttttcaggtatcagtagaatataaattggagccagatacactttacctcacagtatatctgattgatcgatatctctccgaaaattacatagagagacagagacttcaacttattggcatcacttgcatgctaatatcctcgtaagctttcattttaataacaaagtttttgcatgagtttacgtggcttatattatgaatgtatgataaaaataataatacatcaataaataccttatattttgagtgacttcactttaccttgagcggtatctgtctttattttgacatgtaagtgaatatggttttgtttttttgattgaaggaagtacgaagaagtttgtgcaccacgtatagaggatttttgctttatcacggacaatacctatacgagagaggaggtacctttctttggttaaaatcttttcaggctttagagtttatataaataatttgatcttgtttcccaaccatgatacttctacatgcattgcaagcaagtcaggtcgttgtaaattttgtctttatcgggaaatgagc

SEQ ID NO: 266577 - DNA, 3701 bp, Cannabis indica
tgatagtgccatacagactgtcatgagctcagaaaagtctaatgaagatttgatttaagcagtggaaagaaatatttacattttttttcccgacaaatcaaaccaaaccatcctagttgaccgtggaaaacgacctaaccaaaggacataatttttccaagtcccatgtgattttgttaacaaaatcatttttcaaactttattcccctaatattttctttatccataatttcccatgctttgattctaataatgttacaacatttatataattttgagatattaaagttacaacattgtttcgtctctaaaatcttctcagattaagggaggatacaaaaacggcactaacggtgaacgaccaagtgaccgggcgagcaagatgttcaacagggattgccagctcatggggctgacgtggcttctggcacgaaacaaaacggcttacatacccaccgtctcggctgtactgcgcgccatcatgtacagtgcgcacccaccacacgagtccaagtgcagtccggaccaagagaacatgccactggccgttgattcactgcagttcgagaaggcccaagcctcatcgtcaccgtccataatttggtttccgattctacccctaataattttggtgtctctgtttgtttagtatatataggattgtagggcctgtttatctctttctaatctcccttctcaactttctactctctctgccttgtattttttttttcggtagtggttgtcgggtcacgtgatgctactagacaaacgagcttattgggttgtttttgtcttttttcacatccccactgtaaatttcagctcgtcttacttatttttcttttttacatattactaccatcttttcgaaaattggaatacaaagttcataatttttaacatgttaccatggtattggcaaatggagggttgttttgcgtcatatagacaaaatttattaatgtgtaaagcataataaacttccatttctatgcaagtatatttggctaatggggttgttgtgttgtttagttttagtaaaacgtccatttcattctttgggacctaattgctacaaagcctgaagcctactttcccaaacgacggcggacccacttctccacaaatgagaaaaaccattatcgagaaaattaggcagtactgatattattggtggcagttaaaaaggttttaatcagaattagcaactccctatgacttgagtatgttggtcgcatcgacacttgaaaaattgggaacaaaaaacaggtattattatatcaagaatacccttaatattttatccaagttattgtattagtttatgctttatttggtgtaattaacactagtattgcacatgttcaagggagggaatcacggttaaatgtttgtcttattgtggtacccttcacaatgtggacccattggtacctgtaaataattatgctaattcgcttcctttaatcataattacagatatttctttctttatctttacattattaatttttatatgaaaggtagtctaggactgtttcttagctgattttatcaagtttgtttggtttaaaatgccgtaataagattgagtagaaacaaggcccattttcagatttgatttgatttgactaagggcctcataaaggtaaatgaacttgattcagtctcaaatgattcccattatccaataaagaacagcaaaacaccaccaaataaatcagaacttcgagaaaactgaccattaagaaaaaacactgtacaaattacagggattcaagtctacacgaaatatttgagtgaaattaaaaaaaataaataaaatgaaaataactagaagaaaacaaatgaatccaagctcccactgtcttaatgggcctgcctttgatttaggccatgctatccagtcctcaccaacctttgcctattagccacaaccagtcaagtgttacccctgcaaatatacctccaactagaaacagcaccagcagatttcccaaggcattttgttctggcccctatataaagtacaaaataataataacaagcttcaatacataacatcagagcctcccaaaaattaaaagtaaaaaaccaagaaccaagtttgtaagtattatgttcaattgagaactaatctaaccttgtaacctttaggagcagaagtgaagacacaaacagtgaggtaaccatttgtcaaacccaagaaggaagtgagcattatcatccagccttggtcaccatattgagcagtgaaatagaaagctgggatgagcaagaaacgagaaagaatggctatcatgagtcctttcctcgactccaacttcaggaacttgatgagtggaatgtatctcccaattagatcccatacattgtacatagcaatcaaaacaagggcatacctaatatattcaccatatgttaatattattaggcttatcaatttaacgctaatttagtcaaggttgaatatgaatgcaaagagcacattaccatgtacccaaactatgtgagcctgtatcttcagataaaaagccaggaaaaattgacaatgtcagtacatatatgaggaacatatcaattgcataatctatgttctgaagtagcaattccttgttccccaaccgctctagtcttttcgggtcttccgcatcctgcacaagattatagattcttgcttaatgtcaggttatgaaatggctatagccttttttttttccctttaaaaatatattgatgaaagtaacatactccttcgggtaatgtttggatgccaccggcggcaagatcagcagaaacagttttagatccttcggaggctgcctttgagcggtaatacttgatgatcggcagttttggaaagacaaacgcatagagaagtacacagagaaactcaaaagcagctgagatgacaaagaataaaactgcagtggattgtgaaacgcaactagtattagaaaacaaagattttaagcacaacaaatgatgcaacttttatgttaaatacaacaaatttgctaacaggtatgacaatttgtgtgtaagagaatttggcataactttccatttggcaagacgaggagaaagtataacaaagcatgatattcactttaactaataaattttttatctctaagctatatctttcagaaatactaatgcataacaatatgcgtgtaatgctagaaaggtgttagttgttaagacctcaactgaaagcagtaagagttcaaaacaacaatcaggagagataaacatacttgctcctttacgaagaccgttcttcgaattctcaaaagcagcctttgtaattaacctcaaggcagaggttagagcccctgatgcagccaaaccagcaaggaaagactgaacaaatttcaaaaacaagagaagcgtttaagaaattcagaagcagaaactaaaacaacacaagaaactagagctctaaaatatgctaagaagagtagaaaccaacttgaataaactcaggctgcatgaaggaaaggtctccgaccattccaccctgaacatgagcatctgcaactccgaaagcaccactaacgacacaaattccaataaacgtcccaagcccccctctccctgatgttgccaaatccaactatatatatatggcaaaacgttaagtttaataaggcatcagattactggacttggtcacaatgagttgttagttcatt

SEQ ID NO: 266578 - DNA, 1677 bp, Cannabis indica
cactatagaaaataatagttctaacagttacattgcttacttgctgctaagatctgttcaaaatcctttcgtacatcttcatgttgcattatactcctcaacgatgatttaggtgagagaggaggttggaacatgtccataagcataggatcagatccaaatccacgatcatgatcctgatcttcctcatcattcgagaagattataaattcgatccctagtgattcctcctttgaattgcttttccgagcatcaatagatgaattcgatcccttcttttacaatttcttagtaccagatcgttgcttccctgagcctttcgacctagtttttgccatggctacaactataaaacctgaaaaagctagagagaaaagcggggaaaaaaatagaatttcaataatttgcttaagcctgattgtttactaacggcacaaaaaccataattatttatgtgaagaggtattttaaactgagaatgatttgttcaatcactaggtaaaatagaagctacaatacccgaagatgcaacaactagtgctattaattttttgaacgaactacaaccatttttgtcttatacagagaagtttttcccgttcgtcgaggaccatcaataaagaaaaggctagttttttttgtcaaaatttgtatttaatattaatttatgcgcatttttttgtttcaaatttaataactgttagctaatatatcatctttcttaatgatattttctaatttctcattaatctctttatattatttatcaatttcattattacttatgtaatgatcaactaaactataataattgatatctttgtccattgattctagaataaatttaatgtgatttaaaatagggttcttattgtaggtgaggtatgtgttatagtacaataatcttcaaacattggttgttcaaatttttgccataactctttagggttggtaggtttatagtatactaagatagtagcaaataaacgacgtaagatatggaaatattaaatgatgaggcttctgataaatattgttcttgatttgtgttagcttctaataatccattaagtaaagtagcttctcgaaaagaggttacctatttacctttaattgtgtttaaatagtcaaatgaggttggcccacgaacatgatttaatgataagcgtaaaaaatatctctcatcttctattgggtttactataacaagtctaccaaaagtttaaaaaatactttttaatagtccaaatattatacttttggttccaacaaaatgttcaggtaactctctataaataaatatttaagcttttttattaattttattcatttcaaaaaatgctgtcaatatagatttcgatgtgttattatctcttatgatattatttaaagggtaaatagcggcataagtacccaaaattttaagtttgtaagtggcataatcccaatgtttatttttagcggcataagtacccaatgtttgtaaaactgtaaattttctctaatttcgtccgtacaaaccctgttattttcttaaacaggccacatataaggtctagattcttaatcattgggtctacacagaaacatgtaatatcagttacttccaaatgttcctttaataaatttaaaacggagtccatactcacaaaactgaaaaaaattacagttttacaa

SEQ ID NO: 266579 - DNA, 3521 bp, Cannabis indica
atatattatttttaaaataaaatatttttaaatttactgaccgtgaaaattaaattattggccaagaaatatcatgataataaaagattgagttttagttgtaccgaattattttagtggttactttcgttgttgggatgtttttgggtaattatttatgaccaaattatccttacctagagataatttaagaagtaagttaaggggtaaaatagccttttactaaaatttatttaaatttccctttttagtattttctagtatgtgctaggctgacagaaattggaatttaattaatattaagttttaatttcataagtttaataaaaaaaaggataaatcaaaacaaaacataagtcttctcccctaattttctctctctttactcgaccctaaaaagattaagacccaacgtagaaaaccctttgagttttcttcaatccatattcaagaattcagctagtattcaagctggaagagatagagacagttaaggtaagttcaatcccttgttatcttcattttcttttaaagaaagttttgggttttggagtgaatttgatgaaatagggtctgtttgagtttgtttaagttacagttggttttatggtgtttatgatgattgtttattactagttatgagttgaatttgttgttgtagttgggttgagtgagttagagtttaaagacctcaaaactcactcaacattggtgaaattatgattttgagataattgttggttatgagtgtttaaaattgctttatttatgattttaagatgttcaacatggaaaaacggcttaccgtttttacggtaatctgtaaaaatggtcgtttttacattaacctgtaaaaacgataatgtaaaaacggtactttggaccatttttccagtgctgaacgcagaaaaatgatggaccattttggaaaaatagtggactgttttgggtgtttttagtaactatatttttgtgttttattgatatttaagctattttcgcactatttatcgataaaaatttgtttggttttaattataagtcttagaacggaattgattaagttatttactggtttaccgttgtcgtgacatagggcccaaaatcgtcgagcgttgttatactaatactggcccacacacttgaatttgtattcgaggtaagaaaagtcaattataccacattgcatggctaattgaggcaatgactctcaactctattttgaaactgttagggtttttaacttattggttgcgtcattgggcaacgatagttacattaggtgattcgttagtaaacgagggttgatgaatactttataaactttcggtaaatagtttgtcttattagacaactaactcagaattaatattgtgataaattgtgatgttttatgtgaatatatatatattttaagtatgtaactgttattgattactagtttatttaatcatgaaatctatatttttgtttctcgtttttcttgctaagtctttgtgactcaagggtattttgtggtgtaggtaagatcaaccatgagttagaggtctcccggaaaatatacataccatccccttcgtcttttgtgctcagttgattaggattcgtctttggtagtttttgaatatgtattaatattttgtaataaactaatacggtggtatttttgtaaaagtttataacaaagaagttcttcgatccagtaatattttgaaaaaagagttttaagttatattttaagaaatagttactaaaattttaattaactcacatttcttaaatcattagtttaatattataaactaattaataaaagcacacatgtagcgcagagcgttacatgttcactttgagattaacagataaatgtctgccatttattaatatattatgaggaaataaaaagtttgaatcgatgaaaattgcgagcaagcattccaaagcatatgaaaacatttatttactccctcaatcttgtcaaaacttttaataggagacattctaaaattctgtaggtacctgaccgttaaatgaagttattatccacgtgttattttctttttggcatacttaaattaattttttaaaaaaatttaacaacttgaataaatattgaggcattgtcatgtgccaattttcatacttaataacaaaatacatataaaagttctagaattataacttatgtattattaccgcaaaaaattaaagttacatatttatttacaatcgaaattatacttaaatatttatatcgcaaattattcctaaaaatataacctaattacaaaaaaaaaaaattactttttataaatctatagacagttcatacctagaagacaaccacatcaaagcaaaaaacttattcaaaagtatatacccatttcaatttgatcctttctttcacatttatcttttaatcaagtactaatatagctcctaaagtaatatatgaagacattagattacaaaaaaaatattaacaacttaatcaaataataacaaaaatcgttattcagatgagatttcgttatatcttacccttccctaaccaaatttccaaactttgctaaaatttcatttctgtggtcagcatcgactgagtacccacattgccacgtgtcaagccatcaacctctgagaaaatctgcatggaaatccacaatagtttatgagagccaataagaggttggtgacgtgtagatttccttatccaaaacatcttcaaattccttattataacgttcgattgcaaactcagtacttcctcaaaatacataccaaagatatatcaaaacaaactaagaaaggttatagagagtaacctaagctttaacacaaaccctttatatggccacctctgctattcaacagtcggcctttgccggccagactgctctgaaacagtccaatgagctcgtcaggaaggtcggcggcggcagcagtggtggccgtgccactatgaggagaactgttaaaaagtgctccccagagcatctggtatgtaattttaatcgcttacctagttactagttactagttactagctttgacttagcaaatatacatatgtgattctcttatattttcatttataatgtctccataattttttactagggtgttagtaattgtggataagggtgttgttttgataattttttagtgggacttaaagtattcttaagctttgtttgaaacttggattttggtggaaagaataagaaaaatgtatgaggaaaaaaagtggaaaaataaaaaaaccaaatcaaatttttcagggatttattattttttttttttctcaaggtaatcaaataagaaaataggctttatggtgtctaaattaaatgggacatttttccaaataaatgtttgtaatttcatcattagtatataatgtcaaaaatctaaaccagagggtatcaacaaaataaagtcttagttaacctttgggcccaagtaaggaggtttgggcctatgcccagttattccatgggccaggcctgcaagataatcca

SEQ ID NO: 266580 - DNA, 1809 bp, Cannabis indica
ggttcaatggagggctaattttgatttattattatttaaaagaactttagaaagattatttggaagaatgatacaaaataagtattttttttttgtgttattggcatgtttgccccaaagttctcgctaattggcaaagtggttcttaaatacttttttgtaatcaagtccttgaatttgatttatttatcaattacttccattataacctttttaaggagacatctgctaatcgacggtaagttgaaggactatattgcaaatatgcaatgaatttaaggagcaaaattataaaaaaatatattgttaccaaatttaagaatacgaagttaagtgctattgtttataaattcagggatttatgctaagaaaatatcaaaaataattttgctaatctcaataaattcaaggggcaaccatgctaaaccctttcttttgtttgttcttcacatgtttttttgttttttttttttttttgctgtaaagattcaaaataaaattgttaagccaaagtatactgacaattaaaaactttgaatagatacaatggtgctgaaggtctccacactaaagtgactgaatttgtgaaggacaaggactgtcttgtatgtggtccgggtgttctggttgaactagattcttcattaacattagagaaggtaactttcatcatcctatatttgaatctgatatcattatcaggtaatttattttgttcttgacttgcataccatctgggaaggtaaagggacgtagattttgagcccacttgatttattgctagtttgattaaatcatgcatcacttaaagaaacaaatggctgacatgtttcttgatatttgttgagagtttgtgtggatgagcttagagatactttttggcccatacacctgtttagatcttggtttactcttattgaggtgacccattctatggaagccttggtcggttgagcatatcccccaaagtgttatctcttttgttctacgtaaattttaattgattcttttatgagacttgatttgtccatattatccaaaatgttgtaacatattagcttctgatggtgattggaattcatagttagaatgaatgattttgagattgccatgtatattaagggtttattttccttgaaatctttgtgtttaactttctaaatcatgaaggtttgtgtttttttttttttctttcgcaaagtagatgaaggtttgtgtttgctctaatgagtttagcattaaatacttctaagattccaatgttaatacttttcattgtcatttgtttcctaaatagtatatattttaacaaagttaatttgctggagtggtcacactttctattgagatgcatcccaagtcattatttcttcgactccaaatatttgtctggtgctttaaattgtttaggaaaagttttgccaaatccttatcaaagagggggaataggtttcactaatattccattaggataggaaacaagaaattgcctctgtttcacactgatctgtcatgttttgtctattccactctctacatgttagtttatgccgcgtctccatcaattgttagatcacaatttctaattagggtaaaatttgtgcaatgacaaatccggctgtcattcctaaaactatgtctagccaattttcaactatataagtttggtaaacatgtgcttcattgtttgtcttgttctgtcaaaacagagtaaaatgactcactgttatttatgatctggtacgatggtaattatgatcgaagtttgaaggtataattttaatgattgctagtttctgtgtgcaacag

SEQ ID NO: 266581 - DNA, 3388 bp, Cannabis indica
atttttatgtaaaactatatgtggtattaacttttatggacacctaaatatataatattttagtataaattaaaatttaacatagtattatataaaaatatgatatataatccaattcaatataatacaatacaatacaatacgacctaataccgcgttccaaacgagcccaaagagtgtaaaagaaaagaagcagaacagaaaatattggttcgtatgtatgaaaccaaaacacgttgggtagattttttgcttttctctcattcatccaagaccactacagcttgaaacgtgcttaatggcctcttcttccatttccacaagttggcggcagaaggtttcaacatctcgagcctcttctttcaacgcgaaacgatattccttccactggtaactggggccttcctttgatactggagtggaaacttttcccaacacgttgaacccctttcgatcaatagatagcatgtatgcatcctttagagtaacaccacgtacgtcagttaatgatagagttctcaccaattaataaccagaaaaactcataaaataaaattaaacgccttgaattaatgaagatgtcctcagaagcaactgccactaacatgtcacactatgcttattataggattacttcacaaaaataatttctggattattgcatcagatgtccaaaataaaattgacttgttcaattgtgttttgacttaattattaactctctcataaattatattgacaagatcataatcagctatgctctccgttgctgcaattcatacatagtaacatagttttactatatctcactttatcttatacctttgcatttgcattcaagtacgtgaggcaaaacagcatcagggctcggcgccttgcttcactttgattaatcccatcaattatcttagcagacaaaggagctgcaaatgagagaaagctagattagaacaaacactcatcctctaaggttgtatgagagagaaaatcaatccttaaaaatcactaggaataaggttatcacctaaccgatcaactttagaagagttcatatcctcaaagtctacttcatgggtgcttccattgccatcaatgaaaacacatgatctgaacaagtaaaaatcttaaagttataagatcatcaaaattgtagcttctaattggttttctgagtgaaataatagaaaataggttttgataaaagcatctcaatgagcctcaacaattcattccaactttatagccaaaaggcttgaatatgaaaagtactagaacaaggacagctcaccaaaatggagagagaaaacactaacaataaagtaatattctctgaaatcaataacctaaaggagagagaatgaaaactagcaatattacctaatgattgcaattaaaagttagtaaaagggcagctgatacaactctgtaaatggtgaccaaaaatgacctgtgaccaatgagtaaccaatgaccaaatgagtctcatttactaatgttctggtcccttggcctagatcaaaatcctcctccattgtggatttcaaaagctacatactgccactcttatgacagttatgttactatcatgcatatacataccattattcttatccagatatgttataatcatgcataaacagaacagcgtactagttatcttctgaacataattctaattggacagtacaatacaaattttagagtatgagatccttaccttggattaaacttataaatcacgtattcttcgtccgcttctagtaaggttttaaggttttcagttcgagatgtatcatgaatattagaagagcttaatacaccagaaactgtgtaactgaactctctaattgcattctgttcagagaagatgatttctctgaggctctctgtggcagactgatctcataacaaaaacagaaagctggtcagttgaataattgagaatcacacacttaggacatgtttagtgcactgtaaaagaactccataatgtggcaatcaaatgcagcactgtgtttggtagagcctttctattgtattacacgatacaaaatccaaccaaaaatcaaacacagatttgttaaaaaaacaaagtactgcactgtactgtataatccaaatgtatcgtgaaaagtttttttagacaatacaaactgtcaattgacagtgtactaatgagtttcattcatctgaggtatgtcactacaatcaagcactaatgagtttgcaagtccttccatcaaatataaattaattacactaagaaccaagaacaagaacagtaaataagatcatattctaaagctctctctctctctctcttgcctctctttttgcttgataaaaactatatcatcaatttgtaagataatctgatcttatctatgtttgtatagtcttaagataccatccaaagttaaagatatttggaaaaaaaaaaaaggtaatgatattgagatgtttattaaattttcgaccagagagaaagagagagagtggaataataagttgtaaaactatataaaggcacaattagtaattaaatataacggttttctaattggatcaattcagattcttcagattaaggcatagtccacaagtactagaagtgacactgtaataccttttcatctttatggggtacaacatcaccagtcagagcaactcgagctggtaactgcagaatgaaatcaaatcatctttaggtgtaacactgtaagtactaaattatataatttaaagtcaaatcctttatgtatcttaagtcacacagcctcaaatgttgtcacaaagggcaccaccataactattaggcagccaccatcactaaccttttttatcgatctgagcaagcttgctaatggaccagggtagggagtagtcacggaaaatgagccacgttcatcgatgatcatgttctggaagagaatgagaagcaaatacaagacacaaaactgagactaaacaaattttataaaacttctacttaatgattctaatgttttctcttaaaataattatgaaaaatttagagaatggcatatatatgattgttcaccatggttgcacatataaaacaaaaatacaagcttaccacattatgcaactccttctcaggcacccaaatatatggttttccctttctcaatatgtatttaacctttgatgtatatatatcattcttgctgaaacaaacagaggtataagctatcatttaaagaagcttgattgacttttattcttttcttcagccaattgggtttacaatttcatcaattttctttatgaattttgataagtaagagcataacttgagctccctccataggaaaagcaacataaaaacaacaggaaaagccttaaatataagggtacctaccttcct

SEQ ID NO: 266582 - DNA, 1021 bp, Cannabis indica
tttgatttttttttaaaaaaatccacacttttttcttgaaaaattattgttgatgggatttaaatttttggccattggcatataatttaacaattaaattaaaaagtattttattattaattatttattttttaaaagacatatattcatatttatatttttttaatttttttagtaggagcgatcgcttatcttaatatctataagaatactacgcacggtttttcaccaacttattacatataaatattctaaatttggaaccgctagtttggttatagggaatctttttagttggggttgggaaggttttgtcaaattaatgataaatgtcattctcgatttaaggaagggcactattttctttttaacatttaaagaaaaaataaatatcattgagatattgtttattaaaaaaattattcggatattcttaaaatgaatatatgattggttgttggtttaaacattacatttaattatcaaaataaatgataattaatgactattatacatcccattctcatggaccattggtaataatcattaattgaccataagatcacaacatttttgttttaagtattagaatgcaaaattaatttaatttctataaaacaataacaattaaattcttccaaattacgtccaaaaaaaaaaaaaaaaaattcttcctaacaattattgtcattattgtattttgttctttaagtcctaatactaatagatttgtattttctttctttatttcttttttatatataaataataattgcacatattaaaggtcttcctcccttttatatagtcatggagtatttatataaaatactattttttaaaaaagaaattatttatactttgagaaaagaatttccacatttatgttttatctttataatttttttcttttaatattttctatttattaaaacttcaaaaaaaaattattttctccctaattttttaaaatttttacaccaaaaatataaaataccaactttattacatatatacaaca

SEQ ID NO: 266583 - DNA, 4436 bp, Cannabis indica
aaattttataattaaataaaaaaattaatcataaaaactcaaatttttctaatattatcctttcataagtaatatctattaaaagtactgtagccacatggaataaagaattcattttcacgttacattaaaagaaatttcacttttttttttaatattctttccttaattattttttttttctgaaaatgaaataagttttaagaaaccaatctaagcctagaactcccagaagataattatatggaaagtaatagttatatgtacacacatgccaatgattatagataaaataattacctgttctctcgcactaatttgattgaacttggaacgaggatcatcagaagtataaatggagtaccatccttggtgaaccttaggatcaccatcatgaaccccaagaatctttgaagccgaaaccaaattaaattcaaaatcattaatccactccaatgtctgaaccgtacctctccaagaaatcacaatatcccttctcccaagtgcagcctttccttcatctgtggccacagccacgtaccccatccaatttgattccttgctccaagcctctctagacagagaccttatcagaaacgcatcaggcacatccacatgagaagtcgcataaaagaacttggtcactctgtacttattgaaaggagtccctttcaccagcccaaccttgtcaaaaaagttcttcctcccgaaccggctgcttcctgcgaatttcgatgccttttcagtgtcgaaagcatcgtacgaagcttgagccatttctccatagtgaattatgtattgccgaagatcgatgttgagagggtccaataggtctttccagttgttttggccgctcagttgtctccatatgctagctatgttatccattttattgtagttattactggtgttctttgtattcttctttttcttcccaaagcacttcgggagaacgagtcctctcagacttgttcttattgacgttgcttcagtgttctctgaatccattttggaaatgaatttgtagttgcgtttagatttcttgatgatattacctaataccttcgcattatcatgataaccataaagaaattgcgtttctgattaagagaataaagacaaaatttataacgggcgcttttcatgaagataaatcaacactacctaacatatatacccaccaatatagaaaatagtaatgggtgcagcccactaaaatgcgtgatgcaaccctctttcagcatttataaaaaaattaatttttagtttaatttttttttgataatagtgtacattataattataattatttaatacattatccaaaattttaagaaatttagaataatttacaatataaatttttcaatgttcaaattgtctctttctcagcctgtaaaataaaaaagtggcatatacaatagattctttgaaccttattttaagcgtgttaaaattttccaaaatctcaaaattttgtcaaatgtcttaaataagtaaaacataaatgaccataaaaaaatcaaactaatttttttagatattgaaacagtttaccgagatttttaaaaaccgattatttagagcttaaggaaaatataaaacgataaataatggacaagtagttttttacgtggtttgacagttattaatctttagtccacaactctgttgtattagccttaccggtgagtgtttaagtatcaaaagaatttgcaatatgaatattaactctgtattcattttatttctcttagtgaagaagaaagctcacagaaattttttgcagaagttcatgtaagtaaaaactattcaccctttgtatataaaaaatagggttatttataggcatatgtatgggtgagggcatcccctccacccacctagagttttgtactcaacatgtttcaaaggctagtatttacaacaaggtgatatgaccgttggttggtaaggagcctcctcatcgtgtggtgttaggccgctgcaatccaacttatggggccaaggacacgtgttgcccaaaggtttcaccttgcaaagttagtttctagacaagtcgttggagaaagaggagctacagagcacttacgtgcactaccacagtttgacacaagggacaagatttgatttggtgtcagaaggtatgcagctgttgccttcagctactgatacgacacacatggttaggttccaaaaacatctcgctatggctttcccaaatcagactaacctactataatcttgaagcactcatcacttctgattcttcttcatagcagttttattaattagaatcttagagtccttgccttcactaacaagaagagcctcgaggtagcttctggtatataacatcatccgtgatgccgagaggcagagggaatatactaaccatgcataatctaacatggcacccttccacaatttcccacatacatttcatccaagaatacagataacatttaccccaagctctcgggactcatgagtgttaggagcttgcaaatttctcccgaatgtttgtcttatttttctgattcgttgacaaagtattggaatgtggaagaagtcttcgcattgccccaagcatccgaagggttataacattttgtggtattgctgtcaatttgctgatgtgtggtacttgcttagtgtagtcatagggctcacactctgagtttaagcgcgtttctcgtgggaagcgagtgacgactataattgaaaagacactaggtttctggcacgtcggggatgtagccatgatatgatgactaataaatactttattctatttctttaggtgcattaaatgcaaaccttaccgttggatggcgtaacctttgattaattcaatctagaccgtgcatttaaaaattatttgaacagttcccacccatataaatgagagcatgggcaattagaatcttttccttccccaccttacgcaacaatcccttccctagagaaccctgtcaaacgaactctttgacctagaaaccctcacctctttccacctttctgacctaagaacatcaccctctattctcgaccacagtgtggtgttacttaacattcatcactcaccgaaacaattagcttaatgtttgagcaaggcgcaacttggttactaagcaatctatagaactttagccgacaacgaacaaccactatttcatcttttaatccgtctacaagtaagtttttcttttactcaaagcaatatttctagacttcattgtgaaatatagtttccaggtatatctttcatccttctttgatttttctatcagtttaaaaagataactttatttcttggtcgtattctggcttattttttacagcatctatccttagaattatgcttaccaacgagttgtgacaatagatcaaccttctacgaagccttctcaaacgaggaacttaaggtagaggaatcggtgacttataagctgctgtgtaaggcttcatagccacgttctaaagcattcatgaagttgatggcaggggtcaacctcaaaccccaagtgacttaaggaacaaaaggctctggaatcaccatttttgttaacaaaagcgagtaaggacgaggagcttctcaccgtcgcctagtacaatcgtcaccccaaacccctcactgaggaagaggaaatccaagttaggtttgtggtagcatatttggatgcaagcgcttccggaacgagtacttctagaagaggtaaatcaccctttcacgtaatttttacccccaacctatcttgaatgtcgctaataaaccaagggggttttgagaattttttcctaagctttgatcctcgtagatatccaatgaaggattattcgatagaatagatcatatagttaggcaccaaaataactcagattcctccccaaatgtaactaaagtgggtccctttcttaccattgttttcctgggcttcaaggaatatgataactttattggccgggaataagtaactttatttgcaaggggggaaccttatagttacacatttcacggttgcaatcacttgacatatctattaatttaaggtgtgttatttaagttgttatttcctccctttttgactgatttagttacggtggtgttttgaattttccagaatgcttgagtccgagatattgagcaatttgatgagcactatccagaaggttaatgttgtaggtgactgtaagaggaaacagataaagtcccgtgccaaaaaggtcaaccatatagtggaccctccggcacccccaattgactccttggggtggaagcagagcagcaactaagacgttagctttgaccaatgtttgcctgaagatagggaacccatgattccctcagacgaagaagactctagagaagtgttagtgttctcaaaattggccacagcattgaaacgcgccaacactgttggatatattttacc

SEQ ID NO: 266584 - DNA, 3749 bp, Cannabis indica
gttaccaagaaacatctcagtctccatgaatacctctgctggagatcttttaggaaagaataaacaaaaaatgggggaggattctgcaagtaatatggcaccagcaactttgcttgctactgaccacttcaacaacaaaaatattcaaattggtgcctctgttagggacatatcacaaggactgtctgcacactccaaacaaaataattttaaacaccccacaagacatggttcaacatttcccattgcaatttcctcaagcaaagatctctccaaatccacttccaaagcagtttccaatccatcattgaacccaacattcccaccatcacctaatgaaagtgatctatctgatttatatatgccatttgttggacaacaaagtgggtacatagccacatatccactagaagcaaattctattcacacattcaacaatgcggctgtcttcactcccatgcgcactaattgttcctttatgacagattccactatttgtatgtctactggtgtggaaaatgacaaggaaaactactctccaaatcgtatgtgcaaaagaggtcctgaaaaaatgtctatgaggaagacactcaaacgatgtaggggacccaaaccctccctctcatcttcaaaattgtcgcctgatgatgagatgtgccagaatgtttctgaaaaagctgcagatcctactggtgccgctgacaactttacgaaggatgctcttcagcctcgcaaccagccatgaaaattgttagctggaatgcgcgtggcttggggaatcctagcgcattcagacaactgtgtttgcttgtcaaacaacaaactcatcatgtactatttattatggaaactaaattagattgtaatgttgtttctcgtttttgtcaatctttacatttcaataatggacttgaagtccctagggtaggtttaagtggtggtctcctcttgttatggacagacaatgttgatgtaacactccttaatttcaatgcaaatctttttgattgttacgtgaattgtgataatgggccaacttggcatttctctgctttctatggcgcaccagaaactaataatagaattcacacttggaagctccttgagcgatgtaaggatgtcgcccctttgatgccttggttggtgatcggtgattttaatgaaattctttcaaaccaaaacaaacttgggggtgctctacgaagtgagtctcaaatggataagtttcggggtgtattggatttgtgtcacttacatgagcaacctttcgaaggagatccttacacttggatcaaaggacgtcacaatgtaaatgctattaaggaacgacttgattggtgctttgttaacgatcaatggcaaggttgttttgtgccaactacaacacaacaccttgactattacaagtctgaccatagagctatttcaatcacggttaggcctttggctagtcaagctcaaagcgttcaaagacattcaaggttcaggtttgaaaagatgtggctaagtgaagcagcagctactgatattatacaccagaattggaaaaaaaaacctgccaggatcatcaattgagaacttctgcagcaacattgaagcctgcaccaactctctccaacaatggcataaccaaaagtatgggaatatgaaaaagaagatcaaaaaagctcaaaaggaagtggaggatctcaataatgaggcagtaagaacagcggactctatgtcaaatctgaaaaaaaaaatggaggacacattggaggaattgttgacaaaagaagaggaatattggcaacaaaggtcaagggtcgattggttacaatgtggtgatgagaatacgaagtttttccatgcctatgcctcctcaagaaaaacaaataacacgattaaatcgctgcaaaattctgcaggagtggcagtaggatcaaagcaggaattgacggatataatttgttctttttttgaggagcttttcacagcatcaggtactgatgtacctgctttggatcaggttattgaatcaattcctactactgctacggcagatatgaatcgtttcttgctgataccttttacagagaaagaggtattcgatgctctccgaactatgagcccagataagagtccaggaagtgatggtatgtcggcaatgttttaccaacactactgggatcatgttggttctgatgtgactggtcttgtgcttggagttttgaatgaaggccatgacatgagtagagtgaacaagtcaatcataactctaatcccaaaaattaagaagccaaaagctatgggagattatagaccaatcaacctttgtaatgtaatttacaaactgatatctaaagtcttggtgttgcggtttaaagacgtgctgcctctgtaatatctgaaaatcaaagctcttttctcccaaaccgacttatcacagacaacatactggtggcttttgaacttgtgcatcatctcaaacacaagacacaaggtaacaaaggctactcggcacttaaattagacatgagcaaggcttttgatagagttgaatgggactatttatctgctatcatgggcaaaatggggtttgaccaacaatggatatgtctaatcatgcgatgtctctcctccaatagcttctcttttcaattgaatggagaaattgtaggaaatgtttggccaacaagagatcttcgccaagggggtcctttgtcaccttatctcttcttaatatgttccgaaggactctcacgactactgaaccgagaagaacatatgggtaacttgttaggattgaagcttactaggcatgctccgtcagtttctcacttactatttgctgatgacagtctcttattttgtcatgcaaagaagttcttgatgtttgctccgtcagtaattcagccgtggccatcaaagaagttcttgatgtttaccatcgtgcatctggacaatttcttaatactcataaatcaatcatgtccttttctcccaacactacagatgatgcgaagaatttctttagtcaaacgttgggaatgccgatttgtgagtgtcatgaaacgtaccttggtctccatgcttattcaagccacaacaaaaaagaattgtttagcaatgttaaggaaaaaatttggaagctgcttcatgcttggaatgaaaaactcttctctgtaggaggtaaagaagttctcttaaaggctgtggtccaatctattcctacatacgctatgagttgtttcaaactaccaagtgggttctgtaatcaaattgaatcaatgatagccaatttttggtggggtactaacaaggatggttcaaagatccattggaaaaggtgaaaattgttatgcaaatcaaagtttgaaggtggtatgggctttcgttcgtttgttgatttcaatcaagctatgctagcaaagcaggcttggagattatttctcaagaaactccttcctcgaggcgcatcttggacactctccttccttgacatggcaaggaatacactgggggtagggaattgctcctaaaggggctacgatacaagatcggtaacagatttcaagtgagaagtggtttagatccttggatcccaggacatgatgaattcagaccaataggctttactggtaatccatctttgcctgtatccacttttatacttgacactatgaaatggaacatggatctcttacatgccaactttgctcaaatcgatattgatcgtattgtaactattcccttgagcttttaccaat

SEQ ID NO: 266585 - DNA, 2502 bp, Cannabis indica
aactctttttgggaaatctccaattgtctcaaaaagttggagtattgtaactcattttttatatcaataaatattattttctagatttcatatcagtctagggtgtattatactgcaaattaaattctttccatcattcattccatgaccatctgtgagatacgatttgagtcaatttgatatccaacgagctactgtactcttccatttttcaagggttacaagtttgagtctacctaatattattctgaaactgaaaaataaaaatgtgtactcctaagaaaaattaaaaaaaaaaaaataggaaaaggtacaacataagctaaaattgaaaggaattgcactaatttttaacgttgtgagaaaacattgtgcatccttaatgttatcataattgtaccagtactattttgagtggggaagttttgccttcaaaataattaacttcaaatgatgataagcaaacaccctaatatgtatttatacatatataataaggaagaagctcactgtgagtttcataaatattgagattgtggctatgtacaaagacaaaacttctcttgaagttgttctggttcttaatggtcaggaaaaataggacacaacatcaacttcaaaatatgtacttctagtgattttttttttcctttaacaaaaaactccaatagaatctccaactgagcaactttatagagaaacacatggcccttttctgactcatgttagatttttgaattaaggaatgtgttcacacttactcatgtgctgcaaaagggaatttgcttttctctgagctctatttgttccagactttgaaagctccactaaagattcatacacaccatactgcagtgcacccaaaatgaaggaagaattattcaaacccaactcaagaagaacagatgtagcacattctttgttcttaggagttcccgtttgaataattcttacgagtgtttcaatgaaggacagtcttcctatctcacttcgtccttcaggatgtgatgcaaggagttggaggattgaaagagcttcatccaccatacccaagttcttatcctcaagaagatgtagcagtggtggtattatgccagccttaatgactctggacttattggcttggtttaaagacaagttaaacaaagcagtggcggcatctttcttacctctaattgtcccactccccaaaagctccactagtggagggattccattcaaatttcccacgagcaatttgttttcatcgatcatcgataagctaaacaatgctgctgcagaattctctttagcctgaccatttcctttttgcaagacctcaattatggccggtatggctccttctctagatatgagtcttttgtttgcctcgtcaatcgacaagttcaaaagggctgtcacagtttgttcttggatctcagaatccggataggacaatagctgaaccaaaggtgggattcctccactgctggcaatcaaaattctgttctctggattctctttggagagcatacgtatcttcacaatggcttctctccgcacatcaagattgcaagagtaaagatcttggactaaggaggagatttcctcaatgatttcagcagaacaaccaaaaggagggagtattacaggatctttcctgggaagttcaactttgttctgctcacaccactgcctaatcacattcttgagagcaaaatttggcgctaatgacaaatgatccaatgtctgtccagtctttggacatgatctacgatttgaaaacagccacttctctatgcttgctctttcataagtcttcaagaaaataaaaaagagggaaaaaaagtagcatctcagttttacgcaatattaataaatcattaaaagatcatttttagcttaacatttcaggcttattttctctaaagtcttcagtgtttagaatgtattatatacttttgtggaaaaaagaaaagaatgtattatattgaccaagtcattaaacatagtcattccctagaatggacatggaagtagttaagacttgtttacctgaccacttgcaacaataacaggatcaatcatgatctccaacgtgattggacaaagaaattcatgtggaattaacgaagttggacacctctgaagagttttggagaaaggactatcaaccaaaagagcctcatcaatccctgcaatggccttaaacttgttcaaaagatcagtcatctgctgaaggctttcagagttctgtcgtctcctctttagaagctttttaacggcaaatgtttcttctttcaggtcagcaacagtatgcagttctaacttggttgctagtctttcaagtatggcactatcagcatttcgatcatcttttttcttagagaacacaaccatcaaatccattgctaactccatatcttgtgtatcagttcttctccttgctctctgaagttgtgtatgcattaactcaacctgatgcaaatccatcaaacacagaagtaaaatatctactttcat

SEQ ID NO: 266586 - DNA, 4326 bp, Cannabis indica
tccgatgcatactccatacatccaacccaagcttactttaaccaatgccctagaaaggacatagcacttatccaaggtgcaagtaaactacgttgtagattatcctatcagttaaaccctgtgtactgataaatcataggaatacatttaatcacacaatcttgattactttccactctgttgacaacacaataaacaagaatatcagtgtgataaggatttggatgaatttataaatcaaataaataaataaatgatcacgtgaaccaaataacacattaaacaagtaataaaattaaatctgtttctttattgataattgaattaaaaagattacattgaaatagagttttatttagggcacaaagcccaacaaatatcagacgatatgatgagtgaactattataaattgtggtgttctctttattttttattatttttatattttttgctttcgcttatcagacgatagagatttgaccattatttagcctcaacaatcccattagatggtcatgtttacatgcacaccctagcgggactctgatatactcgaacccagatcctagcctatatgtactacattttgacttcatggaaaggatttgaaagtcattgtgtaaacactatagcacgaagctaggattcttatgcttgtaaagaactccattgtaatacatcaatgctacctagttaagtacgattgactgatgcactagggttcgttaatacacaaaccacataaaaatcgccctctcaattttatattattgtatttaacctttcaactcttattataatgaatttctgaaaatctcaataaatattttggttatttcattgagaatttaagaaagatttgaaggtacattatgttaataatggtggctaccaaaaaaaaccgtccttgtacaacccacttcccaagatcaagacgtcgtcatccatggcgttaacccacctcccactgtgcacgcccaatcgagcattgtgaaagttaggaaaacatctaaagcttgcattcgtccaaccagtaaagcgcatcatcaagagaaatttattggtgaaaacacaatcaacgaagacaacctagaagaagaccctaagggcaaaaacatgatgaggatgatggtggagaaaactctgagattaaagatgggtattattatgagcaagaacccaaagtactccgagtggttaatcaacttgctaaaacccaccaaaagttggcaacgcaagaagagttctcctgccaaatgcaaaaaatattaatgcggctaaagtataggtttgacgtcatagaagagatctccaaaaagaatactctagaagagcttgtccacaaggacaataacctcatgaaaaaggaaaatcttactgatgtaggaccctccgcttaagaaaaggataaggggaaaggaaagttgggtgaacaccaaagaaaaactgctcctacttctcctacaaacaatgtgaacatgactaaccaacctctacaaagaaagaaggcaaccaatgcctcaaggctaggacacccttctaattcgtaaggtagagttacacaaaatgataggcccggtgctcaggtacaaaggcctaccgttaatgtatggaaaaaccaccgtagtgattccattaactaggacgatggagtagagataatttctcctgaagatagctggtccactattgacctttgtaagtgccttgatgccaagcggaaaatacaaaggtgaaaaggcaaagcctcatggaaatgatctttgacaccatataaatcacaagttttatgggtgcatgcttctagaaagtgatactaaatgcttggaagagaatatagatggccagacaaagcttgtgcaaaaacaacgtagaaccatcttgaattcagaagatgtggatccagaaccttgtgttaggcaaatcattaaggctccaatacttgaggacgaatcccaaaactcatttattcaaatacaagaagctcatgcaagtggccacaactagtgactacgccaaatgcctctgttcttgctgacgctaacaaagtcagttaaaaactagtggaaaaggctccccacccctggatcgattcatggcttgattgtgatgcttcggccaaagaggccatacatcacttaattgtaggacaccgagttagtgagttggagcctcatattttcatgtgtttattttgaaaagaatgttgaggaatgctccattgtctaccattatcttgctgcaattatattctcgacttgtgcaataacgacaagggggtcattgtgcgggaaactttcttagacaagatctactttttaagaaagagatcatgggctcttaaagctttggttgcttagagcctcatctttgcatgcgagggattcgcttttgggctcgtgacggagtgttcgagcatagcgctctatggttttcttggtctcgcctacaatatggattccgtgaacaacgaccccaacgtgtcctgccatcggaggtttaggcatagttggtggtacctgcctgtacactagccaaagatggaggccaaccctcggagatggaggccagccttcagaggcaggggccagacttcgcagatggaggccatccttcagaggtagaggctggacttcgcagatggaggccagccctcagagttggaggccagccttcagaggtagaggtcggacttcgcagatggaggccagccctcagagttggaggccaaccttcagaggtagaggccagccttcagagatggagactagccttcggactgcctgttcttgacttgccatgctaatatgtctggacatgctgtcctttgggagctttgatagaagagtgaagcgtacacacttctcgtcctttttccttggacttcatagcataaagaaatcgttgaatttccctcttttgccattatgttggtcagtgccatcgttgttgcacttgcctccattattctcgttgtttgagaattgataaagatcgtgtatgttgttcggcatgtcggatgcctctgagtatgggcgtatattggcttgcttctagtaggcctgtgaccttggtggcctctgccatgaactgttgaatgtagttcatcaagggttcatcttgtctttgctttattttgagaagattctccaggtatttgtcttaaagcagagaactaaaaataaaagtctcgggagagctcttcccaagaattaaatcttcttgtgggtcaaaataccattgttgggctattttagctagagttaccaaaaacattcagcgtcgcacatacctagatacttgtaggagaactttctagatctcaaagtacttcaggtgtactagagggtcttcttttctagtgtacatcttccaagcctacaccttgaaattgaacaagggaaaggcattgatgcatgtcgagaatggtgatcccttcgctctgtctagcttgagttctgaaggttttggaccagctaggcccttgatcatgtctcgtatttgatcaatttatgcttacacagaaggatatgttgctgcaggggcttggttgattggccttctttgattaagctatagccttagattggccagagcctagtcgatcataccttgggagagggtatactcaagtctgggtagctctgagtctggtgcttgtacatggtcagctagccctaagctgggcaaggcctggccgcccacacttctctgccaggctagtggagcttgtgcattgacatagggtagatcacaccagttgctggagtttggtggatccgactgtctaaagtgattaatttcacttccaccaactcctagtctcgattctcgttggttgaaaattgacctttgagtgacatgctccccttagggagggagtgctcttctctagctggccatagggactcttggaggagtctggctggccatgggggcttctagaagagtttggctagccatggggactcctgctggtggttggccagccacaagaaggacagaggggttgttgttgagcctgagatccctaactggccccccatgccgctggttgccaggattttgttgttctcgtcgttagacctttgagacaaggtatgtcctcattctaaagggaagatctgtcctagtccccgagggaccaggttggtcagcttgtcgatagaccctatttaatctatcaacaagtcttccttgaagtagatctttgatgagatcctagcctcttcgaccggttctcttgttgaactgccttattaaatcggtggcctctctattgcagcgatctaactcttgctcgtgagatcgaaggatgtgctctt

SEQ ID NO: 266587 - DNA, 939 bp, Cannabis indica
agtaccaatcaatccatttaagctctctttaactatgcagtcctatacctgcacagtctcagaatcatctcacttgaccttccccaggcgatgtggaattgcacagcttacccggtattttcccttacggatcacgggactactgactgtcacataaaattaattgaaacctagatagtaataaaattttggaagatggaaggaagatagatgcatgcctttgttcagaggcactcaatcattgatcaattctttgtttattatttcttatccatttagctcaattttacaatgttatcaagtgactaaaataggcataattgttagaattttagccacttgttagttagcaattaattattagttaactataaattaattgttttcagtcttttgaagctcggtatatgcctatatatagagcatttagttatcaattccaagtgacgatctagagagaaaagttaagaaaaaaagattgagagattggggatgtactgggactgtatttgatcacatcaccctcatgtgagtgatttgtatgtgcatgaaaccatttctgttattgatctttgatgatcaattttgtaactctgagtaacattcttctgaataacgattcgacacaaggtggtttctctcggtctcggcagtggcggatccaggcactacaaaaaagtttagtttagtcacaacaaaatttgtaattaattataaattatcattcttatgttgtgactaaaagatccgtggctaaaaatattagtcacaaaaattacaatttgttgtgactaaatgtgtttttagctagtcacaatatatctaaaactaaattagtgacaacttgtagctaaatactatgttttagtcataagtaagcttttgttgtgactaaaaatcacatttagtcacaaaaaaattatgttgtcactaaaagta

SEQ ID NO: 266588 - DNA, 2549 bp, Cannabis indica
ccccctttgagttactcaacatgacaaccccaacttacgcacacttgcaaagttttggctgtcttgcctatgctttcaccctcttgaactcacgacataagttcgctcctcaattgtctgcatgtgtttttattgggtagccaaatgggatgaaagcttatatctcctcgacattgacactaataagatttttcattctcaagatgtagttttccatgaaaatatttttcccttaaaacccagttccccgatcactaacatttttttttattccttcttgcatcaacctgctgccatacatcaacaggatcattccccaactgatggtccttccctccatgttgattcaagcatggcatccaaaccatcaatgacaccttcccctgctcctacagcctccaaatatggcaaacccctcactcgaccatttcatttacaagactacacttgtatcgttgcttctactgctcatcctattgaccgttttttgtcctatggcaggttatctaactcttttcgggcagccatcttgtctgtacacgccatgagtgaaccaactagttacaaataggcttcccaaatcaaagtttggaatgatgccatggatgttgaaactactgccttaaagcaaaatgatacttgggtcgttgtccctttacctccgggtcagcatacaattggcaacaaatgggtctataaaatcaaatatggccccgatggcactcccatttggtacaaagcttgattagtcgccaaagggtattcacaaaaataaggtattgactatcttgaaactttttcccccgtggccaaatttaacacccttaaagtcttacttgctcttgctgtcataaaaaattggtgtctccatcaattgtacattctcaatgcatttctccatggagatttgcatgagaccatatatatgacccttcccaaaggttacacaccaaaagggccagtcccgaaaaaatgttgtttgccaactaaataaaagcttgtatggcttaaagcaagcctctcgccaatggtttgccaaactaagcaccacctttctccaaagtggttttcaccaatcacattctgaccattctttgtttatcaaacatgacaaagatattttcttgctattttgatatatgttgatgacatagtcattaccaccaacaacaacatagctattgaaagtttcaaaaaacatttaaataaacatttcaaactaaaagaccgtggaccactccatttttttcttggtcttgaaattgctcgttctaacaatgggatctttgtctcccaaagaccttttgttttagaacttatgtctagtacaagttttttaggcactaagcctgcttctactccaatggagccaaactcgaagctcagtaaggacactagcgatctccttccggatcccactacctacagaagcataataggcaagctgatatatctcactatcacgcgacctgatctttcctttgctgtaaacaagcttaaccagttcatgacaacaccgagaacacctcatttacaagctgctcaccgagtactctagtacctcaaagccactccaggtccaggattatttttttctgccaattctccctctcagctcactgcctatgctgcatcaaccttacccgatgacacctctctctcaaaaaaaattttgatgctgactgggggacttgtattgacactcgttgctccgtcactagctactgcatcttcattggtgattgaattatttcttggaagtccaaaaagtagcccactatttctcaatcctccgccaaagttgagtaccgtgcaatggccaacgccacctgtgaagtcacttggttgataacccttctcaaagacattgtcgtctctcatcgacttccaaccaatttatattgcgacaatgcagctgtcatacacctcttagagaatctagggtatcatgaacgcataaagcacgtcgaaattgactgccacattgttcggaaaaaactccaagcatgctacctcaagattcttcatgtgtcctccaaactaaaccttgtagacctctttaccaagcctcttttcccttctcaattcaaagatttattacacaagctaaatgtaagaacatttatacatcacctcactacaagaaaaggcctttttaccggcgcagttcgtcaaatgcaccggtaaaagttttcgacgtaaagcaaaagttgaaatcccatttacatttttgctttatttttgccggcgcaatattgcgccggtattactatgttttgccggtgcaatgatgaatatgcgcccgtaaaagtgatgaaatgaagcgccaataggcacgaaaagtttaccgcctttcatttcatttattctggcgcttgtacacttttaccggcgcatatatgcgccagtaaaagtcccaaaaaaaagagaggaaaacttcccgcgtggattttcttggtaggtggggatacttttaccggcgcaccattgcgccggtaaaagttgtaaatgaaacgcgttgattttgacgtggcaagtggggatacttt

SEQ ID NO: 266589 - DNA, 5753 bp, Cannabis indica
tatatatatatatatatatatatatatatatatatatatatatatatatatatatatatattattatatatatatatatatattattatatatatatatatatatatatatatatatattttataaaatatgttaattaactagcatacacgtaaaagatcacacaaaaataattacactaaatttttttcgaataaaccctattaaagtgtattataaaaataataataataataatcgataattgtatcaataaaaagggtctcatttcccgcttatgttgtttctcttcttcttcttcttctttctctctctcattattatttcacttcaacttctttctctctctacaaacaacaacaatatgaactcccccacatatggatctgacccggtttcacccaacaccaccttcgtccaagccgacccatcaaccttccgagcggtggttcaaaagctaaccggagcaccagacgacccatcagcccaaaaactcccactcactcttccttcccgtttcaacaaccccaaacccgtttccaccgatatggggccccgaagacccgcttttaagctccacgaacgcagacagaacactaagaaattagagcttaatctcaccacctccgcccctgccaccaccggctacggcaacggcaacggcgtctctactaatgtctctttgggccgttacagaagtggtgggtcccttactggcctcgtcggcggcggtgatcagatgatgatggtttcgcctgtttcgccgtttgaattcttggcgcgtgggagtccgagaactccggtttcgccgtcgtgtatggaagaggaagaggagaaagcgatcgccggaaaagggttttatttgcaccggagcccgttgaatacgccgagaggatcggaaccccctgagctattgactttgtttcctctgtcttctccaagagataataataatactaataatcacactaattcttcttcaacttcttaattaattaattaattatattttattaagttagataaattaatctactaaacaatttttaattatctatgttaatttaagtttatttataatgtgaatgaattagttatttatttagtagtggacaattgagtttagatatttatttttcttgggcatatttcactttttattatctgacaattttattgataattggtttcattttgaaactataatttttgttctttaattattagaaagtttgtcgttttgggaaactacacaaaagattttttaagttgtgtttggtatagtatagtagaatagtaataaatcattaaattgtaacaagaatagtatgtttttatgattacatcaaaccaaacatgcccattataattttgtaagattaaatttactaatgaaagatattcaatcaaaaaagaggatagaggagcagagaaagagaattactcaatgaaaaaccatagcattttattatgaagaaaagtctccaaacaaaataaaagaagatgaagactaaatttattattattattattataaggatccaaactaaatcaatagaatgaaaatgacttgagacttgaaaattcctctctattgtcatacttttttacattgtcaaaatgtgaaagtgagaacttgcattgcatgccgaaagctgaaaaaaaaagaagaagaaaattaagagaaaaataaaactcactcactactcactattattatctataataatatcttcaacgaacagaagcacatatggttgtttgattgtacaaaccattcactccattactgaactgttgcttgtttttccttctctttgtcactactataaatccttcaccatctccatttttcatatttacatcagaagaagaatcagttgattctgaaaccatgtcgtttgttgtattcttcccttcatttccatactcaatctttataatggcactgtcgttttctattgcatctgagttttgcttaaactttttcttcccactgtttccagactcactcggagagtccatgttatgttgaacagacttgacaatgaagctaagtagaatttgccttgcaagctctgatttttcagactctgatatgatctttttaccactctctttagtagcttcaccattggatttcacagcctcttgcaatgtaatttcaattgatgaattcgaatcggttgggacccctcctacagggtcagtttgccatgctcttcttggtacaaactcaggtgcattggggttcatgattctttgaggccctgatccaattctttccaatgtggggtttggaaacttgagaaagtctcttctcatgtggaaagaatagttggttctgtaatacaacgccgaccttggcccgcaaggtactctagcagccacaggaggaactactggctctgcaagcatttcttgactgactcttacatcataaacacttgtggcaggtactgagcttaaggggtgagacatggttactggtgatggcttgaatggctcagctgctgcagaaagtttgcttccatttttatcttttgatttttcatcttcaacttcaacttcttcttgttcagttttgttatctctatgagtctcactagcaacagtttcttcttctgtttcactctttgtgattgcttcaactacagagtttgcttttactttcttcagtctctgatgatggtgtctctggtggaacaacacttggtgttttggtttctggtttctctaactgttatctcttcttctttatcaaacactggctttagaaccgttccaggtggtgccaaagctactttcctttgtaagatagagatttttgaagccatggtactatgagtggttggtgaggaagaactttagatacagaagctcttacccttgttgtttctgtgaagaaagctcagtaggtaatagtagtagacttggggatacactttctgagatggcgaattgatcaccttacccatttctgtttttctctagactttgaatgttcattctgtaacttaagctttgaaagagctggttttctacgtccaaactttctaccggtagcagtgttccctgaacggctctttgaacttgcttcttgccacccttcatctgaagttgtttcttccacaacttcgctaggcgctataaacccgtcattttcttctagctcttgaggaggagaaggaggaggaagaggcgcgttaactgagttaactttcggatcatcctctttctctatgctattatccactacatcatttggtgtgtcattgtcagctattggcacttgatgttcttcactgaccttatcaccaatctgtagtacctgaaaatttatggaacaccagaaaattgaagcataaataccaaacttatgctgtgttctcaggtgaagcaagcaggaaaagagctatgtacctttgctcttctttgcctcttttgtgcgtcgcttcctttagaatcttgatcaggacttatgaaatccagcagatcagatacactgcaaaaaaaaggtttaatatgttatggtgccaggggaagttatgaattactttgaaagaaagttaatatggggaataccatatttactacctaagatgacccttgcttgcaattaaggcatctggctttggggttccagttctagctgcctcttgctgctctaaagcttttgattcgaaatactcaagccatgcagccgcatcctgcaaaagaacagcataataaaaggtcaaaaatcactactttggattaaaaacaacagaacagataatagtacagcgacattgattgaactacctgagttcgaagatcttcaggcccaagtttggcttgaagtattttaagtgtagtttgctcatgttggacactgagagaatatgcttccattaatgaaagagcaatagctatggcatgataactagcagcagtctgcaagttcaaaacaacaaagaagacataaatatttagacagggagagcctataaagtgttggtctttgagaaagagggagagagtgagaaagatacttgtatgtggtctgctcctaatagtctttggttgcacttgagagcttcatgtaggtatcttagagcaacatgaacattgcccatgccctcttccatcatagccacattaatgtatgttgctgcagtgtttgggtgagatagtccacatgtaaaatggaggaggaataaagctcgattcacatacctacaagcaatacacagtttaatcaagataataatggagaaaaggtaacacaactaaagcaatgtaagtgagttatgctgccaaaacatgagaaagaaaatggttgaggaaatgaaacatattcctacttacttcaaagccaattcaatatgttgaaggcgataatagaaaaccgaaagatccccatagcttttcattgtatctggatgatctaacccaagctccctctcattaatatccaaagccttttgctgatatacagttgcctttgaaagataaaacaacagtaatcagaaaaaaactatcatcttagttgagaaacactgctattgtcataaccactattgtttgttacctgattgaaatccccagtgtggtaaagaaccactgcaagcagactgtaagcactagcagtagcacgatgattgggaccgcaaacagctatcatcttcgttagagccttcaaattcagaagataataacagttaacttctatggcattaatagaccatacataacttctatgtacaagatagttgagttagtacctttgttccataattaacagcatcctcaagctttcctttatcgagagcaactttcgatgactcaagaaaattccgaccatcagctgaagagcatgctacatgctgtgtaatgaagggggtaaagttgattataaatttataatacactctaatcacatttagctccctcagagagaacaaactctcaccttgcacacaggaaccaagctaacaatgtcatattttctgaaggggtttgggctttccatgtcataatctctggggaccaactccaacccaacctgggaaaatagtacatattcaagatcattacaacgttcttcattgaaactaatagtgacagtgacctataagatgataatgatgatttaccttatggcaaagtccccggagaattgagtactttctcaagtaaggaagttcttcttttagtttccaaccaaattttcttgataggtatgcttccaaccattgcaacttgagtgaatgatcacctcttgggttttggtcattttcttgtgactcagaatgtccaagcaggaaatttaaagatgaggctattgcttcagacaagtctgtttggttgtaaacagaagctgcaataactgctttaagtacatgcttgaatgctctagtcaccatctcatgaatgcaaagtgactgtatatgaggaagcttgtctgcaagttccacctgttatacaatatcatgttaaaacaaaacaaagttttgaggaaaaagtttgaaactttggaatgaaaatctcaagttactaaccacacgacccaaagatctcatctgaagtcccctcaaatgcatgaaatcagtcagtgtacggccatcaactggagaaagctcaagtgacccgaaatctgttacctaatgtagtaaaagatttagctcataaaacttgcagaaagcatcataaacttatgtcacaactaaaaaacaaaagattaccagcttggtagagcaacttcatcataa

SEQ ID NO: 266590 - DNA, 2908 bp, Cannabis indica
atcatctgatattttttattatttttaatgccaaataattcaaacctaacccttgtggaatgctataaataggtagtgaaggcttcagaaaataacacacttttcattcagaaaaaactgagcctctctctctctatacttggccgcccactctctctctcttctcttctaaaataatttccaacagatatggccaaccatattctctcgttgtccacctcaagacgaaatatttttgagttggtaatgagagagaacttcattaagtatggtctctaacctttcatgggcaaaccttaaggttaatttgataagatttccttaaagaagaaattaaaaaccaagaggaaagaacgcgagtctgaaactccctctgataaaatttttatgaagaagaaatcaaagactaagagggagagagctgctcgaaagagtgtcaagcaaggtgagtctttgagtgaggcccctgttctcattaggcctcaagagttagattctaccaggactatccgcccagcagttattaagggaaaggataaaggcatggccatcaaagagagtgaagagtcatctttatatgatgatggtattttgtatagccctccttaagatgatgctttcgggaggccgagcgtaaaacttctttactacatactgaacttatgtcttttgaaattagtttcggaccaacattttgtgtctttactggtatggcttcaaaattagaatagtttgtcaagaggaaggccgggggtacttttggggaagagtccccatccaaggttgctcagaaagatgggtcaagttctacctaattagttcttcctttgcctcctccttatgctcctctggcaaccagcccatggtggaaaacttggaaggacatcctcctcctactaggaagtcaagtaaggagcgccagagatccagtcagacattactctagtctgagtagagagagaaaaagaagttgtccataatcacctggaaaaatgcttggtttaggtggacgagcaactataagacacagacagcgagccggttgagaccttgatctcgggcctcttgaaggatcaagccctagtaaagtatcttctctcctttgaagctttatctctgctaatcacgcaaattttattctgacttgtaattttttattctcaaatgtccctgaagttagggcacgcctatgcccgtctcaaagggacatgtgttgctatcaaaaagaaggttgaggacttggaggcccagctcaaagaggtgaacaaacaattgtttgttgccaacaataaagtgaaggaactcaagtagtagattgaggacatgccatctatcacacggctggagaaggactttgaggagtcagagaagtgggttagggagttgacgggctagaaatagtccttgggtcggctgctacttgcccaagatggggaaattactagactcaaggaggagttggcagctgagaagaccaaactggaggaatcagagcagactcaggctacggagaaggaagaatatggaaacttggccattgagaccttattcaagttctagaaataaaaccctggggtgattacaaattcatgaagcctgagttggtcaaatccctagtagcttgaggcgaggaattagaggcatctaaagcccctaaggagaatacctctattcatgatgttgcctcttccaagcagcctactgatgctaccagctagcctattgatctagtggaccctcctatcgagccatcttttgagcctatcgcccaagaccaagctgatgataatatgaacccaattactccatttgacattccaaagctttgaagctcttattttgcttatctttttattttttgcacgaccataaaggccagtaaatttatgacatatagtctgtaatatcccggaaaataatatggtacttaattggacatattttattaattatgaaattattttggtaatgaggtatgattatgatcttacttagattaattagtgtaaatttattaaatgattacataaagcgtaatttattaattccggagattatatcggaacatgttggtatcgtggataccatttatggaataaaataatttcatatttggcgactatggaaactcgatgcagtagtcagaaatgtcacgttagttgaaattatgttatattggagttataccggactaggtttaaaggttgtgaagttggtttaatcggggaaattaaaaaataaccaaaatacccttagggttttatcttgatttttgtgcttaagaggggcaaagtagtaatttagtgggatttggtttttgtcttttattgcattttgtttggctagaataagaagttaatattagatttatatatatgctattagttaaataattaagttgggaaacttagaaaattaggaaaagacctacacttatccaagcctctctctcttccccttcgacaaccctaaacccaaacaagaaattagaattctccttgcatttcaactagttttaatgcaggattaataaaggatagcggtcttctaagtggtgaggtaagttctctatcttttcttgtcttgatttctatgttttggttgagttttagttagtgttttgcttggttttgggattatagggtcagttaaattcaaagcatattttttaagttatactaaagttgattggtgtgtgaattgtatgttttggtggctgctacgtttgaatttgggaaagttgagtttaagaactcaaaattcactcaagtatggtgattttgttattttaatgtatttctgagttttggatgttgggatatattgtttttatggtatgagattgttgtggaaggtttgaacaggtttacaagagttttggttgggttttggagcaacaaaccagagt

SEQ ID NO: 266591 - DNA, 2755 bp, Cannabis indica
ttattttgttgtatatatatatatattagtgtataaatggatttcttttttattttataaaccaaataaaagattggaactttgtatgaatttcaaactaagattggtataatagtgacaaggctatggtttttacatatataaatgcaaatttttcagaaaaatcacaaaaagattggaactttgtatacatttcaaacagagattgttattacatattagtaagtaagaatctgagatcacataatagttcaattagatgaaattgaacaatattccaatttgaaaaagagaaaaaaaattacaaagaatggattaacaaacacttgaaaatcaatcaatctactctaaaatctaatgttgttgttaagtaacaaacacttgaaaatcattgttgagtagtaactttaatctcacaatcttctacttgatcatcatcatcatcatctgaaacaatatcatccaaagtataatgcaaactacaagaaaaagtaagacttggtttgattcttggtacttccataggctcagcttcattactcaaaatctgtaagactcttctcattgtaggcctttcattactatccgggttagcacaactcaaccccacaagcaaaagctttctcatttcttcctctttaaactcgccattcaatcttttatcagcagcttcaatgatattcccttcagaatacaaaccccaaacccaatcaacaagattaaccatcttctgagtatcgatttcccgctctatcggtcttctaccacaagcaacttcaagaatcacaacaccaaagctaaaaacatcagtcttttcggttgctttaccgtattgaagatactcaggagcaaggtatcccattgttcctgcagttagagttgaaacagggctcttatcatgatccatgagttttgctaaaccgaaatcgcctaatcttgcattgaagtttccatcaagcaaaacatttcctgtcttgatatctctatggattacttgttgctcacattcttgatgaagataagtcaaaacagaagctaaaccaactgcaatgttgtgtctatgtgaccaactcaaataaggtccttgttggtaaagcaatttatcaagactaccattaggcatgaaatcataaacaagtaacaattcacctttctcaacacaccaaccttgaagttgaaccaaattcttatgtctcaaacaagcaataatagataactcagcaagaaattctgttttaccttcatgtgaatgctttgatcttttcacagcagcaattgtacctgaattcacaaagaaagctttatagacagtaccaaatgctccatgcccaattatcctacttgaatgaaaaccctttgtggctaacttcaattctctataagtaaactctcttggagatgttaaaagctcatgattgaagaaaagcttttgagttttaatactgtttaatcttctcacagacacataaacaaacacaacaagtgcaacaaaaaagaaggctggtacagctattccaagctctaaaccaagcttcttgtgatgattattccttgaagaagaatcagaatcaacttcaggaatcattggtgtaacaaaagccacagaattatcagacacattatgaggattttttcttgttcttaaagacaaaaatccatatgtatgaaaactccaattctcaatcaaatgaagctcagtacttccttcagttgaagctgaaaatcccacatacatattctctttaagatactcataaagattaatatccaaactcaaaatcgccttttcgggtttgatattagagtaactcaagaacacactcaacttctcttgaacattcttgtaatcaatccaagttgtgattacattcccagctttaagattaatcccctgcaacatagtattagcagttttgattgaattaagactctcaatatcaaacccaacatgattatcatttggatcatcaaaatgcatatctaaacgagtatcaaactcaatagccaaaaacttgttcttggtcaattgagaagaattaacaagacccaaataaccaccagggctaccaagaatcctattatccggcgaaagaaagaaagataacccgtccccgaaagagctagggtttagattagcaatggtgaaagagaatttagtggagaaagaagctgtggtattagtttctgagtcaaaaaacttaattgggttattgaagattactgttccagcacttgaagatggaacaccgagctctcttgttaacccaatcatgccgtttctgagataagaatctccgaggagtgtgaagtttctcagactgaaaaatgggaaatccaatctgacattatcagaagaagaagaagaaggtaaagatagtacaaaaggtgggttttttgagtagtaaagaaggaagcaaaagaagaaaacaagaagctttcttgaagacatttctatggagatttggactatttagtgagattgggagaagggtttttctgggtttgtgttggattgaagattagagagagagagaggttgaagatggtttgagtaaagattgaatttttagagggaaagtggggttttaacggttgaataaaataatgggcgcgtgggtgtgtgtggtcgttttctctaacggtaatgataaaaacgacgtagttttcagagaattaaataattccattattagtctctcaattatataatctaaaatttaatgaatgactacttgctcaaaattcaattatagaa

SEQ ID NO: 266592 - DNA, 4427 bp, Cannabis indica
aagcacattaaaaagctgtgatttatttgggaagaaattattatgtggtttttgaagggagaaaacaaaaacaaatttgagttcccaccgaacaaaccataaagcacagaattacataaaaacccctcccctttttgctcattctcaactctcaaatctgcaatagtatctctctctgattcttcaaatattccaaaaccaaatttccaaaatttatttctcttaatttcatctgctttcttctttcgaaatctcactccctttccttccatggagaacactcacaacgccaaattgggttccgccggtggcggtggagtcaagcccaacaccgatactgttgtcgccggtgaccttgtcgaaaaccctaatctcaatcgctcagatgatccacaacaagaagagcccgccgccgctggatcgctggagacagcccagtctcctccagctcctgctcgctcttcttccagaacaccttttactaatctcagccaggtcgatgctgacctcgccctagctcgaactctccaagaacaggttcgccttttttattttaaattttttgggcccgtttttttagggttttgacgatgcttctttggttgtcgagaagttatggaaattatggtttgaatgaatgcattctaaattaccctttttttaaatttttattttttgaatttgatcatataaattttggtttgttaatgcaatcgaacataaatgtttattaatattgtatagttatcggctttttcagtagctatatgagagtttgacgtcagttaattatttgaattttgttatttgtttatgctctgtcctcctaggactagggagtttacttgccattaccgtgaaagtttttaggtggcaacagtttgaattccagtttctaattcttgtggtgatccaggtggcattaccatatctttcaagggctaattgtctattatggactgtgtttttgttgtctccaaatgttaatgttttcaactctgattcagattgaaaataagagatatgattagatcttaaaatttcttaacgtcgatcgctataattatgtcttttctttgtgtctttttcttcattggttatggagtaggaaagggcatatatgatgctacgaatgaccacagaaggaagtgattatggaagttgggaagctggaagctacttacacgacgatgaagatgatgactacaatgattttcatgatgatacggatgttgatgatgaagatgaagaacatgagggaactgatgctgaggatgaagaagatgcatttgatgtgcatgcccatgcccatgatcatgatattgctgatggtggagaggacaatcaacccagtgttgaatttgaccctgctgtcttttcgagtgatgaagcttatgcaagagccctacaagatgctgaagatagggaaatggctgctagattgttagcccttgctggaataaatgaccgtgagtagcattgtaacaatgtttgtacttctgttcctttttcttttgaaagtcttcaaattatgaggtttgagaatttggtaatttctacgttttcaggtgaagatgaggactcggagccagaagagcatggaggcaactctcaggtattatttgtcgtctgtagggttttgaccaaacaccgatttggttgtttgtttgtttgagtataacattttgcagctacattctaaccaagaagatactgattaatatctagttagcaacagctagctgaatttcaaacatgatcacataatatagttatgaatccgattcatgctgattgaaacaaattcagttcaagtgatgatataataactataactttgtaatgtgaaagatgataattgaagtgttatgtggctgtcgatttaggttgaaacatggcgtagctgtttgcaaatgaagatcagcttaaataattttgctctaatagataatgtctaatctttgggctaatctggcctagttagtttccctaaacacagttgccctgtccaaagaagaaagaattttgctcataccttctctttgcatgtggttagaacaagaaaaatttttagccactctgcttggcctccatcttttctttttcttctttctgtaagcaccaggttgagttgactattaaagtacttattgtcatatattcaattctctagtttgatggatatccttgtcatgaagaaaccatggtgtctctaagctcctttctttcttgctcttaaataagtggagcatatcatacaaccagacgatactttatgaatatatgtagagtactttcagtcaagatttccttttaggtctctgtttaaaatgtactagaattataggtcttgtttcagggtactcttctgcttgttttttgttcccttactaagcgacacttcttgatttacatgcatgcatctcaaagagagtaattatttggaacatgggggcctataaactttagtttattagtctaaactgatatgccaatgaattaatggtttaatatatatatatatatcattttcttgtctttataatcgccattctttgcttatatatactgatctattttgtatttctactgtctttggcttgcaggatgcatgggaggaggttgatccagatgaactttcctatgaggtaagctgaccttatattctagttcttcaaatgaagcataattttatgtttgttcaatcaaagaaagcgttcgaattatttcaggaattgcttgcattgggtgaagtagttggaactgagagcagagggctttcagctgatacaattgccaacttgcctacagtaaaatacaagacaggaggaactcagaatggcagcaatgattcgtgagtgtgcattttcataagttttaagcctttatggctatatcatatgtgctctttttatttatttgcttttttatttttccaggtgtgtcatttgtcggtttgactatgaggatgaagagaccttgacattactctcttgtagacattcctaccatcccgagtgtataaacaactggttgaacatcaacaaggtatgtttaaatttctactctctccctttttagtttcattaatagactggttctctcctctttaaacttataggttagagaaaagacagtgttatatctataaaaatttcatttcttccatgttttgtttttaaccttgggacctaattgttttcaaatagttttgtattagctctgtttttttgatcaacttttgtatcagtcatgttatctgatttattttgtaatttttaaacaaatatggcacgggcaatgtttgtttaacaaaattttgtgttttggggaggggtgggtgggttggtatgaactgctgaatgtggcacatctctcttctagggagaaatgcagtccaaaccatgtatgttacctgcaattgtctcatcatgtttggtaggagagagttgtggatgaatggaaatgtgtggagagagatggaaatgttagatcttatgtggaaggatttgaactggggttgatcttatgtgcaatgattatcatcctatcttaaaaaaaattaaaagaataatatagttatttcatatacaaagcctggtgatgtaatctctttagtatttttttttaatgttatttaggaaggtctgctgaatagctattttgtttgtatgacttgcaggtctgtcctgtttgcagtgttgaggtttctacttctgaaaacagcagcagctagtagggtattcaagcattttattggacaagtgataggccattttttttaacctaccctattgtggtattgaaagctggggatcatatccttgttgttctattatgctggtaatttatattgtttgtgcccaaattgaaaggaccgatccaggatgtaaaattcaactgttgaaaattagataagtgttgattttggatgtcttttttttagtcgaatgaaaagcattctggattatattctacattttgttctctcattattttctggatttgtttcgttggagatgatgtttccaaaaagttacttctaatatctataacatctacttattaattctacctcaattaggatttaacaaataaaaagtaataaaaatgtaggaaaaatatataaattaaaattgcattgctaaaagtttgacactaacaaattttttcatatgaaaagttgatttttaatttttattctttacattttatttcttatatgtttttttcttcattaaaattcaacttccaaacatattgtttttcacaatattagaaaaataatgcattttcaaaaaacaggaaaccaactccaaaaaaaaaaaaaaactcttaatgctggctctaaacattgagatttttctataataaactaaaatagataaatttacatttatgactacaaaaaggaaataaacaaaaat

SEQ ID NO: 266593 - DNA, 2631 bp, Cannabis indica
tgaattcacataaattctggactcttaacgccatttaacaaaaagcaaggtaaagtataaaagatgggaatacctggataaaggatgattatcgcaacccaagaaaattctgccacgtagtctcttcttcaagattgcaatacagagggaagctgcatcctggatagagaagcacaaaagttgggaatattgttgttcagattctaaaatacaaatcattgttaggcagcaaaggaaatcagtaaacaaaagatagcagcattcaagtccagcaagtccaaccataaactgttggataaaactcaagagtgaaatgaattctagctatgataagacttgggaagacaaaaaaagaaaaaagacaaaagacaaaattcactacattactgaactaacaaactttaggtaccaatatttcaggaaagaaccatactgattagtgatcgtaagtacatttaaaacaagaaatacattgatcacattttcataaaggagtaatcataggttctttctgaaatgagtgtatatggatgaagcgctgacctcataatgtattagattcaaaatgtgatctggacgaacatcaacagttcccttgcttaaccaataagaatgtgcacctctatctgctttgtgtgtatgattaaggtcactccacttagacaatttcacaggaaatatatcaatatttttctacattcatgaaagttctacagctttacacaatttaatcttcaccattaaattgcataaaggatatgtaaagccctgccaatctaacaacacagccaccaaactccagtactaactttttctgcctttaagaggacatctgtcctagggcttctccctactggtaccactggagtgtcctgcacagagaaggataataaacattatgagaagataaaacaccatatttccaagaagagtagtaaactgttcaactaccacaggtgtgtcctgcacagaggagaatgaacattatgagaaaacaaaacatcatatttccgagaaaagctgtaaaactattaaactaaaaggtgaacaaagatgaagaaaacaaagccatataacttagtataagaaacatctacctcatcgcacggtccattgtcattgcaatcatatggtgcagagcttgacgtaaacaaaaaagaaccttcaccgttccagctcaatccagcttccctgttatccataacataaccaacaacataagttcataaaggacatctgagtatgagaaacttatatgctaaaagtttcaagttcaactacatgatgaactatacagcatcaactaaggtccatatatgatatatcaagttctacatttatggagttaaaacaatgatgaaggttccacatcagatagacaggaacattttcacgcttacctaacatcaccagcataatccgcagaacgagagggaggagcacaaaatataacataaggaaatttgttggacgaattcatacccttcaaagaaggattaatgcccatctcaatcaactcctcatgatgatcagtggtcacagtttgcccatatatttggcaacctggatggtcctgattacaatacatacatatgttcattcaatatcaccgcaaaaccacataaccattaaacacttcacgttatccaaattctcaaaacaaacaaaatcccatattctaatccaatttgacagccttgaactataccaactcaaactatagtatttagcgtaattcagggtttaggagttaaggacatgtacctcccgccatttctgagctactaagcgaccaagaacacctggcccaacaatcaacaagtcgttctctccaaccaaacgagcagaagaaaccttcaattcgtcatttgttgcaccttcaccaacaaataataaagcacaaaattacccacgtaaaggaaatctccaaactttgcactaaaacaaacaaaaacaaaacatggatttgaaattaaaaaaaaaataccaatggtggaagatgcagaggcttgaagaggcgtggccatcgtcagtgatgacaatgataatgatatactccgtttgttgaagaaagtttgacactgagaggatgttgaagcaaaaaacgagaagtaagaagaagggagcggtttgaaaagcccagctagtggctgagcatggggtcgattggcatttgagaaagcaacaatggtttccatcaaatttaatgttaataaattttgggatttcttccttggggaaccaggagagaggagggagaccctcgtgtccgttgcagaagattagggcctgattgatatgttttgattggttcaatatctaaattgcttttgagttttaaaaaactaaacctgtgattggtagaaaatctgaaaatataacagcaacgaaatatgtaattggtggaaatgaaattgaaaactattttacttgaatatttttatataatattaatttattcatatatgtagtaaaactagttaattaattaaatatatggatacaggaatataatctagatggatcaatttataatgaatatagcaagcaactatccaatatgacttcagttatgtgtaacatgagtgcatattcacaacaaactctatagtgttatcaacatatcatcct

SEQ ID NO: 266594 - DNA, 2290 bp, Cannabis indica
cataaccattcctatagcaatattcaacataaagaaattaacgaggaataaagaaagaactgttggtggataaattctggatcttcacttgaatctctatgctcttcctgccgctctctgctgtattttagggttccaaattgcttcccctgacttccaatcgcagttttctatttataactaatttttagggttcgatggacgaaattgcccctggtccgtacgggatctcgccgcggccaagcttcctctcgccgcggcgagataatggcaaattaagcacctctctgtaactcttaaatggccgcggcgacactatccctcgccgcggcgactgtagctccaggatttctcattaaatttcgtgatctagccgcggccagatgtgcacaattcttcaaaaattgtgttttccttggctcagctcgtcttttattgaatttttgcatccgagacctcttttattccaaagaacctgaaaatatagaaaacaagcgtaattctgtcccaacacagcgaaaaacgcacataaaatagatccaaaatataggctaaaaatagcctaacatcaccaccattcgatacagatgtacaacgtggttgtggaaaaatgggatacttgacaggtgagaagaagaagccagcgaaggaggatttgacatatgagatgtggatgttgagaattcaatggtaatggcgtggcttgtgaattccatggaggaggagatcaattctaactatatgtgctaccttacaatgaatgatctttgagagaatgttgtttagatgtattttgatttggagaactaatttcaaatgtttgagttgaatcttaaacttggtaacatacaacaaagggaggactttgttacaaaatattttaattctctaaaaataaatttggcaggatcttgatctctttgacacatgaatgacaaccaatataggatggaaaacaccacaaaagaactattgagaagactcaaatttatatgttcttggctagactcaaagtagagtttgatgaggtgaggcggagaataattggtagacaacctttacctccaattggtgaggtgttctcagaggtcagaagagaggagtctcgaaggagtgtaatgttgggaaaaaaaagttattggaattgttgtgaaatgctcaactttggctattgtgggaggggtttatggtagaaacatcaattattcacccaaatatgatgagaagctttggctgtggtgtgacttctgcaataaatctcgtcatactcttaagacttgttggaaaattcatgggaaatcttggaaaggcaaagttgagagaccaggaagggccatgccaatgactaatgaagttgaaactagtccattcactaaggagcaactagatcatcttcatgcattgctgaaaacttcctcaacctcacctggtattcctactgttttatgatcatatgacctatttttctaaattgttttaacttttatataccctgtctaggtagtaaaaaagttaagctagcagatgataatttcttatctattgcaggaaaatgtttaattaaaatttcttaggggataaattttaaatctgttctccatatttctcaactttcctgtaattaattgttgattagtaaactatcttgacattttaattgttgtgtaatttttcataaatcttattgcctttttcaggacgagagttcggggaagacgattggtagtgctaaggtgattaataatctctactattttgaagataagaattctaataatgaaattgctcaagggtgtagtagtagtagtagctctctttctgtttgtagaaaatagtgattcgaattgtgtatcgatttcatagaataatacatatttatatacaaagctaggagactaaatatctactaaatatctaattcttttacagctaatatacatctaatatctaacactccccctcaagctggagcatagatgttaatcatgcccagcttgttacaaagataatcaacccgcaccccattcaaagcctttgtaaaaatatctcctagttgttctccggtcttcacatatcctgtggagatcagaccttgttgaattttctcacgaacaaaatgacaatcaatctcaatgtgcttagttcgctcgtggaatacgggatttgaggcaatatgaagagcagcttgattatcacaccataattttgctggaatagaagtcttaaacccgaattcagtcaaaagctgataaatccatattacctcacacacagactgggccatagctct

SEQ ID NO: 266595 - DNA, 4810 bp, Cannabis indica
ttgatggcactaatgttcgaggggaaagtagttcgtattcaaattcaagaagttttcctcctccgtcgagcttccccgcccctactggtgatctgcaagagcagatgagaaaccaaatgaaagatccagcaatgcggcaggtttgcctttttatacttaatgtttatagttcaaaattagaattatcccttggtctaatttatatgggttgttttctggagtaagatctgtgctttaaatcattaagtgaggatgggttgacaaaatttggattaggtacttgagcatttgataatgggaaggataagagttgtatgatttctcacacgtccattaaacattcattaatttgcagatgttcacatcaatgataaagaatatgagcccagaaatgatggcaaacatgggtgaacaattcggtttcaaactttccccagaggatgcagagaaagcacaacaagcgatgtcatctttaaccccagagagtttggataaaatggtacattcttagctttccaagtttttgttatatctaattctttcttattttcaaaaaaaaaaaatagagaaaataatcttgtagcatatagccctaagttctttttactgctagtaccccatgatgccaaagtagttgatattttattgagattgtgagcttttttcacttggacttggatgaattccttaccccattcttttcaaactaggagacactaataagctttacttcatatcggtgccagtgccaatagtgtatattatctttgtgtgaattcgataggtaatcttggtacttctatttcttgatacagatgcgatgggcagaaaggatgcaaaagggagtggaaggtgtgaagaagacgaagaattggcttctaggtagacccggtatgattttggctgtagtcatgcttatcttggcagtaatcctccaccggctgggctatattgggggctagaatggaacccgagcttgttaactatctgatcaccaactagttcaacctgtagatgagtgaatggtcagaatcaagaatcctttctgtcaatatctaaccttgtgtggagtttagattgttctattcaatttggaagaaaggaaaggagggaatggattggtgcccaatatattattattttcaggtactagtcttgaatttatttcatttttttttgttggggtactactactagttggtttggcttgatactgtaatataagaaagattttagagagaggtgaatttgccaaaaaggaatatcacaatggggataaggaagtttatcctgagtaagttctttagtatgtaattttaaattggcccactaaatgatatgtcaagtttttgaaattttttttggttaatcgtttagttttttgaggtcatactataaaacagatactttttttatacgtttttaaggcttttgaaaaaattataaaacagatattgttatttatcttatgtgtaatataaaggattattaaacttcaagtatgcatttttaatatacaaatgaacattgtaaaccagagaaattcaccattagaataagaaatatgcaaagattagtacttgaagtgaagttttttaattttgaaatggatacttgaagtggaggttgaagaagagagaccgtgaatggtgaaatctgaagagataataagatcacggtagtagaaagaggaaagagtaaagaggaaaagatgatattttaataattgttattataattgctacacatatgtatttatatgtataattattaaggttaattaggatttttatctcccgaacattgacatgtaccaaatcatgtctcttgaacttttctggccgttaaaaactccccctgaattattgagattgttagatttaaggacttttgtctaattttagtaaaaaaattctaacatggatgaaagtttaggggacataatttagtacatatcaaagtttaagagatataatttggtagatatcaaagtctgaggagcgtggtctagtacataaataatcactgaaacagtaaaattgaatgaaattagataaaagtcattaaatctaacaatctcaataatttagggagaatttttaactgctaaaaaagtttaggggtatgatttgatacatgtcaaagtttggggggaaaaatcttaattagcctaattattatttaatattttttttaaataaacgtgcataaataaaattaaattttatagtcattacaaaagatattgttcggaatggaagaaacaagcacaagtccatactgattgtgggtaaagactctcttagccacattatgggtaataaaattacaaattctgctaacaaaaaaaaaaatttttagcaacttccaaaggcaagcagcatgttccgcttctccacatagagcattagaaaactccattcttgccgtatgcaccccacacaccacaacaagatagtttctagccagtagtcacaaccgtgatgcacatgctttctgtcactattttaacatcacagtttagcttaaaccactcttgagggggaggttgccatccatctactaggagcgaagaaagagtaaggaaaatagaggctctgtaatctgcgtaagagtaatgaatagagttaatacagtgtttcactttaaccggacttctattgtgtatcttgtcgttccgagtctgccaaattgtatcaacaacaatcgatgaataaagaaacacttcatctgtattaacaccttatttttctagcccccaaatgaatttgacccaatcccacatgcaaatgccagacccaacaatagaaaagataccccacggggacgaacgtcacaaatggaaaactaaattacaagagagaaataagtgcttcatcgttttctcttcaaccccacacaaggggcaagccacatcctcaatatggagcctcttagaaagaacaactcgaattgggagggccttagagaggatacaccaccacaatatcttatgtcattccaaaatgttattattccacagtttgttctagagggacgacgcaacttcatactaagaagccctttctaaagcttggatgagataagctgatttacacgagaagcgtccattactcttctttgtctgaattcacctatccttaccctgaccagaaggtctgccccctttcaagatggccgaaacggtttctttgtcagataggtaattcaatttctgaatcccaatcaccgtaattcataagaagattagccactctgttaccaccagaatctatagatccattagacttaggataaaactccttaccatgggaaactcaaggatcatcccagattctagtatcccttccatcaataaccattcgacaaacacttttctttaaaatagctttggctttcaccacatttttcaaaattacaaatttgagtctttgtacttgcaagtaaggaaatctttccatttcacgtactttgcttccaagacctgacagcaaagggactgactaccaattaggttctacccccacttagccaggtaagcctagttcatttctttagtttttcggaatcatagcccaccatgggatttgggaaggcatagtttatcacatgcctttaggtgaagcccatggtttcctttctcataaccctaccaaaaattacaaatcatgccatcaatcttattaacaagatagttcgagcattttgtagtttgcatgacataacttggcatggacggacccacaaacttaataagagtagcacacccagctttgatgtgaatgtccacgaagtcgatgttttcctttgatgtgattgtgcacgaagtcgatgtttgctggtaaagggtaagctctgttgttgtggttgccctttaatttttgttcgatttgttatgtgagactaggaaattttgtgtttgggtgccttggtggtttatgctttggttctctctgctttgaatttacttcgcttttctctcaaacttgttagagaagaatcatgctttcagtcttggaattctttttggattatccccttaagggggtgtttactttccactgagcaactttattgtgttgtttaggcacaattggtgtgattggtgggtttactgcatttgttacgtcatttgcgttcgcacgagggataccttgatctgtcaaatggggatcatgtggttcctcaacatattttataagttacttttaaatgtttttttaataaattcaaaataaaatctatattaataaaattagaaaaatatttattattttacaaatattggtgccagctaaaaatatgctgcttacaaataatgtttaaattctaaattatgtggtttagataaaaatatattttatgagttacttttaaatatttttttaataaattcaaaataaaatatgtatcgataaaactagaaaaaaaaatattattttacaaatatttatactgtttacaaataagaaatatttatatttatttactcttaataaaataattagaatttaaaaatatataactataataatatttaaaaatattagggataattgcggcaaaagtccccaaaaagttaaggttgatgcagattagtccccaacctcgaaaattggcggtaatagtccccaaggtcaccatttttgttagtccgttggtccctaagttaaatggtccgttaattgctacaacaattaccacgtgtcaaagcattattggtacacttaataaatattattaaaaatttaaataattagaaattatatataaaaaaaataaaaactataatatttatttattttctttt

SEQ ID NO: 266596 - DNA, 2623 bp, Cannabis indica
ttaagaaattttacataaaaatctaataacaactaatgtaacaacctacatcctaatcaaaattcatatatcaattcacatgtaacaaaatgcaacttggggtgttgccctaaagtctcaactcagtctctattaagatccatcttcaagtaaaaggtaaagtaatacattttcataataaaaaatgcaacttgggggtattgctcttcaaacccatatttgaatatttctatataaatctatttgatatgtacattggaaaagttggaaatttaagctaaattttaactatggtgaacataaattaacaattaaggaagaagaagaagaagaaagggcgaaatcgaagagaagagaagaggagatgtacccgcaaacgcggaggcagttagcagtgacggcggtgttgtttgtggcaggagtgtcgtttatgggcgtgggagctcaccttgcctattccaatctcgacgccgaacaagctcgcctcaaagctcgtagggatttcgtcaaagatcgcctcagaaaactcatcgacgaggacgactgaacttctcacaatactctgcaagtaagcataggcaaaaaaaaaaacgcaacatttactatacacttttgtctgtcgtttcttaatactctttctcctcttcttctaggtttgttcctcgttttgatatgttaaatatgatttatatgaattaacatggtaaagcaaagaaacactcttgaacaaagtcaacgacccattttctctctaactaactaaactcctctgttgtcttatctctttcaatttctcagtctgggtctccaatggcttctctccaaaaaggtgtgttttacaattacaacgatatcccttgtgattttcttggggacattctctcaagactcgatgtcaaatctcttaaacgatgcgagtgtgtctctaaatcttggctctctctgctaaggacccaatatttcaacgatctccacctcaagcgtcaactaccttgtgtagtttttctccataaaaaggttagaaggttcgatcatcatttatccatttgtgaagggcaaagttttgttgagatttctttacagaaatttcccttttttgaaatggatcaaccaccgttgttattatttatgggcagtgataatggtgtattaggcctttatgacttaagaactaaagctgtttatttatggaacccgactattaatgagtctaaagaactacctccttctcctgagttgggaagtaatcattctgagcttgggcttggttatgatcccttgaccagtaatttcaaagtggtaaaggtctcatctcttgataagaatggtattgttggcactggtaataagtttaaagaaggtaaccaaattgggatttatagtttgagaagcaattcatggaaaacaatggcaatgcctaacatattttcagaatttcaatcttcctctacttctgatataactatttatacatctttaggttgctccattgttgttaatgagtgcattcattggatgatttgctttggcaatacaactgttcatcaccaaacatctttaggaatagtttcctttgatataagtatggaaaattttaggcttattaagtcacctcagagtgtaaaaggacctaatgtcaagaagctagctaacttttctgggtgtctttcctttttcactttgaatgaagtccaagtagtggacatttgggttttgaagaaatatgatgactctgattcttggttcaaatatttttcagtcaattttttgagtcttcttccaaatacttttggtcaacattctagctatgttcctaaagagtttttgagtaatggaaatcttgtaatttgtagttctgaagctgattattggtattggtatgataccaagaataataggattaaaaatatggatgaaagatattgtgtgtcgggcatcaccacatatgtcgagagtgcttataagttaaagggttgagaactccatgtggatatgttgttcatcgatgatgcaaagacttacagcacatggttctctacttgggttctgtgactattgagtggtttataattgatgtcacttgctggggttgctgatgcatttttggacagctgtttctggtccttagacatgagcctaactctttggtttaagctcctaatgtagctagcaacttggggctgtactttaaatggtctttattctctcacatttgttggacgactgttcccaaagttacattctttatgattgatgagtttgtttatattactttgcctgtgttgtgagcatgtttcttgagttgagtttgataatttgctataaaaaatgcttaaaaacaatataataagctataaataaaaagtggaatttctagattataatttcaaattcaaacttgagagttgcctggagttctacttggtttgatttgcttctaaattctgccatgcaagtcagttacttctgaattctgaggagttagcttcaattgttggttactgaactttgttttgctctggtttggagcttgctctcagtgcttctttctaaggtatggcgtatggctgcttttttctcaaattggttgaaaataaaccaaactagtactttctcatatctt

SEQ ID NO: 266597 - DNA, 2911 bp, Cannabis indica
aataatattgttttcctataattatgtaaaaaaaaaaataataataaacatattattgtaatatcaaatgttgtagatatatgtttgaagataaaaaatgttacctatatcattataactttaatcatttatttatgagaagggtagataaggaaaaataatttttagttggtatggaatggcttttcaagtcattttatttaggaaaagtaattccttagtttgcatgaattacaattcatatggaatgagttttccaatgacaataaacaaaccaaacacttgaatgatctttctttaggaatagcaattccattcctacactcattcatgtaaaccaaacactagttcatcgacctcacgagtctgatttggctctatgtcccagagttgcctccaaagcggactcatgaatattgtatcttcttgaaaggagtcgagccaatctcagtttgcccttatcgttatgctcaaactcaaaaaaatgagaaagaaaaattggtgtaggatatgcttaaatccagcatcagtgtaccaagcaccagcccattttcaagcccagtttaattggtttgaaagaaagacggtagctggcagttttgcgttgactaccgggccttgaatagagagactgtagctgaaaaattttccattccgattattgatgagctcttggctgagctccatggagcaaaagtattttcgaagttagacctcaagtccggttaccaccagatacgaatgatagcaaaggacgtagagaagaccgctttccacactcatgaaggccattacaagttcttggtgatgttgtttggtcttactaacgccccaaccactttccaagtattaatgaacaccatttttcgagaactccttcgtcatacggtgttggttttttttgacagtgatgccccaacccagttatggacacgcatgttgagcatttggaggaagtgttctgccgcctccaacaacaccagctatatgccaacaggaagaaatgtgtgtttggaagtgacaacgtggaatatttgggacatgttgtgtctgctaaaggtgttttagccgattcaaaaaaagtggcagccatgactcaatggccaattccaaaaacaatcaaagaattacggggttttcttaggttaacagggtactatcggaagtttgtgcggaattatggtatcgtttctcgttccttaacgaaccagctcaaaaaggatgctttcggttggactttggtagcccaacaagctttcaaccaactaaaagaggctatgtgctccgtcccagtcttggttttagctgactttttttcattttcaaaacaaatgcttcaggagttggtttgggggctgtcctaatgcaaaacaagtgcccaattgcttatttcagccaagctttgtcgccttgaactcaagctaagtcggtttatgagtgggagttgatggctattattttggccatacagaaatggtgcccttacttattgggtcgtctgtgtatagtcataacggaccagcgaagtctttaatatttgttggagcaaaggctagtggtggatgaacatcaaaaatagctaaccaaattgttgggctacaactttgagattgagtatcgacctggaattgagaacaaggcatttgatgcactcttacgcattcatcttaacacttctctagttgctctatcgatgcctattgtggtttcaatcccgaacttacaagctcatgtacaagcggacctgatgttgtccaaggttttaagtgagctgaccaagggacaggatagggcaaatatactttagtacttgggatattccattttcaaggacgattggtactaccatcctcctcacctttcattctagttctcttacaagagtatcatagcggctcagttgggggacattctgagtgttcaaaaaaccttccaataggtggttgctgatctgtactggccaggtatgaggaaggatgttcaaaagtatatcgctgaatgtgttatttgccaacaaaataagtatccgctggtgtattgaatcctctacctatcctagagcaagtttgggaagatatttctatggatttcattgaaggactgtctatgtcccacaggtttgattttattttggtggttgtggaccgctttttactaagtatggtcatttcatacccttaaggcatccttattcagccactaccatggctgaggtgtttgtacatgaagtggttaaacaacacgatttccctcactcaatcgtgtcggaccgtgacaagatcttcttgagtttgttttggaaagagtttgtctgttttcaaggcactcatttgaagtacaataccgcctatcatcctcaatcggatggtcaaacggaagtggctaattgttgtttggaaatgtatctcgctgttttgttggagtaaagcctaccaagtgggttaagtggctggcttgggcagagtattggtacaatacgtcccatcatgtttcagccagcatgccaccattcaaagctctctgcagagattcccagacacttattcactttgaaccagccagcacaaaagtgtcgggagtggagcagcaactccaagctcgggatgccaccctagtgttgctgaaagaaaatctccaacgcgctcagtagaaaatgaaatctcacgtggacaagaagcgttgagatgtgcattttgaggttggtgatttggtctatgtcaaactcaggccatatcgtcaacgcacggtggctaagcgcctggatgagaagctagcccctcgcttttttggtcctttcccagtggtagaacgcatcgcaccagcgacctatcacttacagtttcctcctgagcaaccattcattcggtgttccatgtgtctctccttcaagcagccttaggccctcatcaac

SEQ ID NO: 266598 - DNA, 1564 bp, Cannabis indica
gaaaaagatttgattgagtttgatgatagatagttttggtgagatattttctcacggaccgaaatattaattttcaagccatgcaacataagatggtttctctatggagatatgtccgtggcttatttgttaaggatctggattttagtagatatctattccaattttatcataaaatggatataaaaacgggtcgtggaaggtaatctatatttttgacaagattcttttaatcttttgaaagattgaaactagacgaaaattatcattttctcttttaattaacatacattacaacaggttataatgacaatttataatatacattgaaattttgtattttatatataattattaatatattatttaattaattaattaattaaatgtgaaatgataaaattaatgatatgaaataaatattttgtagctacgtaccaatattctataattatacactagaaaactagcaaaataatagaaatgcatcaaaataaaaacaaacaagatttttatacgtgtatcaatcattattacaaattgttactaatttacgggatcacgttcaaagataaaattcattagtaaaatttaatagacttcctttctttcattatatattgcaagtttaatgtattttaccttaacaaataaattttgttgaaaattttcaaatattcgaacttcctttaatctgcctgaaaagagcttccgagtcaagacttatatccaccttctctcgaaagcttgtagttacttctgttctcccgaaggcttaacactttgttcttctctttaattgtttgaagactcaaaacctgaaattcaaattaatgacacgtgtaaataataccaaaaacgacagaaatttcaactattagaaagatccaaccaacagtcaacactcaacactataaattaatttatcttaaaaaaaaacactaaaaactaatttatttattttttgaaaaagaaacactataaactaataattaattaatttgtttttatatatatttcgtcacttttctcaaaaaaataaaattattaattaatttgatataaatgcatattatatcttatacagcctgtagctgtaacttctaatctcttacactttttcacgggaccactataaataaacagcgttattcattcaaaaaaaaatgttaaaataaagacaatttttttatttttatatttgagtataattattatattgttttttaaaaaataaaaagcaacatttatttctattttctgtcacttttttctctaaaaaactctgctattgacggctatccacttcaagtgtttatcagattacgaatgtacccttataaaatagttatatttactagattgccactccgtgttggtgttgtgttgccaacaattaagactattaagcacaaaaatgttcagttcagcctatgaaaggtcaataaggtcaaccttcgatacaaatacagaaatattagtttaatttaaggaaagaaaacttctttacaatcattttctttttataccaatgttattctacctttatcttttccaaaatatg

SEQ ID NO: 266599 - DNA, 4390 bp, Cannabis indica
ttcttatatttttattcctcccaaacaaacaccacttaaatctcaatatcttaaacagtaccataattgctaatcaaatcaaacaccaataaagagtatcaaacaaatcaatcccaataaagaaatttcctataataattttaaaccatgaaattggtggtatttttgataattccacctctaaactcaacaacctaagcccaattcagcagcccaatttctattatgtggcccatgttccccatatggagctaaactctcatagagaagcaaaacctcttgtctctgtatcgccgtcttcctctctcttgctcccctcgtcttgcagagaagaccagaggtatgtttagctctactcgtatgtgttcaccttgagtttggtatatcttctttaactgtgatcgcactctaatgtgtcataactttgtcttttttttttttcttctttttttcgttgtttcgatttattttgaactgtttattggggtttatgacgctgtgatgtagagggttttatctctctctctcttttgttttttatactctgttcaagttttgttgttaatttttttttgagttttgaagatttagcttctactacaacagtaattttgaaatcaaatcagtactttgtggttgttaacaaaaaaaaaaaaaaaaaatagtcagcaatttgtaggttcatggtaatgaattcaattctttatcttttgaattttattattgtgtggatgataacaagtgcttttatcagactcgtcattttcatttgaaattgtaattgaaactgaaactaaaaatcaatagatttcgacccaacagataaacaaaaaaagatgatatatgtgtttttttgacccattgctaagatttgaaatctttgttttctttctacatctgatttgattcttactcacagtaggcattaattaataatctccatctgttttagaacttttcaaatctgattattttgttttagacctgaaattcccgagtttcttctctgttttgggtcttgttcttatgttcctccttgaaattacatatagcctgcaccttattacccacctaatttattatataagaaagtacttaattatacattagttaacttatatgtggtattctgttaattattaattagttcatatattgtttctttggaaggctatatagcgtaaaagtccacgtttccttaggcttaaaccctaaaccctgctctgttctaccccacgctgcaaaaccctacgtcttgatatcttcttaacacttcgggaaacaatggttgtgaagagaaagaggaatgattctggaggcggagatgaagaggaactcgaggcaaagcagtttacaaagaaagagatactaccatctacgataaaaaacaaggataagagatcagaggttcacgccaagcttaagcagcagaagaaacttgagaagcgaaagaaagttaaggctcgtgatgctgccatttcccgtgctttggagctgggcgaggaggtttgttgtatttatatatttttgagatatgtacctatgggttggttgcttagccttattaatgtaatttttttactcttttgaattgtttcaatttgattttttcagcctccagcgaagaagatccctcggactattgagaacacaagggaagttgatgagacagtatgcatggcagatgatgaagaggttaaccctttttcttattatggttttatgctttttatctgtttgtgggataattcaagtcataagtttaatcggttgaaactgcacaaaaattagagatgcaataatattttgatcattttcttttgaacaagtttttgttggctttactttgtctattttaaaattggtgaagagaatcgattgaatccatttgcagttatatgctggaattgatgccgatgagtttagttcaactttaaagcgtgaaactactccaaagatattaatcaccacatgtcgtttccattcttcggtatcccttgcttttcttttttttttcgtttcttaccatactttgattttgttagttgctcttattctctaatatgtttaggttttattggtatatgtttggtttgtagagaggtcctgctttcatatctgaactactctcggtgattccaaatgcacattattacaagagaggaacctatgacttgaaaaaggtggtgatctctatatcttcttgaatgtgatgaacgacgagttggaaagacatttacattaatatttcttggtacatttgggttgcagattgtagaatatgctaataagaaggaattcacttctattatcgttgtccatactaatcgaagggagccaggttggtagtgttgtctaaattgtttgatgttcatatttaccatcaagttttgagggtcatcttataatacttttattgtcaagatctaacagtcatttctcttgatcatcttatagatgctctcctattcattaacttacccgaaggtcctactgctcatttcaaactatccaatcttgttttacgtaaggatattaaggtactaactaccatgttttacatatagaacagaaacattccattatttttaggcactagtacatgaaataaatatgcacaaatcaatatattcatttgagatcagcaaaaataacattgcacttcaatttggtcgggtaacttgaagttacacttacatgattacatcgatgaatgaataagagcagtagaaactttgtctaaagtttacatatttcatcgtttactggttgagctttaagctgtgctatgattaatgagaaccatatttaatggttagtcatatggccattctataaaaaatggaagaacatttgagatttaaggattttaagctctcataccatagttggtttcctatgttaagctcaattttcttttctttatactgctggaaggtaatttatgaaggaacaacaacgaactagtattacttagtgttaagccatttactttttattgtgcttgcagaatcatggaaacccaacaagccacgagcccgagcttgtgctgactaactttacaactcgtttgggtcatcgtattggaaggttgcattccttactgtacttttgctcattttattatgctttagtaattatatgaaattaatctgttactccattgagatgcagctttatggtatacattatgtaatctttcctttacctagtataatgatcattatgtatattcttaaaaaatataaggtaaaaggaaaagactttactaaaattttagattgaatttcagtataatttattcatgtaaattttaattctgtattggtcaccaacctttatcttctaatgcgatactttggtaatgcattttcttcagattgatccaatcaatttttccacaagagcctaatttccgtggtcgaagagtcgttacttttcacaatcagcgagactttatttttttccgacatcataggtgtgtctctattctgaataatgagtaatcccaaccataataataggtttccttataagttataaatttctgacggtgtattattgcccaggtacatttttgattcaaaagaaactaagcaggctgaatcgaaaggtaagtcaaaggatgctaagggtgaggtccctcaacagaaagtaattgctcgtcttcaggtcagtacaaggaacaatgatcatctacttttggcgattattatcaagaatcgtgttttagtgtgtaatgttattggccatatagatatgctgcttatttttcttggagcttatatgatttataattgttgatgcaatgcattatcatcttatcatacacacaggagtgtggacctcgttttaccttaaagttaaccagcctgcagcatggaacatttgataccaaaggtggcgaatacgagtgggttcacaaggtattctgcttaaaccaatttctttttgacttcctcttttggtttggtttattcaacttttggtctgacccttctactccgtattgaatattagccggaaatggacaccagccgaaggagatttttcttatgatttggtttggaatgttgctttcaaagtatttgtggtgaaatggcggacggaactaaggtgaagttccatcatgttgctggagcatttttgacttgagagatttatatatttatgtagttccattgactggttggttagtatagttatgtatggaatagtggaaaaaataaaacatgattttttcccctttacgaactataatgatcttcatctatttcaatttttttttttgtgcatttatattatacacgtcttttgatatgagaggatactttcttgaggccatgagggcgaatcaagagaatgatgcctccaaatatagaagcttaca

SEQ ID NO: 266600 - DNA, 5313 bp, Cannabis indica
tatttttgtaaaagttaatcaaaattctagtatttttgtaagttttcctttagtaaaaaaataaaataaaatttttgctcgttgaactgacctttttagagttttaccccattttttttttcttagtttgcaaaaatctctccgaatttacgttgcaaataatcctctctaattacattcttcttattttttttttattaataatttggttaggctattagttatatgtataattgtagtatatacgtttatttaataactttaagctacttaaaatttaatttaattgacattaaatatacaaataatagttctaagaatgcacataagtactcataatttaatgatagactgctaattatgtatttattttttgtcagggttcttgaattaggttagattaacgttatgttaatgctacatcaaattgtttaaataaataaccagattgcaactacatgggagacatttgcaacgagctttatggtttatggagaaatttttgcaataaagaaaatttcaaagggcaaaactctacaagtgtcagttcccataggggagggatataaatcctatatattttttaaaaaaataattgattgccttatttaacattccaagacaattccatttaaaaaatactttctatattaatactattattatataattttgggtaaataatattttgaaccctctgttttgttaaataataaatcagactctgtatttttcaaaatagtattaagtagtacttgtttaccgagatttttggcaactaaatatttttggagcttaagaaagacatagtaatatgaataattgaataacaaatatgagatttttacatgattcaggcgttaactatccttagtcttcgagtcaattttattaggatcatcgactggtaactgcttttacaagtagggatacaatggactggaactccgtttcccccgtgttcctcttaaagaagaggaaacttagtaggaacattctgaatttttttaggtgtaatactatctggttttatacaagtgtgcttgcaaagtttgttgaagaatgagtcttaccgtcaaaaagatccccttttcctcttgtgctttataagagtatttataggccaacttctcttcatgtcctagcttggatcgatcatcctagggcaaaatttgagcgtttgattggtaggtggcatttttgccatatggcatttaagggtgtcagatcgtacaagctgggcctcatacacgtgtcgtcccagagtctttcctttttgaattttccttatccctacctgttagatcatttggctaggtacaatgagacgcgcatgcgttgtacgattgcgcatcgtgggagacaacccctaacgtcgtacctaaaaaagcctagtcactaggtccatagtctgacacgtacaagcaaggtcttaacgggcaaagggtgtagcccagtttggcgcatcttagcatgccttggtccttctgggaaaagctcatactcttcgtggcaacaaatggcttcggttcctgagactggggaagtcttcggctcacagatactctctgcattgctggcaattagggaactctcaatcatggaagccctttctgcaagatgggacctttacagtcccggagcatcagtttaagaaattggtcagctgatgacttcttgacttttcttgattaaaatccacatgtcgtgattataaaaatgtggataacattaaccccccaaacttcgggacgtgacacgatcctagagcttgcagtatctcttcctgagcgagcacgtgggatttaagacagactctttatttcatcacatcatcaaccaccagctaaagtgtcatttgtcagaaggtattatctcttttgtctttcgttaggcctttaaatgttgaattttgagatttgcgcgcgtgttgggcccgtgtttggtgagatgccaaaaatcgcggcgattggattgagctgactttccatttgtcgagcacttttcacgatgcatgcaatgatggaagccaactgttgggagtcgatacaccttcttagcttcccacttatccaactgtcaaacattccttgggcgaacgagtcgaaccattcgcttctcgtggaaggcaccccttcctgtacttaataaatactttcagtagccatttcacactttacatcttttactgcctgttgtaccagagttctagcatttgattcatctctccctctgtcttgcaagacttttctaacaactccattcttaggcatgcattctgccggtcaagacggaataccgagatcacccacctcattttctcttaatcaatcagtaagttttctttatcaccatttacttgatgtagagttcttagggagttgtgagggtgcatgttgcgtgtgattgtttgctctaggaatattggcactatgcctgaaatctctatcacggggagtgagagtcctagggtcctgtattgtactgacccgttctactccgtaccaatttctggtaagtacattaggactgtgatggaaaggagtagttcctctaaaactgcatgcaatagtggctctggcaggaaaaggcaaatgcctgaaacggttgttgctggaacgggggcccaccccctgtgtcatgatccaccattgaggctgggccagcctcggtcatactacccttctgctattccaaaaataccatttgtggggctcaccttccccaggaaggccattcatttcaatccttttaatatgtaaagggaaagggaagtgaacaaggcattgaaagagcgtttggaggcagagaaggtgttagttcgtagatgggtcgctgtgctctcggcggtgtggaaggctgaaatttcagacgacctgcacatcttgaccccggcttggccaaccgtggaggtagaggccttggaaaagtacctggcttccaaggtagggagagaagatgctcccttttccatcgaactttcagactaggtggctgggagcgcttctgaactgcctatggagacttgggcatcgtgcagcagtacggacgtttacacattgggttactctgctaagcaacatgcgatcggggtaaagtttcaaaagatgtttctttttttactttgatccttaccttgacatttagcttttccatttctactcattatgacaggtggccttgctggctgagaggactgctaaggaggccgacacactggtgacggagctggagcaagtcaaggaagacaaccgtgatttgcgcaatgccaatgacacccttttggccgagctgactgaggctaaacttctaattgaaggcttgaagaaggagaatctgctactggaggctaactatgcttactagactcgcctcgtacggggtatgaggatcgttcacgatctttactaggagacggtggagcagttgtctggagtagaatcttccaacccgtctggtggcgcccatctttgaattgcaacatgcctttttaattgttgttgtttgtttttttatatctttttgacacactttacaagtcacggagacaattttattttgccctggccgcgggggctagatgtaatagtaaataggtttttgccattttgatagacttttaggggccggttatgtccttaaaacacctgattccaacaaccagtatttcaaaccttctcgttagtccttaaatctcttagtcgatttaggaatcgtttatggactttacccttttatccctgaagccataattcttcttcccgctacttgacctcctgcttgggaagaccactcgccaagagttggcccggagatggttttctttacagaaaggagccttcgctttttcacacatatcttcaggcttttattcttttacaaggttgagttccgggagtaatgactgcaactgccttagactttaggcatttttcttacttcggtccttgtcagcatgaagttttagccaattatacaaccgcagatttttcttttcaagaattttggccgaatatgcatcttatcccaagatttgtacttaagtttagcctttgaggaaagaattaaagaacgtttccctcgagaagacttggttgaaaatgtttcctgcttttagttgcatatgtacactaagctaataactttggcaaatggacgtaagacattacagtcatcagcaaccgggcgtaccataccccccaaatgagataggaatttcggtctcttcaaaattctcaatcattttcctaaaattcaactcgtattcttctccagtcttcgaggaggacgttcaggcagttctattttggataacctttgctctgggaagtgttgtttgcactatccatccaggctatgtctttcctctctgtgactacttggaggggaattcttggaggtttggcaataatctcttcgcttccatgaggaaaagccgtgggactgttagcggaaaccaagtcagatggctggctccaaatggttccttcttccaaatagtgtttccttccatgtttttgtaatgtgtcctttaccctgacaaagaccccgtaaaggagagtacaagcttcttcggaatggtaggctttgggtttcccaaagggaaagttgggcctattctcttgcatgatcaattatcctttgctgaggttcgtttcgataagcaagagtcatgttgagtttcatagtggaaaactttggcttttacagggaaaggctgaaggtgcaccaaacattcaagcgatgactttgctttgaaaaggccaaaggatgaaacatcactgagagtgagacagagtttaagcagtcctgtccttccataacgggaaggagggttgaagatgtgccatacccccagtgatctttcacgcacgaaaaacaacatgcgtgcttgagttatgttgaatttttatgaggcaagcttgagcttctgtgagggaaggctaaagctgcataaaaattcaagcgatgacttcgcttaaaaagatcaaagagtgaaagcatcactgggagtgagacagacttcaagcagtccttccattctgggaaggagggttgaagacgtgccatactctcagtgatctttcttgcacgaaaaacgtgcatgcgagagtcatgttgaatttttatgaagcaagcttcggcttccgcgaaggaaggctaaagttgcataaaaattcaagcgatgacttcgcttgaaaagatcaaagggtgaaaacatcacagggagtaagatatacttcaagcaatcctcccattcggggaaggagggttgaagatgtgccatacccccagtgatctttcttgcacaaa

SEQ ID NO: 266601 - DNA, 4091 bp, Cannabis indica
aataagccccctatcaaatgctgactttacatgtgcattgccagacttgtgattatcacacgttaacttgtctccttggattggcaaattaagtagatctcgagaattcaccaagctcgaaatgatagggttgaaaattggaaatggtcctttcctttagaaccttctctccctgactcattaaacacaaaattagtgtcggccaaaattaaccaagggccaccaaatatatccccaaccttcattatctcagtccaaaatttctttttagcatggaaataaggaggactataaacacatgtgaggagccacgagtgagaaggggtccaaataaaccaagcccgaaatttgatttcgagagcaaatagtactttcaaatacaaagccagttttccaagctaaaataataccacatgcatgaccaataataggaacacaagtattaaagtaaaagtgaagtctattaagaatatgtactagtggagtagcattgatctttagttcagtcggaaaaatgaaatcaagtaagcacaactgaaccaaggacttcagctcgcgaactatagaggtctaccctaaccctctataattccaagctactcctctcatgacttttgtggagaaggtgagacatcctcctccacatgagtatatgtgtgggaaaataaacaagaaccagcattatctactagggccgaaccaatcacctgtgtattcaacccatatagtcggaccctaagctcttcctctggggtgtggttaaattgacaaacagaactcaaatcattctccgagtactcttcaatagtcaaagaattaggataatcaccatcgcaggcgtcaccggccacgatcgcaggcggagactgaggaggtaacacagtgacacaagatgggacttgagcattcacaactgcagaattcaaaaaagcacgagaagtattcttctttcccgaaaaacaatcatggtaaaaggaaaatgtgttgagccagggtccaaacagcgggaaaggagtcccaagagcattcgagactgtatcatgggcggcttgagaacaaccattacgatgatgacctagacggccacaatggtaagaaaaaattccaactttttcatatttgaattgaatccatattttagaaccttcacaaacctcaatgaagtatcccgagaaaagaggattatcaagacaaatatcaactagcacccttagccatttagttgaggttgttagtttattttcatctaaatcgacttccacaacttttccagcgagagcacctaggttgttaccatttgagattgaaaagaacttatggggtagttgatgaatctagacctggagacgagtagaagtaaaagaggtcccatttgctaggcttggatcccagacttgaagaagcaagagataaccatttacattccatggaccattatctagagcccagttcctatcttcgaccttctcgaacactaactcaaagagattagagtttttggagacagatgggatgaaggtcactaatacagggcgtttccacacttttttccacaaagcctttaataaagctctcattgagaccctgagaagcaaccgctttctcataaaaggcaaagagaaattaaatttttgacagatgaggcgcatggagttggtgggaaagtggcctcactaaatgataaattcaattcctaccaataacaaccaaagcaaactccttaactaaatctataacaaaaacctgtcaaccaccaaaaactctcacaacaaaccagcatgtgtaagaaaagagaacaacttacaccaactaccaaaccacaacaaaacaagggagaataagagaggcaagatggagagggggagacacaaaaagaaaacagaaaccttaaaagatataataaaagagacaacaaactaaagaaatagaaaaagagaaaggataaacaaataagaacccaaaagaaaagaaaagttttaaaaagggaggaaaaagacccataaaaaaatggggaaagagcaacaaaggatcaatgaagtgaacactggtcaaatcgaggaaacaaaatcagggcaagcagacaaacatgccaaagaaagaagtgtgactcaaaagaaaccagcatacactagaaatgcaacaaaggaaatgtaaaggatacactggaaggaggatggtagattaccatttgctcctcataagaacctcaactaaaaaggcgcttaattgctccatttcttctccaaaatatcataatgagatataattccttcaaatatagatccaactaaatgtaagttaatatttcaacataaacatccattatattaattttatgaaagtatttattagaaggtaggatctccttcaatgattcttatttgaatcaacggtaggatctctgtatgcttggtttggcaaaggacattcttattaattacaattgaataatttcttggccgtgaaaggaagagaaacaccacgagcaaccatgtggggtttcaacctatggtacttgacgagtttggctcacatgggcaagaagaacatggctatggagcacgtgtcacttgtgttcattaaacaccagagctgccattgcttgatgcaaagaatcggcatgagaaataacttaagaatgggttatcacattttggttgagttataaagtgttcaaatctttatttatttttggattatgcttagatttttcaggatgcacggtgattttttcgaaaccagaagcaataatcatgagttacacattactttaaagatgtaaataattagaatagaataggttactaattgctttggtaaaataaagtaaatttgaatgggtaactagtaaccttttcatgcatcagtaccttttatgttttttttataaatggaaaaaaggttgattttatataccaatttcaacaagtaatttagacaaaaaaaaatgaaaattcttaaaaaatatgttatattaattccatctgtaatgtggtgcatgaggatgacaatacgaaacacaaagtgaagtaggaaggtttgaagcctattttatatgaggttgcgcacagggtagcatagctcaaagcagtgtgggagttagtttgatggcattcaagctagcgtgatgaggtcaagaaactcaaaagtgcacaaatgcatgctttccatggtatttggaaactcgaaatagggatagtgttatcgactatcatgtgcacacagggtcttgaattggagcaccgataagttggacacagtcaaaagacttgtaccagtagcctccccatgctaagaaacttaaccgttcttgcggccaagaaaagaaatgttagcaagagacaacaagggtcagctaagcttgtgtctggtaaggagatcttcatgcctaaatagtttactaatgcactcaggactgaactcttgccattttcttaaaggtctgaaattgagagctgagtcgaatatgataaatttcattattaaatcagattttgttgactgtgttaatgctgtgagtttgattaataactcttattggttgcaatgacttagatgggctgatgagacaaatcaaaatccttgctaaatctttgggagactattactttagttatagtacactccaagatgtaccaattttcttgggccaagaatcccttaccatttgttaactagtgcttatagttatagccctttgatttgatgcttctcaagctttggctcatgacaggccttttccttgtaattggtttttgctctttttgcttatttttggtattggacaagtcgataatttgtcagacaaaagcactgcaaatattattcatatataagaaaacaataattcttaagtataataataataataatcctgaaaaacagtcaaataaggaagaagaataagaatgagagcaaaggtttaagaagggtttaaggcggcgtcttcccttccctcgcttccattttatttttcctttctctctttcttctcactgtcacagtttaaccctatgaattatttccgatgcaacttcattaccatcatcatcttcaacttcgccattgaatttcctcgaattttatctgta

SEQ ID NO: 266602 - DNA, 4269 bp, Cannabis indica
ctcttcacggatctggttccagcttgtcaatggattggtgtacatatgttgtacaccaaatgttcttaaatttgtttagctttaggagttctgttgtacttcatgtcattaggtttattaagtctattactctattcgagctcctatttacaaggtaggttgcggttgctaaggcttgtctccaaatagttttctaattcggaactgaacaacaaattaacaactatgtgggatgaaattaactaactcaggcctagaatcaattgcacatgtgcagcaacagctcaaacgtaagaccatctcaatcatgatcaaatcttgcaatttcttataggcttaaatgaatcttatcatgcaatttgtgatcaaatattacttcttgatccctgtccttccctcaataaggtcttttcaatggttgtcctcaaagaaagacaaagaaccttaggacatcgtatcacccatcccctaactgctgctacaactaccaacaatccatctactactcctgcacttaatgccaaccccaatgtcaatcaaacctcaaggaacaaaaggccaaggcccattgcacacattttcaaaaaccaagacattacaaagagaaatgttatttcctacatggtttcccacttggttatgtataaccaagatccaatgaacaccctacttcaaacaatcgaaaacaagatgttgcttccacatctcaaaatgtttctcaaacttcgcaagtttccacaactccaaatgagcaaaaccccactgctccattaacccatgctcaatgtcaggagttaatttcaatgctcacttaacaattgcaacctatcaatgatgcttccacatcaaatggcccaaccatcaataactttgccggtaaacccaatcctttatctcctacttcttggattgtagatagtggcgctactcaccatgcatgtttgttgcaatatcaattgctttacatcaattaaaaaatctataacacagatttttcactttaactaatgctacaacaattcaaatcgaactcataggaatagtatattaaattctgatataacattacacaatattctatatgtaccaaaatttaaattgaattttctttcaattagtagccttataaatgacaattctcttagtgttttgttcacacataattgttgctacatcacccttcttggacattgtggattgggataggtaaaagatttggcaagttatactacatccagcaggactcaagacaaatggcatacacgccttggccatccatttgtaccgattacaaataaaataaataaacaattgaatttctctattgattacagcagtaacaatgactgtcctacttgccatctttctaaacaaaagaaatttccttttgtctttaacaacaatttctcaatttggtccatctagacatttggggaccctatcatataccttatgttgaaggctacaagtatcttttaatcattgtagatgacaactctaggcacacatggttacacttactttgagcaaaatttgatgctctactcattattcaaaatttcttcacttttgtgcgtgttcattacaaaagcaaaatcaaatctgtaacaacagacagtgccaaagaattaacactaaatagtttctatgctaaacaagatgttatacatttcaatgcatgtgtaggcagaccagaacaaaatattgtggtagatagaaaacaccaacacattttaaatgtggctagagctttgccattcaaatgtaacttaccattaccctattggaggtaaatggtaaaaactgttgtatacttgctaaataaaacacaatctgttctttaaaaagacaacacttcctatgagttactacaaaataaaaacctgagtatgcacatatcaggaactttggatgcttagcctatgcatctcacatccacattccacacaacgtttgccccttgagctagggcctgcatattcataggctaccctaacaaaatagaaaagcctacacactactttacatataaactaaaaacatactttcactcaggagatgtagtattttatgaatccatttaccccctcgaaacgagtactcataatcctcacattgacaatttttttcaaacttacaccaatactactgatcatactcctttaaaggatcaaacaatcacaccagaaccatctcaaaccatcgaaaagccatcagtaaataattttccagccaccaaatcatgcagaaaaataacctaacccacctatccgtaggattacatttgtgccttatccagcacactttaccccatgacaaacttcctctcttacagaaaattctctcccaaattcagagcagctgcccttgccatcacaaacttttttgaagctaatgaaacttcaatagttgttccccttccccctggccaacataccattagcaacaaatgggtctatataatcaaatataaccataatggcttagttgaaagatgtaaggctcggttagtagccaaaggctacactcaacaacaaggtgttgactactttgaaacataggtccatgtagccaagttcaatacgcttaaactcctccttgtccttgctgcaataaaatagtggcacctacaccacatggttattaacaatgcatctctccatggtgaattacatgaagacatttacatgaaatttccacaaggctacaaacccatagccacaattcttaacaatgcagtttgcaaattgaagaaaagcttatgcaaccttaaacaatcctcctggcaatggtatgctaaattgagcaccaccctactgcaactaggattcaatcaatctaggaatgacaattccttgttcataaaacaaacttatgacaccttccttggattactcatatacattgatgatatcatacttgccacaaataacacaccagccctacaacaattaacatcaacacttaatgacaccttcaggctcaaagatcttagccctctgtagtttttcttaagccttagtatcgcacgctgcaacaaaggaatctcagtcactcaaagaccattcactctacaaattttacaagaaattggaaacgttgccacaaaaccaatttccacaccaatggagcccacaccaaactcaacaatgagactcgatcactgctcacctatcctacacaatatcatagcatcatagggaagctcatatacctcaccatcaccaaacatgacatattatatgttgtcaacaaactaagccagtacgtacaagcactaagggaaacacacctaaacgcagccactcatattatccaatacttaaaaggcactccaggataagggttattcttccatgcctctgcttctgaaccatttcatcttcaagccttcacaaatgtagacttgggagcctgtttagatacaagacgatccatatcagggtactgcatcttccttggacaatcactcatctcctagaaataaaaaaagaagtaaacagtgtctcgatcatcagtagaaactgagtacagagccatgaccaatgcaacatgggaattagcttggctccattctatcattcaagatttcagtatcagcttaagccttcccccaactctgttttgtgacaacaatgttgccctacatatatcagagaatccagtgtactatgaacatactaaacatgtagaaattgatcgccacctaatttgagaaaaaatcaacaaaggcatcatcaaaatcaatcatgttccaacaaaatccaacattactcactacaagataatgggttttactaatgctattattactaacgccaaaaaatcctcattaaaaatggtaatatcaataacgatacttcaatgtcgttgggagtttgcaatttattttttttgttagaaggtaaatcaataatgacataataacccccaatgacattattgttattcatatacacatcaacagcgacaatgtcgttgggaaatgtttttaaaaaaaaaaattaaaaacgttggatttagcttctttcttttcccgcccattaaagccccaacgacaaccatgcactgaggacatgtcgttgggggttgactgacacaacagtctgtcagtcaacccccaacaacatgtcctcaattgtttgttgttggggcttttttggctgacataaaacaaagctcaagcattagatctatcttatttttatttgctcattgttcaaaccattcttctcaaaaaaaaacctacactatatatcaccttcttca

SEQ ID NO: 266603 - DNA, 5644 bp, Cannabis indica
attataaggttatatgcttaaacataaaagcaatgtaaatccaaaaccattcttcttattacaaaaaaatacttaaaagtattagtgtgttaaacatgactttcttattattattgatataattaaatataagatatcatataacaaagaataacatattttaatttaataattattataaaaatgattaacttaataattcttataaacaaattgcaagaaatacaagaattattaattatgctgctaaaccagctttgttaaaatgccttactcttcagaacatatggaataaagaaattgctcaacactaccacataggcacataatacaaaagcaaatcaattttaatttaatttattttttcctatagaaaaattaacatctcttgatcttaacaaatccctctccttttgtgctttgctatgtagaactgaacctgcaaggaatttagaacattagattttggttaatttcttgtctattttctaatcaaattgatataaaaagatattctcatcacactacacaagtgctcttttcttttacaatttatatttgatcaattgttgtgctatcagaatgtgacgaatggagttcggataggttaccttccgggccagaaaagtcttcagcaattggaaagtgaaatgagctgttcgactacattcgggtctgcaagagtgcttgtgtctccaagctcatctaactgtccagaagcaatttttctcagaatccttctcataatctttccactccttgtctttggaagcccgggcgcccagtggattctttctggtgcagcaaatgctccaatctgaaatgtaaaatcatttcttaagtcaagagtacaaatatcagaatctacattcatgctaagcaagcatctggcataagctcccatattaaaaagtttctggtgctacgaaatggtcacttgttgaaagacacacaagtatagatcgataaccacaaagattgaaacttgatctcgaggagccagttcaattccatccagaataacaagagaattataaaacattcaataaatttgtagatccatacctgctttcttacggaaaggatgagactctttcgtaattcttcactgtaaggttcaccttcaaccagagtaacaaatgcatatatagcctgtcctttcacctgtgtaccataaaaatattttggtgagaaatcggcatcaagaatcataacaaagtatcatgattaggcatttagaagtagttggttacaacataaaagttctacactaaatacctcatgctcaataccaactacagcagcttctgcacatttgggatgtgaaaccagagcagattcaacttctgccgtaccaatacgatgtccactgcataaatttacaaacaaaattaggtgactaaatgccaccgtttacccatagaaattttcataatcacaaatgcatagacatttccacatagagaaaaaaagaggggttaatggcctcagagcaagtgaggggacaaggattaggtataagtttctagagtactttgaagtctaaactaaagattttgaaagctcaaaatatcaaatacctgacatttataacgtcatcaactcttcctgtaagccagtggtatccatccttgtccctgaaacaatgacttattaaacttagcatacttagcatttgatgttaaaacatgatcctataagttttcaaactatatttttaaaaatttaaggcaagatatgaagattgctgatgcagttggcattggggatccaggcaagtaaaactgatagactgtaatgataataacttgcctgctgcagccatcaccagtgaagtaataaccagtgaaaggcttaaagtaagtggtttcgtatcgctcatggtcaccgtagagggttcggaatgctccaggccaagagcccttcacacacagatatccactgcactccccttcaatctcaacacctttctcgtctactataacaggctacaacatagacagaaaactatgaagcatcagaaataattatttgcaagccaaaagaaagtctctttttttgataaaagaataataatattaaaaaagaagaaagagctaacccaaaattaccttaactccaaagaaaggaaaggttgcagaaccaggcttctgtggccaggcacctggtaatggcgtgatctgccaggaatagacaatgaggaaatatgtaacagatttgaaagccagagaaggaagtgtgcacttatatgcatgattggagtaaataaaaaaaaatcaaatgttttctgctaatcatcaggtgctatgaatccctaaaatagaataaagagcaaagcaaaagtaccatgaagccaccagtttcagtttgccaccatgtatcagaaatagggcaccgtgaatctccaaccacattataaaaccacctgcaatggcaggatatatctgagaagttagttaatagtaaaaaaaatatgaagtgaagatgaaatgagtaattttcagtttatgctgtacctccatgcacttggattgataggttcaccaacactgccaaggatccgtaaggattttcttgagtagcgagttacatactgcacaatcaacaatagttgatcagttaaccacttatgaaattacataactccagggaaacagattccctgttagaatatcaataaatttacttcatagcaaccagaatagacttctgttatcctaattaaacaactaaaggaccaataagatgaaaatacgagcacagcaagaacaagttcatcagcacaaataaacaaacactataaaatattttcatatgggaatggggtattattatgcaacttcattaatggtaaagaattagtaagtaatcttatttatgcataaaacaagaatagcctgtgtgatgattcttcctactgatctccatgtcaatttgagttaaaagtatgaaaaaaaaaagatatcttgcctcatcaccatcacgcatgagggatcgcactaatgtaggggcagtgtaaaatattgttactttgtatttatctacaatgtcccaacagcgtcctgaatctggataattaggagcctgcaagttatacattgaataataataatcattaatgacattaaagaacggttttgatagtaaaagtaagtaggtagcagtgcctgtatgatacattggactctactaatttcacaaatttgattgttgatctaatatttaatgcctggtagtagtatgtcaaacttcaataaatgttgcttattcattagtttttaaggtctggtttgttccttttattgaatgcattagattaaggtaaaacttcaacataaatactcaaatggctactcatgacaacagtttaaatcaattctagccaaaaacatttacccttccaaaaataggaaaagtcgggtccaaaaatttacatacgaacatcaatttaactttataatttgagaatatgaagttcaatgtaaaagtttccatctaacaatattgacttcttttaagagtcttccttcttgctttctagccattactttggtcccactaagtaataagtatcatcctttcccaaacacaacaatttaagattgtctggtagaattgcacatataaataatctttttcatttacgagtaaaatattgatagtagactttataactaaaattaccccttcaaaaactatgcaagatgctccattgagcagtggtccataagtgacatagctgtgcccagtaatccaaccacagtcagctgtacacctaaggaaaaaaaaaaaacgacaagtcttaatctaaaaagtggaggaacaaactgtctgatattgatgtcttgccataataaagttccaaagacacactgagctttcgaagagataccagtatacatcagatggtttataatcaaatgcgtatttgaatgttgttgcagtatacaccatatatcctccagttgtatgcagaacacccttcaaagaacaaacgaatattgaaaagggctatagctacttgggaagaaagcaaatgcttatttgctaagaggaaaaatgtaaataagaaaaatccatggttttatatgcagtgtgtaccttaggttttccagtactaccactagtgtatagcagaaatagtggatcctcagcatcaacccactccactgcacactcagttggatatttaggaatgacatcctagaagacaatcaatacccatcaatactctgtaaatagttgcactaaatatatgattgtatgaattgatgtaagtatgctcttagtattcttagtggcatttttctttgttttaataatgttaataactactatatgtccagataatagcatggccattcagtgacatgtttctttgatataataactactatatttatagcatcttatacaaatgcagcatgtcgcaaaacaaactcatttaatgttttctgattgcatactaacctgacctaccatatatctcttccgtcttgcccattttagtaatatccctccttcatagccaattgattttcgtagacaaggcatgtatctgctcaaagaagtaatcttatgcctatttgagatggggaaaacaaaaatgatacgtacttgataattagcattatatggatttttttggacaattagaggtaattgcaactgaattacaaagcagtaaaattcaaacctatggggacaccagttttggcagactcaacaagggctgcatcaactatatctttgaggtgaatgatcttaggaccccttttaacagcattacaagtgataacaacttttggtttgcaatctatgattctctgagaaagagattctgcagaaaatccagcaaaaacaacctgaaagaaaagaaattaatggtactaaaaagaaaacaagctttagtgaataatggagctgatgaatgagagagagcaaaaaaagaataccgaatgaacagcaccaatgcgagcacacgcgagcattgtgattggaagttccaataacatgggtaagtaaatgacaacagcatcacccttttgaactcccatatctttcaaataatttgcaagctaaagcagcaaaattcaaagacattacatccatattttctaatacaatgacaatgtcaagaaaaaatagggcaatagaagtaagttagaagagacaaacctggcaaactttgtggagaagttgagagtaagttaaagagtcatcaaatccagtgtcgttgccttcccaatacaaagcaattttgtcaccaagtccagcttcaacatttttatccaaacaattgtaacaaatgttggtaatacctcccttgaaccactgtacaacattgaacaccatgacaatgaaaaccaagagatttcaaaccaaagcaaaaagagaaagaaacaaaaaagtattaatcacctcaatgttgactcttcctttgctgacatcaagattctcagaataaacagagtcatcccatttctgtttccagtagaattgggaagcaatctccgaccaaaacccagccggatcctcgatcgatcttttatacatctcaagatactattcaaaaaaaaaaaatagtacacaatcaactcaatctaaatcaaataaaatcaaatcaaatgtgtatgtaccttct

SEQ ID NO: 266604 - DNA, 894 bp, Cannabis indica
taaaaagaaactttcattagcataataactcttggtttaggataggtcgtaccttatccacagtatgccaaaactccaaactttttgccaaagttacagtacaatgagatttatgtcattcattcttaactgtcattttggagccaaaccaactgctccttgctgggaaaccatcaagcctccatggataaactggccacatttcacaaccttaacccacttttcttacaaaacacacgtctctctaagccacacagaatttgttcactcaattttctgtgtgttagagtcagaagcaccacttatgagacccctctttctctttcctctcttccatgtccaatccctaaacttcactttttggatgaagtaggaaagatcaaaactttaagttcagtgaaagtattacatgcccagatgataaaaaaggaaactttggataatactgatgagataaaaagcttgatcacctcttacttggaattcggcgatttcaagtccgcagccatggtatttatcatgggttgtccacgaaattatcttatgtggatgtctttcgtagaagagcttaggagttttgggggtaatccggttgaaattcttcaagtttttagtgagttgcaatgtggaggtgttatttttgatagtgaagttcttactatgattttgaagctttgtgcatgtttgaaggattcatggcttggtgtggcaattcattgttgtttaatcaagagaggttttcacatggatgtgtatttgaagtctgaattaatcagtttttatggaacgtgttggggcattgaaagagccaagcaagtgtttggtgaaatgtctgatagagaaggaatcttatggaatgagatgatcttgctgaatttgaagaacgagagatgg

SEQ ID NO: 266605 - DNA, 2297 bp, Cannabis indica
aaagagttttatttagggcataaaacccaacataaattgacttagcttgttaacaatgaacactatgtcgggtcgagtaagagtaagatattggagggcgcctaatgtacttatgtgcaatgttggatttgaaaaaggttctccaatggaaaagagagctttattgctgaactggtggggctggagcttggctttgctccttccattttgactttgctgagaattttagttatatacttcgattgagagagatgcattccagctgaagttctttgcacttcaactccaagaaagtaatgaagagggcctagatctttaacatcaaattccttgttgagatcttgaatgaggctggagattagttgcttgctcggaccggtaatcaatatatcgtcaacatacacaagtaaaagaatttgtgtgtcacccgtaccagaaaaataaagagaattatcagacctggagcatgaaaatcccttgctgcagagtgtcatttttagtttttcattccaagctcttgaagcttgcttaagaccatagattgccttgtgtagcttgcatacatgagtaggatggatgggatctatgaatccaggtagttgagtcatatagaccgatgctttgagtgtgccattaagaaatgcatttgaaacatctaattgagtaacatcccaactgtttaaaactgccaatgtgaggaaggttcttactgtgaatggcttgacaatcgggctaaaggtctcggtataatctattcccggtgtttgggagtatcctttggcgactaaccttgatttgaacttgtcaacggagccatcggcattaagtttgatacggtgtacccatttatttcccacaaggttcatatctggtgaatagggaacaagtgtccaggtgttatttttcttgagagcattgtcctctttctacatagatgcaagccaaattgggttgttaagggcctgttttagagttgttggtactttaggtaaggtggattcgggtaagggatggatagaagcatggtaggcttttggtttgtgtatacccgatttggaccttgtttgcatttgatgtgtgttgagggtattattgtgggaaggttggttgattttttgtggttcattagagggttgctggtggggattcattgttgtactgattgtatctggtacgggattaggtgagtgaacaatagtatcctggacatcatgatccttgctgggaggaaaagctgatgcagcagcagtggctactggtgctggtgcagcaggcctcatatcagcaggggcagttgtaacagatggcatagcagggacagttgtattagttatgataggaggtgtaagaaatgaagtagaaggaaaaaaagtttgagaagaagaagataccttgctggatttatcttgtttgagggctgggaattcttctttattaaagactacatttcttgatatgtaaattttgccatctttgttttcacacaagtaccctttgtgattcatggagtagccaactaggatacatttttcagatctgagagacatcttgtgactgttatagggtcttaaatgtgggtaacaggcacacccaaaaggtttcagcatattgtaatcaagcaccttgtgaaacaggctttcatatggagacatgtccccaagaactcgagttggcattatatttatgaggtatacaacatgtttaaatgctaaccaccaataatcaagagatagaccagcatgtgcaagtaaggtaaggccggtttcagtaatgtgacggtgcttgcgctcagctcgaccattttgagcatggtcatggggcatggatgttggaaatggactccatgatgagtgaggaatgatgctagggacctatactcacctccccagtcggattggacagccttgatggggagatcaaatttttcgacaaatgtcttaaattgtaaaaaagtactataggcttgagactttgtggacaaaggaaagatccatgtgtaacggctaaaatcatctagaaagtgaatatagtacctatgcccttctttggattcaacatgggatggtccccacaagtccgtgtgaaccaattgtaatggttgagatgctctagactcagatatagggtgaaattgtttatgacttttacctcttttgcaagcatcacggaattttaaatttttaaggctggtgggaatgtgtaatcctgagaggattttacctaatatttctggtgcaggatgaccaagttttgaatgccatatgttgacgtcaaatttttgagcaagacaagacaaa

SEQ ID NO: 266606 - DNA, 7326 bp, Cannabis indica
attctcatggggggccatgagaattagagagtgtaattggaacccctcaattatctccaattacacagagtgtaattacatggtcagacaaacatgccaaattgtgtaattacctctaattacacacaaatccaattacattgtggctttccaaacgcacccttggtttggggctgacttgtcttattctaataggatcctagttggcattagttacattaactaatgcctataaataggactaggacatgggttcttttgtaaggatggttgggaattagaaaagagtagactcgtgtagagagaccaatcctctcaaatgattggaataggagagataagcctcttgaatgcttgattcgtgtactatttcagcaattcaataaagttttatttgagagattttattgtttatgtcttgtttactgttaaaagagttcttggaggatagttcagaaagtgactcgtcaaaagaggaagatgagtactcggaagaagaagataaggaggagcaggaggacatcattagtgatatggaggggctttggagagatgaagaagaagaaagcataccaatctaatttggtaggggataagcaggttgagagctgctactttgagaaagaagcatcatagagtaaaacggtaatctctatcaaccatgggaatgtaaatattaccaaacaagaatgatgggggcagaagtttgatgatactaaaaatgggaggaggatgtgtagagaactaaataagttgacttttaatgtgaattatgacaaaagcagtaacaagtcaagggtcgtgaaacgtatctaatgaagatcttattctgaaacgtgagaggatgtggggataaaaagaagagaaaagcaattaaagcaacaatctctaaagttaatcctgctttggttgtattacaagaagctaagaaggataaagtggatagaagatttattggtagtatatggagatcgagattcaaagcctggatattacttccagccataggaagatcaggagaacattaatagtttgggacacgagaagcatcgagataatagattccatgatggcagatttttctatttctatactaattaaggctgaaggaaaagaaccttggtggttctctggggtatatggaccatgttcgtataagagcaggtctgatttttgggatgagttggcaggattgagttccatatgtggggaatcatggtgcttgggcggagattttaatggagtgaggagagaaggggagaagttgaatagttcctcaaatacaaagagcacgaaggtatttgatgagttaattcgggagctgaagctgattgaccagagctaaacaatggaagattcacatggtcaaactttcaaggaaatcctatttgttgtagactggatcgtttcatgttcacaaacaaatggaatctaatttttcgtttgttaggcaagaaatgctggtaagattagtgtcagaccataaccctattgtgattgataccaatccgccaaaatggagtccaggcccatcccgttttgataatttttggttggaacacaagtctttccccaagctttttgaagaatggaggaaagaagcaaaggtggaggaatggttgggatctaacttcatgaccaaactgaaaaaagtgcaaagaaaaaagaaacataaaggaatggagtaaagctacaattggacaaaataaatgggtggtgaatgcattaaaaggaaggttgatggccttagatagaatggagggtagtgattcgtggaacgagtcccttgaggtggaatggagaaacttaaaaacggaatggcaacgtctaaaattataggaagagaggtgtgtgtggctgaaatcaaaatgtaaatgggcaaaagaaggagatgccaattcaaggtttattcataacttattaaatgcaagaaagtcaaagaatactatctcgcgacttgagagggaagatggatccattatcgataaagaagaagaaatagtggctgaattgattaacttcttctcaagattgtacacttcagaaaacagaagaggtaggggcatcgagggcatagtgttgagaaatcacagctacttcagccatagaattagaaaaaccttctgagaaagaggaagtaaaaaatgtggttttcagttgtgaaggtaacagagctccaagaccggacggattcaatctggtagcattaagcaaattggtaaatcattaaagaagatctcatggaagtatttaaagcgttcgaaagagaagggagaatagaaggcagtatcaacgaaacattcatatgtctgatacccaaaagactcaacaattgcaaggtaaaagacttcaggccgatatagtaaggcacaaaatttctgggactctaaattaggtgggcgttggtctccaaaagggccttggagagagatatccgatatgtatgaggaatacctgaaattggtagtgggaaaaggggatactgttcatttttcggaagatgtgtggattgaagaatcatctttgaagagtgcctttctgaatctatcagtgttatccaaaggcatgaatgaatgtatttgggagatggtagtcgatgatggcttaccaggcgactagtgaagagttgggatttcaaatttagaagaaatctagcagattgagaagtccctaaccttatcaacctattaaagaggttggagcacgtaaggctgcccagtatagatatagacattagagtttggaagctggatgtaggaggaatattctcgagcaaatccgcttttaaatggttgacatcagatccaaaccatagtggactgatatggtcaaagatcctttggaaaagtttagttcccttaaaggttcatatggaccaacaccctctctgagcttatcgagctccctcaaaatcaactgaaattcaatctgaaatgcctataactcctgttgcatctcccagtgcacagcatcaatccgctcatcaatgacttccagttgagagtcttttgtagggcccataaaagatcgtgaatttgataccaattgatagagataacctgtcaattaatatcaagaacacaaataaagaaagaaaatatgggtctcaacccttagttattgacaaatctcaagattcgagaacctgatctctccacaaggtaaaacctaaatacaattctcacataaaacccgatcaggaaacaactcacattatttatactaattagtgcactatactagctgcacactcccacacccaaccaaaactcttctaactaacccctgccacgtcatttccttttttggttgtcttccctttgtttctcctactgtgcatgaggttagtggtggcttatcaagaacatttgtacgttagtgaaaaaacgatactttttatattaaaaaaaaatgtaagaccactactattagtgagactaatcatagattattgtttttcggcccactcaaacgggcccatatatagggtcaaaatatcacttgtaaaaggatagaaccaatacactaccaaaatcaccaaagaacttcaaccttgcaaagttttcctcttaatacaactgactcgtggacaaggttttcaattttcattaatagtttaaaacacgttaaatctcgtgtgttcttatttatgtcttcaacctctctacaatttgtagttgtcaggaaaacctgatcaacaaatatcaacttttgcaactaggctctctgcctaatactatgataaccctcgtttcatatgaaatataaaatgaaataaaggtggcaaggtacacccttctgcacaaacctgtcgtttccctctcaccccaagatggggagttgccaaggttataaaattgattggctccaacccagcaatcataccacgtttcgaggaatatgctgtttgtgaatttggcatcagagaatttggagagtaaagaacagcaacagcatatcttgcaatcaagccaccaagagaatgggctaaaaatgaaattttcttgaggctttctgttctttgcacaacttgcatgacctgtttaaaagccaagggtaacataatcaaatcaaaaaattgcttacaaatatcaaatataggagatataaccaaattttaaaaattctcctcaatgtaagattctcacttcatctgctaatcgttttccagctccatctataccagcaaaagttctagagtacgtattcgacgaacttgctgcaaaacatcaacacctaatcaaattcaagcactaaaaatattatggcatctgactcatgcaaatgtctgatagacctcccataaggttcacttatgtgaggtgcaacaagaggattaactaagctaagtttttttacttagctgagttgtattagtagtgttgttatgtatatattagagtttgttatgatttttaggaaattttattttgctagaccaaaagttagtttaggaatataaataagtggatttgggttgtcgtaatgctttttatcaaaaagaaaagagttctaataatggaagagcaactttggggattagctatctcagattagctactgctctatactatgtatgtttttgtcttagtctctaattgaggccagggtttgagaaataaagagaaggttttctggtttatgtgtgggtttcttggctgagttctatcaatgtactacagatttggtttaatcaagaaaccaacaaaaaatcgtaacccaagtatcaagcactttgacaaccaattgtttctttttatttatttctttattctctttccaatgttgaaagcacatgcaaaaatttacatgttgccatgatgagcctgtgggtcaaattatcgatactacttgtctgtctatcctgcaaatgcttcttaccattgtgttctctatttaaccaaacctaaaatcaagaattcatacctactgtgtggcttttataagtgaattttaaaaaagaattattatcagacaaatctctaaacatgcaagatgattgccaatttgttagacagccccaaatgtttcacttttcagtgaggacaaaaaaagttggatcatgaatagaagaaaaatgagcaagtgataagcttttcctattttgacacccttcttaaaaggtgaagcagaaaacatcaagttaatagagaagataggtagctgaaactggcatgcaggttttctagcaattgtgctatcgttttctatgatccaaatattgtagggttagatgaagcctaaaaattgattattgattattacccctcttcattttatgaaaaaattgggattcttcctatgtttacttcaccccttaaaattggacgaccattctccatagtgaaatagaggactatcaaatatcccacatggtctgatacactaataaaagaaaaaagaaaaaaatatcaatccttcaaagaattctgctgtttgcgttaccagagttacaaagttccaagtcgttgagacacttggaaaactctacaaagaagttattagtcttccacaatccgaatacaacaatccaatcctttactaaggcagctgttggtatatttataccaacaacaacaactaccatagaaaactatcaaaccaaccaatcatacttacatttacaacacctcagccctattttaattaattctaattattgccctgtttatgcctggaatatgttagtctaagcggtggcctaacatgtcatcatgcttgatgtattaacataaaaagaataactatagttgcaaatctgtgattgaaacctgaatagattaataataaatgagacgaacataccgtagattagaaattttctcccaagtcgcttttttaactctgcttgaacgtacgtccagtcacttgggctgtaaaataaatattagagaagcttatatgaattggaagcaaaaagaaacataaccatgaaacactgctgaaaaacatttagttgatttaaaatttaacaacaaaacatttatagttgaattgaaaactaatggcaacagtttaacgtttaaaatgggccttaagaatatgttatgggacttattttatgtaaataaaatcttaaaagtcttaaaaatatttaaaattctagacaaccgtaattttgtaattttttctttgttgtttttatgttttttttttaaataatcctataattattcaatacttatccttatattaaaccctacaatcctcatgataaatcaaataccacacaccttagcctgactaatcaaattaaccctcaaatgagttagttttcatttctaaagttgatcatatgactcctaagaccgtaatggttgaatacgtacctagccaatatgccatgaacaaggacaaggagatgatcaggctgatctttagtaatacccctggacgatccgaaatttccttgaattattgtagacatactgtgacctctaaaacctcgatttctccaattattgcttgtccctgcacaaaaattttgtaatcaacagctaaaaaaaaatggagcatattgattccctgaaacaattttcctcaaccaccgttcggtcttgagtattaatgataaattttcgatgttagcttacactataagaaacaaaacttgaagtgttgtaacgctcacatgaatcaaaagatttcgaaaggaaaaagaaaatcctaatttagttcccttctatctcatccaataaataagtatttatatttcaatattttcgacattgacaagtcaccgtctaaataaaaaagtcatttcgaagcaaattaccagaggaggagaagcccaaagatgacgaagaacagcaatttgaagacgaggaacaggccgacgatgaggaaaaagacgacgaagaagacggcgacggcgacgaacttaaagagccatttcttcgattaccaccaaatatgggcgagtaacaacaacgcgcgtgaatcagaggagccgaagccatgtaagcaaatatgtcgtatatataaacacacccagagagtcagacagagagagattttggattgggtttgaaaggagaatcaggaaagcatcaaggccatactgtttgttatcatgacaatcgcctacgccagcaagcccattctttctttcagactttcactttcatcagtattctcctcattctttgcttcttcgcttcttctccaactgaataaaattacccagtacattgctttcctactcattttctagtcctttactgtttttctaatattatttaattattttatttttagttcgtcactttaaaaaaaaaaaaaaactaaaaaaaaaaaaacgaaaaaaacgaagagtagagagagtta

SEQ ID NO: 266607 - DNA, 2918 bp, Cannabis indica
attgtaaacataagaatcacaagaccaagagtgacccttatattctttgtattagtttatttatgggttggttgtgattgatttgatgtgtcatcttctgaaaccatgacgtggttcttaacttatcaatggacttttatacaggatttgacaaacttcttatagatctatagatttgaggtttcctttaagttgtcatgaaggaatgtgactgagaagaatcacttattcatctatatgatcgatgtttactttatgttgtcaaatgacagaaaaaccgctaacagatttgaatttgctacctggacattaagtatgggtggtaactttgacattaaagtaaccaataaaatagaagaaaaaagacattcaagtagatagttgttggttttgattgctaagttgtaggattttgttgttcctatctaaccaaaacatttaacagtcactgaaattattttgtattatacaatcattgggctgttcatagaccaaaatcctaaacactgccatggttgtgttcttgatcctaatattaacagtttctgttcttatatagctctagaaattagtcagtggctgtcaatttgaataatttagagagttttctatgcctatagatttagaatttgatgatcttttcatgatagactacactcaaggattcccacttgacataatattcttgcggtgcttttttggtcagctctagttgcaataattacgtttcgtctctatttcccatgctggtggatgtattattgttgatcttacatgagtcctttgtcacatatttatgatcactttggtactttttttttctttcaatattattgttattgtggcttggaagcgtctttgaaccattgtcacccaaaactctgattggttgtaatcaattatgattcctatgctcttcaggttgatcaatccagttgttgtgtcacctacaattgctgcagttggactttctttttacagttacggttttcctcttgttggcaattgtcttgagatcggagcagtgcagatattattggtcattttattttctctcgtaagtttaatgaagttactcttgatatatttttaatcgtgggaattttgtttcttatttatgtcttgaaaatactaatttttttatttgtctgcagtatctgcgcaagatatccatttttggtcaccgcatatttctaatatacgcggtacgttttatgaatttaccatggttcacttgtatattcttgcaatgttattattaattctttccgtgaaaatttgagattaatgtgtttattcttcctaatatgctaggttccattgggtctggcaattacttgggcagctgctttcttactgactgcagctggagcctatagctataaaggatgtgacataaatgtaccttcctcaaatataatatcagaacattgcagaaagcatgtctcaaggatgaagtactgtcgagttgatactaatcaagcaatacaatcctctccatggtttaggttcccttatccattacaatggggtactcctgtcttcacctggaaaatggctttcgttatgtgtgtcgtctctataatcgcatccgtggattcggtgagtttcttgttttttacaaagggtttcatggttctcttatgtgttttatctattgtcaattttatatttcttcaaatgtcaaatgaacttgattttttccttatgaaaaagtagagggttacattggattggactgtagtgtttgctcttgtttggagaggttgtagttcaaaacttagtggtgtgagtttgtatctagttgcggtaaatgtggcagatttacgacatatgagaaatccccaatcgaaatgtaccctgaaagggtttagaaggtaattaggattgatgctagtggattgagtcaaccttgattgctgggactgattggttattatggaatgtccttttaagattggggaggaacgtgagaagaaattatgcaatttggatagattatatcttgatggggatgatgatggatccctgatgtgatgtgatgtgatgttttgagtttttctttgtaataaaagattcccttcaatccaatgattgttccattgctaccacaggtctgggtaccaaaaatgagccatgttatcatcttgtgtggatggcccaccttgcttccactatgcctttctgacactaacaccttttatggctttgttgaatctttgaacatgatcatttgttatcttaataataatatcgaactgtttttcctaaattttgttgcttgtgctgtacttgatgtgacctctgaagttatgtaattacaatttgaatttttcaggttggctcgtaccatgcctcttcactgttggtggcatctaggcctcctacccccggagttcttagtcgaggaattggtttggaaggtctttcaagtgtcttggctggtctatggggtactggaactggatccactactttgactgaaaatgttcacactattgctgtgactaaaatgggaagtcgaagggctgttgaaataggtgcatgcattttgatagtcttatcccttgttggtaagttctgataaaaacagctttcatttcaatttttgttaatgatacaaccaaagcgtagaatctttatttaaaatgtttagattagaagtgtgcttaatgtttttcttatgcccgtttgctatgcaaacaaaacttagatttccttgttggacccgccaaaagagtaaatttaaacatgatctgaatggtcattgtaatttgacagttgaaaaaaagttccccgcccccctaagttacaaactagatattatgctttaacacatcgatttcaagttctattgcttggatcctgtgcttaattgaacaaaaacttggtgtatagtaatttctatattgaatatc

SEQ ID NO: 266608 - DNA, 1802 bp, Cannabis indica
agctaaaatgatccctctattcaagatgtttgccggcggacctttaggcaccggaaaccaatggtatactctcatcggtcacgacacttactcttccaattttgattgtcacatgaacacttgagatcaaacatggaatgtaatgtgattgatcagttcaaattggctttcaatgatctcaaaagattgactgtttcatagttgtgtaggttttcatggattcatctagatgacatagtgaacctaatttatgaagctctaaccaatccatcctataaaggtaaagggttcttactaaatcaatcagaatgattaatctttaaaacatttcaacaattgaaactgagttcttccaatctcaggagtgataaacggaacagcaccgaatcctgttcgcctatccgaaatgtgtagtcatctggggaatgcaatgggcagaccttcatggctgccagttcccgactttgcgctcaaagcagtcctcggggaaggcgctgctgtggtgaggatttcataacattttcaccttttcattcatttctttttctttaccatataatatacataccgaaaaagcttattcgattaaaatgcaggttcttgaaggacaaagggtggttccaactaaagccaaagagttgggattcaacttcaagtactcatatgtaaaagaagcactaaaagccattctttcatgaaacatacaaatattttactgaggcaatagtcatgttcttcattctttttgttatgagggttatctttgatattgatatcactagtggacaaatcaaagtgaggattttggtgtgtattagtagtagtaattagaaaatttaataatagcaagtctttgaaattagttcttgatgacaatttgacttgtaatattgctaaatttgaatacttttcttctaatgcaaataatttattttcggataatggttgggtttgttgtacaagaaatcaaatgagcaattgagtattaaataccatgtcaaactttttttttaaggaaataccatgtcaaacttgattatataaaaaataaaataaataaaaggatgttgttgtaccttttaaccaaaaaagtgttttgtcacctatatttactattaatcagaatactatactatgaaattgaaagacaaggtttagatctaaactagctgtacccaaacttttttcacttgtccaactgttgttgttgagcattttttgggtatgaaatgagcctcctttgaaggtagattttcgatacttctcttctattgaaaataaattattctctaatggttgggtgccgtacaagaaatcaaatgggcaattgtgctttaaataacatgtcaaacttgattatataaaaaatagaataaagaaaataatgttcttgtacctcacctagaaaaaaaattaattataattcgtcggacttcttgacacggcatgaaattggcacgagtatgacacgataagtaaaaatataaaattgagcacgacacaatatgatactgtaaattggcacgacttgacacgaaaaataagtttaaacacaacacggcacgataagtccaaagacacaacacgtaagcacgaataaaccagtctaaaaacaagacacattaaaattttttataataataatatatatattaataaatattcaacttctaatcattttaattaactttttatatgattatgtataaaatattattgaaaaattacataaaaacttttagaacaaatacatatagtttagtaattaactcattaattctaaaaaaaaaataacaaaaaaa

SEQ ID NO: 266609 - DNA, 5323 bp, Cannabis indica
atccaaaaacaaatctagtggggataaccctatatgataggcacctatcactgtgttagggctaattaatagtgccaccacctatgtcttaacaagacattggtggtgttttttgtccagacaacttttgtcttttctccaatttatttaattaataaatttgaaaaataaattatttattacaaaataaataattactattttgacaaattaaaatagcctttttcgaactttcatatataacttttatccctaccattgactgtgtttcaaggtggcaatccggagactatgtacctataattctaagctctaataaactagattatttattgaatctcatcaatcaaataatcatgtttattaattccatgattactccactataaatatgaaattgaactcttagtttttatagaattatatttactgagttttactgcaatgtccattgatataattaattccaatgagtagccctccttgtgtcggttagtaattagttttggtcaaattttaccttctaattacttctttatcatttagtaccgttaattcactagtgaaagtataattcagatccaatataaatttgtgcacaatttttttagttctagaattaacacttaaaggaaaccaacattcgatacattaggaaagtcaggattctataattatagatcatgttcctagccatccatattattatattcccaaaacaaaagttataagaatcatcttcaatgagaaaatttaacgagtgaaccaaagaaactaataacattaataggagttcatgattactcaagattcaagctgatctactattaatcatctttatagtaaacgacatgtttgataaagacaacttaattatatatcgatcattgtcatatataatctctattatatcagcaccttcacttagatgtcatactatatcagcaatctgaatctagattgcttgcatcgaataatgggcatcaatgaatggtattagcaactattgattaaagattctaaaactttaatatgttgatgactattttattcgtagctaagtgatcttaattctccgtacaatacaagtcacagcctcatatatgaataaggaattttttgaaatttataaataaattattcaatatcaaatattaataatttaacattcaagcatatatgaaaatgttcaactcttatttataaacagaaatatatttataatatttttaggacataaaccctaacataccttgtagttgatttacaagtattgtgatcccctgcatagtcaatgtcacaatacctactagtttccaactttcacctttcttgtacacaagaatcatagtctatcgtacctttaatatacctaagtattcaccgaactacttctaaatgagacttatttggattttgcatgtattgactcatgactccaactaaataggaaatatcaaggcaagttaaggtcaagtagattagactacctaatatctgccaatacatggatgcatcctctaaatattttccttcgtgcacacacatttttccatttggttccatcggtgttgaaattgatttacaatccagcatcctaaacctctctagcaggtttatcacatacttttgttgacaaataagcaacccttcttttgtacgattgacctctaatcctaaaatgtgtttgagctctccaagctctttcatctggaggtagactgaaaaattgtatctcgtttgacaaatttctccttcaccatctccagggatgatcaaatcatctatgtataccaacatcaatgccaactttccttctcaagctttaacaaataagctagagtctagatgtgccatcttgtaaccactttggcttaagaattcagctattttctcataccatgctcgtggtgcttgcttcaatccattgcagacaaagttaggaaaagttgcacttttaaatcctcttggttgaatcttgtaaatgtcgaaatccaaatctccatgcaagaatgcatttctcatccatttgccacaagctccaatttttgttggccacaatttcaagtagaactcgtatagttgtaagttttgccactggactaagcacttcatcatagtctagtccatattcttgagagaagtcacgggctaccaatcgagccttatatctctcgattgacccacctgaacgacgctttactttataaacccagttacaagatatgggttttacatctttttattttggcactagatcccaagtctcgttttgctcaagtgtttcaatctcttctttcatcgttgtcattcacttaacactttgtgatgcttcttcaaatgtcccaggctcttttatagttctttcttcaactatggttacattggcatatttggatctggttttcttgttcttgttgaccttcaaagttgaatttgcgagtttgaatcttctacttcactaggtctaccatcttctctttgttattgatctataccagtttgccaagggttttgtgtctctatttgatcaactttacttccatttgaatcttctaattaatctaaacctagttgaagttgagcaatatgctcccccatcttctatactaacctatcttcaaaatcccccgagaggtaataccttctgaactgatgaccaccaagatgatgcttcatcaaataacacatttcatgaagtgtagcatttccatccctttctttggttattgtatcccacaaagatatattttatagctttcttgtcaaacttattacgtaaatggtcaggaacaaatagatagcatacacagtcaaatacatagctttcttgtcaaactgtaggtttcgtgttctgcattctcaaagggtgaaataaattctatactttgttgaagaagtttgttgatcacaacaattataattaaatcgtcgcttttgcccaaaaccttcccggtatattccatgtagcatactacgataaatttttgcaagatgcctattttttctttttgctacgccactttgttgtggtgtattggcacaagtatattgatgatgtatttgacactccttcaagtatcgatataacttatttgaactatattctctcccattatctatatgcaagcaacaaatcttcttgtacacttctcctttaattatttctttgaattctttaaactttgagagtgtgtcagaattttctttcataaaaaacccacatatatttagagaagttgtcaatgaaaatatcatataacgcatactaccaattgatggttgcttaactggcccaaactcatcataatgaactaattctaatggttttgttgctttaaactttgattgcacatatggtagatggtgtgctttaccatactgacatccaacacatatcgtatatgtttgcatatcaagttgaggtagccccctcaacatcaacttctttacattcacatttaactgagtagcgaacatgacctaattgtatgtgtcatagatatgatgttttattaatcctttctttgtccacatatgtggactctactgacaacacatagactgattctattcatcgtctttccattgctagcttttttaagagttagatgtcatgatacacctttatatcttggggaccaaacataaaaatgtggcttaatattgttagttgagctacagatgatgaatttttcttcatttctggaacataataaacatcttgaagtaacacctggttagaattatattgagacgtaactgtagtcttatcgacatgggctatcgataatcttgagctatcagtcgtcaccactatactacttccttactcaaataaattttgcaacatatttttatcacttgtcatatgatttgactaccctgaatctacaatctaatcaattttgtagtcaatcttttatgatgtcattaccatgaaagttaattcttcttcctccatagtaagaaatactttagtatcccaatcatcttcatgctctttataggtagaggtcgcagtattacttttagcaaactttttcttgaacgaatagtcttttgccacgtggcctattttttcgtaattgtaacacttgctatcaaactttttaccatgagaacgattctttgaagctccccattgatgagtcttcatttccttggagatgctttcttcaccatcctttttagatgcaccattattgttccccttttagttgcttttgatagtgtagagcacttcctcttcactcttcaatgcaactcctcttatttgcatagccatagcttcttgaccagcaagcaaattttcaaacttcaacaagtgataattgtgttggccatccttgtacagcagcaacaaaccctcaatatttgagtttcaaaccatggataagtagtttgtttatcctagcatcgcctatggatgttattggatctaaaacagatatttcacaacatatcgctttcatcttataaaaatattgggaaaagatcatgtcacgttgcgccttcaatatcaactcattcttgagaatatgtagtctcgtatcattcttctttaaaaagagtgtaacataggtgtctcatgcttctttcggtgttttagcatcgcgtatgtgctccaacatttattcttcaattgtagtcttcaaagcaaacattgttttgcctgctttaattttccacttttacaagatgcctgtcaattgtgtaattcaccaccactgacaatttctcaaagatcatatccttgaaggtaagactccatacatgttacccatgtggtataatttgtactgttaagctctttgattcttctaactacctgaagatcactcattacgctgacaagagttcaactacataaaaaaacttactttaacaaatctaacacagaatcaaatgtataattctaaatttaatatcccaaagaagaaattcacacagaaatggagccgcactccaaaatttatttaattaaaaatacactaagataatcctcaataataaaattacaacatatatatactagtaaaaagctacgtgttaggcacgtatactaaattttatactaggtattttatttaaaagtgatacaattaattattgaagaaaaaatattatgtgagattattattatgtatatcttaataatataatttataattttgataatttaaaataaatattggatgcaatatattagcatttaagaaagcttgataattttactgtaatatgttcttaagattatccaaaaataaactaaatattaatgttcaaatactaaagaaaacacaacttaaatgtgtataaa

SEQ ID NO: 266610 - DNA, 1883 bp, Cannabis indica
tcaactctaattctcaacaattctcttcccaatgtctaactatatcgccccgctatactaaaaatactacgatgtgattctaatagccaatcaccgcgctccaatgttgtcgggtacaaaacatgtaaaattaagaaatttctatatatgacatataaaatgcattctgaattcaaatgaatcaccataaattaataatttaaaattaataaataatttccataattaaaagctaattatctgctaattccaaatttaagctaaacggtctctacagcttgtatactctcggtgtgccacatggatcttaatttgattgtggccagagtatgcatccatgaagctcaaaacttcgtaccttgaggttgcattggccatcttttctatttgcagaaatggaaagcagtcctttagacaaggtttgtttagatccgtgaaatctatgcacattatccatgtcccattaggctttgggaccaaaaccagattggctagccatatgggatatagagcttctttgaggaaatcaatgttagtctgcttgtcaacttctaccttcacagcttctgatcttaatggatccaaaggtctctacttatgtcgaactggattgtcttttggatctgtattcagtgcatgaaaaatctatcaaggacatattctagtaatatcataatgactccaagccaatacatcactgtttcccttgactgtggaaaaaatcttttctttcacttttggaggtgagctcttcccaactcatataactttggtgggatcttaatctttgatgcatacctctttttacctcttccatttttcctattttttgttccacacctattcgtaaaatctagttcatcttattcttggacaacccctattgctggctgggatgaggttctggattctgctacattcccttcttgagcatgacgatggtcttgattgaaacattataataacttttggcacctttctgattacctttgttccaatgcttctggtatcgccagaaaacttcaaacataagtggcaaatggacatcactgctccaaaattgaccagaaatggtcgtccaaaaataacattgtaagttgttggacaatcaactattacaaaagtgttgtaattgaaagaggacactaaatttctttcagagacatctccatttattgtcaaaggaagttgtattattcccattaggattagcgtgtctttgaagccatgcaatttaatcagacaaggtaatagattcgcttccaccagaccaatggctttgaaggtatctttaaaaatgatattgatagagcatccattatctacgacaatcctagaaacacttttattcgctatttgttattctatcaccaatggatcattctaaggaaaatgcacatgcttggcaccgtcttctttgaaggtcattggcaaattcatcattcgaggactttgtacaggtgattgtactaggtacaaagtctcatcttgctccaattcatttaagtacatctcttgtggatttttggttcttttggaaatatttggtccactacaaatggttgtcatgtgacaatctagcataggcagggctgcttcataagaatagggattttaaggattgaaggatataataattctcactactggagcattttgtgcccctcaaagggcattagagcttgaattctaggagcttgagcatggcttactccctgaggaggattaacagctccatgttatcccagaatggaaagttgtccatgtgcaaccccccgtaatcctgatagcacgctccactggtgcctggtcactcagagggactgttgggttttataccctaaataaaactcatttcaatataatcagatatacttattaat

SEQ ID NO: 266611 - DNA, 5470 bp, Cannabis indica
tttttttttttttttgggtttctgcagctcagttgattaaaccttattgaatacacaaacacaagtttaagttgcatcattttgggaaaataaaatgaaaaagggcatcccataggatcgagaatacagttatgtgtagttttctggccaaaaaaagctattttattgtgtaaaaagtatattacaacaagaaacacaaattaatgttctaattattcccaacctgtcaagtacctacaacaacacaaactaagatacgaaaaaacatgctctctactatgatgagcaacctaagtagaagcaatagatggattttccataacttgcaactgcaaaagagttgtattttctagttctacacatatgtattcacctcttctccaaaccaaagggacttacatacaccttttcatactgtttatctcttaacgaatgctttttattgtgattccactggtatcgggtaatagcttcttcatgtaatactttgacttgcgggaaagattgatccttttccttcgttgctctggtattgattcaatcgaacattccgagaaccctcgtctaacaaacctgcaagcatcacatagaacagacctgaattgttatttaccgaaaattaacatggaaaaggaatggaaagaacaaaaaaaaaaaggcaaaagaactattatgccatgaaacgactctattgaagaacagtatttgcaccctactttagcaagcttttacttcaatctgagtgtgagaatatcagtgaagacaacaatatcattatgcagaaagaacacaaatttcaagtagtggaagttgacaaacaaaccaatctgcagttctggtagtaagcaggaaaagattctccaatccgagagaagatgccttcttttcaatgtaatctgcacacaattgatagttccacaaaagattactcattgcaaagtaccattgaaaaaacactaaaattggtaggcatgcaagatcagtaacataaggaaagccggaaagaagctgttattaattttcttgaggcccctttctcttattacaatagaaacataagtgatgagaataaaggataagaaccaatgatatattagaagtttaatacttaaaagaaaatccattgtaccaagtaatttatctccttgtccttccccacggcatttagaggaaacagcaatagaagcaacctctccacatttctcatccatgaaaggaaaaagagcagcacaagcaataatctggccttctctttccacgacaacaaatgaatccaatgtcgcaagaagctgttaccgacaaaaacaaaaagacagcagaaatattgaatccagttgaataaccaattcaccgaaagattactagttaagaaagtagaattataaacctcttcatcagtcctgcgaaccagcgtaccggatgcttctaacggttctatgatttctctgattccagagagatctgttaccctagccatccgggttccttcataaaggtcactgagaatgaaaaatataatgcaatagtcattcctctaatgaacaccttaaaatttccgaataagcattagtattacattattgtagccacctcaaagaagaggttcaagcagattaactagagaaagctttaaaacaacctagcagtcaactgcatcacaaattatgttcttactataattatttcgttaattcaatctgatataaaattcatcctaaacctgtaaattttcagcagaagagctttacttcgctgaaaatttatactcttaagtcacaaaggacagtaatagaaatatagagaagatctgtcgttttttttggccacaaaagttttagacaacatttacagcaaaagacatacctagcaaccatcgtccccattccatctcttgtgaataattccagcaacaatactccacctttagtaccatctaacaaatgaactctttgaacacctccctggcaataaaaaagaaagtaccattggcagggtgcttgacgctgaacaaaaaagcagctgaaacttgaaagtatctgaacacacatcaagagtagtgattttcgcagacctgagaattcaatgagaatgccatgccaaggcacaaatatattatcacagaattcatgtaccttctaatgttacagacaaaacatctaaaatttcattagctgcaacagaaagaaatgactgagtgtatgataaaacaccatctcctcgaagtcccaactgccgaggcctatgcctagcaatttcttgggcatttagactctaccacggattacacttcaaatatgtagaaagtagttattcatgtccatcatatttttaaacatttaatcaaatgattcagaagctttgcatactgaatggaagcctggataatttcattttcttagatagcatattagcaaaaaaccatcctatcattccaaatcaacacgtccaagtagtagcatattattctgaggagactttcgttcattgacaagacgagtatatacaggcagaaactcagccattgtcacactgctatcaactttaggacgaaatcatgaatttggtcccccttttctttttgttagacttggagtgttaaacactaactgcagaagaaactctccaccccaaatataaattgaaggagaattcttacaaataaaataagaatttaaaaaattataaactggacaaacctaaataaaataagagaaatagatttaaaaataatcggcagtaaaatagaagcaatgttggggtaagcacaatgtcaagtcaattttagagataaactcatatcctggatgaagtatattaaatgagtaagggctcaccctacaaacaaaagctgcagcagccaattcagaaaggtaaccatttaatcgacttagccgctcctgacctccaatagcaaacccctgctcaccagaccacagtccatttccattgtcaaaaccaacaccattgtgaaacattgcactatgtcttcctctaagagcattcccattagttggagaagcaatatcttcttcatcacgtccaatgcaagaaatatcttcttcatcgacagccttcacataactagctgcaatttcgctctgcttagcccgttgacggatcaacttatctgcttcttcaagggtaaggaagcgaaaaagtcgtccactttcatccaaaattgggccatcaattatacaaataagcttgtctgcttcaatagctaacgaagcagctgttgcaacttcatacgtactgcaataaatagaagcgaatcacatcagtgaccagacattcatcatttcaaacataaggattgggatgcaatttgtagtagcaaatgagaagcaaataaaaaaaattatcatttgcactgttatcacctaagtccaggtccagagacaaaattctctatacaggtaggctaaaacagaaccaccgaattttaaagttccaaaggctaaaatcacttaaattgaagtattgtattgcattaaatgaataaatacttaattttaactaaattataggtgatcgagagataaattcagagtgacaaacatacttgcagtttaaaacttctccagaactggaataacccaggttgttcaatataacgatacaaccaccatccagtctctcgcgcatgcgcgccacatctacttttttaacttcaccagttgccccataatcaacaccttcaacaacccctcttttctaaagaaacaagaaaccagaaagaaaatacttagtaacagtctaatgagaaaacttataagtaaaatcaccaaactaaaatggaacaatgaaaacagaacttcaaaattcgtttccgatatcattgagacagaaggtgatagtctagaaatggaatgaaatgtgaatattagtctttaaccagataaaagattttcttgccttagctgcgagaaagttgccactggcaacactgacacctacgtcatgtaaacgactactgtcaccatgtcgtcgaatattgcatatggaaggtcctggagaaagctttgcctctaacatcacacgaatcccgccagctgcttccattgcagctgctagagactcggggtctgtaattctataccgaccaacatacttgggttcatttcctgaaagaagaacacattgggttagtttaatcagccaattcacttgaaaaggactacttttatcggttgatgaaaagagaatcatcgtattcatcacattaatggcactccgcacaaactttatcgggaatatgcaaaaaaggaaacgaaggagaacaaggcaaatcaatttcccatacctctctcagccaaaaggttgtcaatttgcacgtgggtacccggaacaagaacaaatctgatccccagatggtgaagaaaagcaatatcctgcatgcaagtccagttaagactcaaatgagtcataccaaaaagaaagaatttttacaaaaatataatgtactcttgagctatactcttcacttcctttcattttctcaacaataaattagtgaaaaagaagagcacaaagaaaaatgggggaatgaggggtgccttaagaatgggatccaaatgagggctagccacgatttctccagaaataatcacaacaaaagtgcttcccctatgagcccaaagataaggccaagcctctcgaaaccacttcacgaactgctcgtcttcgaaggaattatagctctgctctacttcagcgccatcttgaccgttgaatatagtataatttgccgaaactcccctccttgttccagctccaccattcacgatacctagggttaacgattcaggacaatgaaagcagaatttctgagctcggttaggtagacaatggcagctaaagccaagattgttcggaacggagaaaagtaatgggcggcgggttcgtataggaatgtgagagcttgaaattgaggtggtagcagtagcagaagccatggatggaaacaaaaaaaatggcaaaagcctaacctaaacccaaactttacctaattacacagataggtaactatagttacattacaggaaaagaaaaaaatagaagcttggaggaaggagacgaaattagggtggggactggggagattccaccatggctgcggtgggtgggacccatactgaagcaaagttcatgcttcaacaactcatattgacgtaagcagatatttattttagtccacgtgtctattctattctatttatttatttattaaactttgtattttcgccgcatttatatggtctatctttaactctgtaaatttaataatagtttctcagtggaacaagctatagacaaaaacgtgaaattacaaacaaaagatacctttcttataagattactatttttatgcattgagccaaaattaagagcaaagatgtttaaggggcctatgtttcgattaattctatcacttaaataattcactgattaacagagctaattattagag

SEQ ID NO: 266612 - DNA, 6212 bp, Cannabis indica
aaaaataggattcaaacaatctatttcacacgcatataaaataaaaaaattactagtgcaacaaactgttaaaatccttttttcgacatgttaaattattctaaattattcataattttaaaagacatcttaaataactacagcgtatgtatctataaaaaaaaaaattaacaaaatccctcaaatactaaaacaaataagggtagatcagtaaaagcatttacagtgtctgttagaaaaagcaccctatattatttcataaattagttagtgttttttcagttataggccccaaaaagttggcgcgtaatacaagtgtgtgtgatggtaataccgtttaaactcctagcttcatgggatgcccttcactctctcatcttcttcctctctcaccaaatcaaccatacctctcaaactaataatccaaactgaaaaaaccatattcctcttttgctttatcccaatctcaaattctccataaaaaaaaaattaacagaaaaaggaaaaaaaaaggttacattttttctcaaaatctgaacgattttacagatacccttttcttctcacaggtttttctcaatacccttttaacaagttttgatttttattcataaatttgtgttttttgattttgaggttatttgggttatatctcatcttctgtgttcattcttatcatatgattgattttgattagtttgttgtcatgaaatttaatgcgatataaaaaatgctacttttttggttttttgattttattgtacaaattttgatctaaaaattttgattatgcagctaagagatgagaagggctttgtgtaattttgaaattattggcctaattatatttggaaattcataaactttattggtatattggaaaagtgtgtacaaactacaaagttgtattgtgtgaattttcctgttttgtaaatttacatgtaatgaaaagacagaatgttcataggtttcttctgtaaatgagggtcagcttcatttgagaccatgaatggtgagtttcctgattcttctgaccaatatttctttcaaggcagaggaaatgttgggtcaggagataaggctgttgttgtgaaccgaaatgccaacaatatttcgattcagactggggaggaattctcagctgagtttatgcaggatccaactacattaagaagattaacacctgttaatactaatgttaatcagcgttcttctaggagagttggttttaatcttaatacaactaatcatgagccagtttatgatgatcgaatgagcattttcgatactaaaagaatggatcccgaatacaattcagaagcctcagattttggttctagtccagggtatattgctgaattggatcataaggtttatcccaacaatttaagcagataccattgggaatatggtggtgctaaggttggtgatgatttgaatcgtggtgatcgaattgttgctgggccaaatactccacactattatggagaatcacctcagtcatatcatcaccatgtgtttgttcctggtttccctgagtgtccaaaatctgggaaggcaaaatttctttgcagtttcgggggaagaattatacaaaggccgaatgaggggaagcttagatatgttggtggagatacaaggattctatcgattaggaagaacataacatgggaagaattggtgaagaagacttcagcaatctgcaaccaacctcacacaatcaagtaccaacttcccggagaagatcttgactctcttatatctgtttgttcagatgaagatcttcataatttgttggaggagtatcaagaactagagagaaatgggggtcctcaaaggctgaggatcatacttgtatctttgaatgaaactgagagcccgggttctgctgaagccaggacaatgcagccaaccagtagtgagtatcatcatcagtatgttgttgctgtcaatggcatgatggacccgagtccacggaagagttcaagcgggcaaagtttgacgagccagtctagccaattcggaaataactcagattatagcccaagtttttgtagaggctctcctacagcagcatatgcaatggagaataaggattgtaacagtccaaactcttcaaacttggtgggatttttcggaagacctgtttctcacttttctactaaacttcctccaagcaagtcctacagtcatctctcttccatgtcacatattccagttcaacatttggagcctgagaatactaatttgcactattatatggatcaaccatataatgttggtaatggggaaggaactaatccttttgttacaggaaaattctcttgtcaagattccaattatgttgatgctgttgattattattataccgggccgtcacagatgaattaccatgcttataacaaatatatggtggattctgagcagcctagcagaccccaacaaatgggatttcatcaaagaagcagaagtggagattgtgacttttctgcagtgaatcctcaaagtggcatgaaatcttggagaccaatgataaaggaaggagaattctctgaagactctcttggtttgttgccagcaacaaatgccaaagaaggttttaggaacaaaataatgcatgctctttccgattcaaagttgcaggaacttaaccgaacatcctcagaaggagtcttcaccatgcctttattgaatgcttctgcttcttcgaaagattcgccaactcaacaagatcagatagccaacaagttgccccaagtggatgaatatgagattcagtcatcggccaaggcgccacattattatgatggaaaggagatggtgaattggacaaacactaataaagctcttgatgatcattataggagagaattcggagaaaatgctgaagttaatgattcaccacagattaactatgttcaagttcctgaaggactaatgtccacttcattggacaagagaataagcagtcaaccagttcttgatggtactcatgaagttggtggcacagaatcctttttccaaagcactgtaagtaattttttcttgtcatgaagttttttacttgattatgatccaaaatttgtattaatgttagtaacctttttcactttggatcctttgtttcagaaatcaaattcacttttctattcagataatgaagtagtaccttgccttgataaagatcatgacattgaaaactcaagtcttagcaaagaattcaatgagatggctaagtttgatgagtctatctctatgcattcatttgaaacttatcatgacaatgaggcgaaaaaatcaacaacggttattattgaagatgtaactcatgaaatatctcacgaaatcccgtcctcttctaacatgtatgcagaagatgaagctacagatgaatgtaaatctattcaaggagaggaagagagtatggcatccgatcatgaggtaaacataacatgtttcctattaatttttggatgttttacaatcaactctatttgatctttgtcatgcattttataggatgaaaatggcagtgacacagataggaatgactctatgagtgatgctgcaattgctgagattgaagctggtgtctatggtttacaggttagaatcaatcatatacttatggcctaattatcgattagaagattttgcttgtatgaatcagtattggtataactgtataaagaatcttgattgcaacatttttggataatatgcagaccataaagtattctgatcttgaagaacagcgagagttgggatccggtacatttggaactgtttatcatgggaagtggcgaggaacagacgtagctattaagagaatcaaaaagagttgtttctctggaagatcatccgagcaagaacggctggtgagttgtttgcatatctgaatttcctacccttttttcgattccaatcagactgaacatatctgcattttatttgtgttcattcagattaaggacttctggagagaggcaaggattctatcaactcttcaccatccaaatgtggtagcattctatggagtagttcctgatgggccggggggaacattggcaactgtaaccgagtttatggtgaacggttccttgagacatgttttgctaaagaaggacaggttggttgatcaatccatatcttacatgttcaatctacaaacacattttttagcttgaatacaatgaccaattcttttcttttttttcttaatttttattcagagttcttgatcgtcgaaagaggcttagaattataatggatgcagcttttggtatggaatatcttcatttgaaaaacattgttcattttgatctgaaatgtgacaatttgcttgtcaatttgagggaccccgaaagaccagtatgtaaggtaattagaatttcaatgagcaacaatgaaaacttgttattttctttcttgtaatgtcaaatctttgaaaggctcatcaacattaattctctctgctttttgtaggttggagattttggattgtcgagaatcaaaagaaacacacttgtatctggcggtgttcggggaactcttccatggatggcaccagaactattgaatggaagcagcagccgggtctctgagaaggttatctatttgttttttcttatcatggattctgagaaaccgaaaaaatctgaaaaatgcttaaacatgacgcgtttgtgcttgtttctttcctcaggttgatgtgttctcgtttggtattgtaatgtgggagatactaactggggaagaaccttatgctgacatgcattgcggcgctataataggtaagcgcttttactattgtcgaaatttctcaataaactctcttaaacttgatttttgaacaatatccaagctaactaagaatggactcatttgatcaagaactaaggttgcgtttggttgaaggtaaagaatcaaatgtctaccattgtcattcctacagaacgatttttcaccattttgttccattctatttctattctgattcccatttctattcttatgttttcattctttccaaccaaaccaaacgtatcctaacaccagacaatgctaagaatgcattattctgtttttcaccaaatatatcatcagcattgcctaaaatcatcacacaaccatctttggccacattacaacaccttatctaaaatcattatcaagttagtgaactcattttcttattttcttatctaaaatctatgtcaatgacaagtatctatctagctcatgaatttgaaatactactctgatttatatgaacatttgctgatcttgttaactttccatgaagggggaattgtaaataacacacttcggcctactattcctaaacgttgcgattcagaatggagaaagttaatggaagaatgctggtctgctgatcctgaagctcgaccatcgtttacagacataacagatagactacgcgacatgtcaacatcaattcagaaaaataagagacaggatccttcttcaactagatgagtcctagaataattctcatgtaactaatgtttagtactctacacaaacatatagataaaacaattagctaattaattatattccaaaaatccaaaaaaaaagagaactatttgtaagaatatgacatccttgtatactgatgaatatgtgaatagattcataactgattttaagacactactaagttatgaactgttatgaatgttttcttcttcttcttcttgttctgttttttgttctttgctctaagcaagtgttcaaagtctttttgtgattgggaaatttgtgttttgactttcgcgaaagtggaagtacacgaaagaaagggaaagcgaaaatgaaaattattcgaagaagcaaaatgatgaagaatgaagaatttaggccagtttgaaaggaaataagtgtgtgttatatgctatggtagcaagttgatccaatgtagaatataatgcatataatgtcatttattcaccatgcaaaattggctatagtttaagtgctttgctttgtatagtagttgaacttcttaacttcaataatttcctaccatccattcaagtttttgggggttgactttgctatataaacacatgttatacaccacattttatgtatatatatatatatgttttatatgtatagtggatatgtgaggacttagtgaggagcataaattgttgtatattttgagtataggtagcactagttgg

SEQ ID NO: 266613 - DNA, 3435 bp, Cannabis indica
caataatttagaaagaatttttaatatccataaatgttcagagaacatgatttaatacatgttaaaatttaggaggtaaaaaattctaattagtctattattattattattattattattattattattattattattattattattattattatctttggttcatagaatatagtcctccctacacatggttagaaaagcatttcacttaccttgtctatgcatcttttcccttttctagttactctttctatgctgcctagaaagtaaaaaaaaaactaaaataatgatgtatggggtactttgaataaagtatgaataggcatttgtaattggtgaagcaaagaacaaaatgcttgctggcttagcttccatgaaagaattatcttttttaaaatggtaagttgtggacccttttgaatttgtaattggtttcactctatgggttatttatttgtctaggggacaggacaaaaccatccatgaatttgttttgtccaaaaatatattcataaacaagtagtgtaacaagattggtttccacatttttggaaagcataaacgataaaggactcgttcaaataattaagtaaaccaagaatgtgggtggtggtggtgggggtggggcaacagcaacatcatattatatttatataaatatatatttaaattataatttcctttgcaccaaaatctatgttttatttgtttacccttaaccagaaacagatcatgattacaaaattcacttaaaattaagggattatttcatatttatcccaaaaaaaagaaaaaaaaattaattaataaaaatacgatttttacttttttgtttttacggattttaaattttatatataaataaaataaaaataccgaatattatttttattttattgtatatttttgttgtttttatgtatttttttttgtttggtattatttttatgtgactttgtataatattgtaattaaaaaatacattaaaatgaaaaaaaatatatattttataaaaatataaaaaaaattattttaactttataaatgttaaaatttgtccaaaaattgatacttgatgtaaaatctctataattagttccaacatggtattaaatgcagtcatatccatggtatataaggattgaaaaataataatatttttttaactgtataatcaacatatgaattaaaataaaaaatttacatttataaattaatcataatacgtacttacatattgtacttttgttttcgtatcattgtatttgtagtattgtacttgagttgatatttatgtgtcatgtgcataattatactttttcgggccactcaaatttatatcttttcatgttgtgtgggactaaaaaaatttacttcaaaggtacaacacaactataactcttgaaaatttcaataaaattcaaaaacaaacaattattaagaccatttaagttacccatgtgttaataattaataaatttcatatatttttttttgaggtaatataaatttcataattaatttaaaacttgaattccctgtaaacaaattcaaattttaaatttctaatattttacactaattgaatgaaaatcattaagaaacattaaaatccaaataaagattggacattagcattcaaaaaattaaatgataaaatgaaacttgaattaattcatacattattttcccgagaaaaaaagtagggaaaaagtaaagaaaataaggtaaagtagggatggtattggcgatggatatgatgatgataattaattctacaaagtgggcatgtagaatgagactgaaaccactcatcaatacaatgaacatgaaaacaatggttgcattggggcaattttctgagcctttcgccatgcatagcctcttctaaacacactgcacaatagtatgtcagcatactattacccttattattattattactattactactgctattactcatcatcatcattatttctttgttactgaatattttgatgaggtgatgatgctgaagatcaatcgtgcgttgtacaattcttgccccaaaatggatggtgatgatgatgaccaatatcgcaatcacaaccatgttcaccacaacggtgacgatcatggtggtgttctagcttaatttgatcttatatatgaatatatacatatataagtatgtgtatataagttaaatagaagaatagtatggctgtggcttctaagaaatgatttgttgagtaaaaaccttgtacataatataagattaggacaaatattaatgcaagttttgtgaaatcatttcgtctcaagcaaataataatttattttgacaaagagttttgactaataataccatgaaataaaaattaagtaatcacaagaagaagataaaatttaagcagcaatattgtattgtttcgaaattttttattcaaatagagtggttactatactcattacttgacattgatatcgtctaataatgggattccaccaacccaaagaaaaaaagagaaaactaatgtgtgtcaaccaaccctgcattatttatataaatatatatatatatagattgataaatatttatggccaatgattattaagaacttgtttgaagaaaaagtgctttgatttattaacttgcacgtaccgttgttcatgcttcgtggacaagtctgataaatgtactctctacttgtttgaattgacgaaaaagaaaccgatcaattgtggtttggtggttggtttgttgggcaatcacaagatgggggctatccctctaaagccacaattgtatgagtgttcatatctatactttgttcccctttggtgctagtggtgacagtgttcctttccaaaaggtgggtggtatccagttcgcgttttttcaaaggtggctcttagatagcatgcaagtagtcacaaatctagtagtatatgttagaagattaaataaaccaacaatataaaatttgtatatatataatataaaacacaataataatagataatgtgtacgtacgtaattcattcatagtaattattataatttgatagtgcaatcctatcaactaagtctttgttgaagaatagaattagttaagtctgttaggattagtttctctttacagttgttagttttattatgttatttccaactgtacctaactaactcttttcactccattcaactgtatatatatatgtacatacactgtattgtttcaattcaatgagaaggactctttttcattcatgtcatcactgttttggtttctttctcttgttcttctctgttcttcattttcaatcaatctcacatggtatcagagcttccctcgttttaatggtgactgctacctccaccgattcttcacttcgttcaaacggatccaactcttcatcaagtgttatattattttataatataataagtgt

SEQ ID NO: 266614 - DNA, 2561 bp, Cannabis indica
atatttgatatatcgtatcactgaaaattaatttaccgtagtaacaaaattatataccacaaagaaaatataacaatatatattaaattaatactcaatataaatatcatgctaataaaattatatataccactattaaaatatgtatacataccaaaaaacttatgtataattattatatattataaaatagaaactaaatatcatcctaaataaatgatatactatacacaacgaaaactacataccatataaaaaaatatatacctacaataaaaaaataaaatgatataacattattaaaaaattgtatataccatattaagaaaattatgtacaaccataaaataattataccatacttacaaaattaatatcatatttatatataataaaataaaaactaaacatgaatgatctaaaataaaataatatactatacaataaacttatataccatataacaaaaaatataaaccttacaatagaaatatgtataataacaacaaataaaaataaaaatataacatgaggcaagttttcttccgctttttctctctaggctttcagctctcgagctgcaataatggcgaagactagattgaaagagatgtggaagcatcaatttggaactaagaaagtaaagaagaaggggccagactcatctatggatgctcggaaaactaaatttatggatgaagtgcttggaattgagccaattatcttctcagatgacagagagggactgtgtcaggaacagctgagatccagctatgatccaatgctccttgatgtgtttcaacctcctttgtctccaagatcaactttgagaatgataacacaacaggataatgctcgaaaagactttgagcaatttttagctgctaacagccaatgtaacagtgacttagctcaaggtaagattttgactccacctattctgcgatctggatctgtaattagaagcttagaaacttcctttaattgtattgaaaagcctgctaaggttaagataaccatggaagatattgaggaagaagtggaattttggagaccctcaattgtgtgttatgtgcttggttctaacccgccattacacattgttgaaggttttgctaacacaatatggaatggaaaattgatagggttaagcttctatcatatggcatattcatcattcgatttcaaaatagtgaatatcatgatgaggttcttaatggtatatcttttttaataagaggccagtaatcatgaaaccttgggatccaaacacaaattttaaaaacaagacattcgcactgtactaatttgggtgcacttggaggatttggagcttaagtattggggacaacgatctctatttaagatcataggacaagttggaaaaccaatcatggtggatgaagtaacaaaggatcgtgataggctcaactatcctagggtgctaaatgaggttactatgaaccaggccttgccagacataattgaatttgaagatgaagtaggggcaaacacacaagtgggagtccattatgaatggaaaccaatcacttgtaatcactgatttggcttaggccattctacagatgattgtaggaaaaagggtgaacccaagaaagaatgggtggttaaggaagataaaaggaaaaatgcaaaggcaaaggcacaacaaaaaccagataaagaaggctttcaatgagtatccaaaggctggaaaacaaaggacacaattattagggatgtgacacagataaaaaataatttccaagcattggaggagaatgatgaacaaagacagtttaatggagatcatgcagagtgtagtacacagcaagaaaatgccaagacatgagaggggggaggtccctctcttgccaatggataaaattctatgctggaatgtctgaggagctaacaaccagcataaattgagtcaaattaagcaatttattttagctcagaatgttgattttgttggtcccttgagacaagagtcaaggcttagaaacttggagccttgtactcaaatgtattcactggttggtgtttctcaactaatttgccctgtcataatggtggaagaatagctctggcttggaattctctaatattccaagtaaacattatttgttaggactgtgggtggacactttactagctttatcaccatggtctatgcatttaatgatagacaaggtaagaagatactatagaatgaattacaggggtataaaacaaaagacaagtggctcatcatgggggattttaatgaaattttggctaaggaggaaagaattgggcatagggttaaatatcatgtagacagggacttcattaactgcattgatgattgtaacctagaagatgttaaatattatggatattatttcacttggagtaacagacaacatggagaggatcatatattctccaaaattgatagagtgttgggtaaccaatcttggttggaatcatatccctttttgctgaaggtagttttcttaaagtgaaggcacatttgattctactctccattcccttactatctatgcatccagatg

SEQ ID NO: 266615 - DNA, 1622 bp, Cannabis indica
gttattatttttaacaaatccatctcattaattcagatgtgacttgagatgaattattgttcaaatatatcttaaagttcgatctgtattatttctatgtatacgtcatcataaattgtatttttttttaattccatctttcgtctacgtgcaccgagttttgcatgggatgaaatgatctgatttgattctcaaacatgctgacgtgtttttttatttgtgccaggtgtgtcccacgtggcgtgaagcctcacgctcggaccatctatggcatcgcctaactcgccgcatctggggtcgttcctaccttcgacagaacacatggcgtgacgagtacatttactggcatcgaacggcacagaacttccgcttggcacaatacgcccacaccatcctccgattcgaccccaacgaagaggaaggcccagccaacggcctcacctgccgctgcatcactctctctgacacccacttggcctgcggtttctccgatggatccgtccgcctcttccacctccccacgcgcatccacgtcagcacatttcgtccccgcacgagggctatgttgggacaattctcacgcgccatcaccggcattgtcatcacaaacaaccaccgccttgtatttggctcgttggggacatccacgtggcgctcatcaacggcccaccacagacccgccgagtcttcgagggaaacgcggttgatgacggcgttttggttgacttcacgggctgcggtcgctggtgggtgggtctatacgcgggcgtacccgacagagccttccacatctgggatagcaacacggagcaactcatttcagtgggtggcgcattgacgaatccggattcggtcagaggttggcagatgttgatcgaggagaacgatgtgttgggccgaattagagtcacgagtcaggaatcggccgtggcttgcacggatacgatgacgatggtgttagatctaaggaatcatgggttggtgattggtgaggaagagtacgagggtgggttgatggtgtcatcgatggacgtgagtaactccacgtacattatagtagacagacaggggaatgctagtgtgcgccgagcgagcacgttagaggaattgtgcaactttagtgtgagacgtggggcatggcacagggatagagggttgatcgggtgcatgaaccgtgggttcgctctaatgtgcaccgggactgtgattagggtgtgggagatagaggggggtcgccacctttacagactggcggagcagattggtgaggtcagtgttatggtggctgatgaacgacatgtcgtagcatgctctggtgacagtacattgcatctttgggatttcggtgcccagtgaaaatcagaagggacccactttagatatggtggttagtggttactgactaagaataatataacttttaacaaaaaagaaaaaaaaagtatttgtagtttcattgtgtttaagattagtgtaattgtgaggggaatagagattagtggatgggcgtgggatacgctgttttggggacagtttaggacgagagactggatttgatccttattagattatagtagagagactactgaactgaattttttaatttcttcttttctttcttt

SEQ ID NO: 266616 - DNA, 931 bp, Cannabis indica
catacctaattattatatcttattattgtgttctatgttatatacaaattgatcttggggtttatattaatttttctaacattattgtccaattaatttattttttaatgcagctgaagctatcttacttggttttcaacattactttgtaatgcttggcacaacaattttaattcctgcttctttggtgccctaaatattggaggtggaaacgtaagttatgacaagtgttatattagcaaactaaggaattaaaggactttatattgatttattgttgcctcttaattaactcatggtaatttttgtaggaagagaaagcaaagatatatatatggttcaaacaatattgtttgttgctggtttagacactttgatttattgttgcgtcttaattaactcagggtgctctcattgtcacctctactctccacattgttgtcggttttagtggcctttggtgtaatgaggcaaggtctgcaaaggctatttcaatttattgtgtctcaaattctcatttagttggtttgcaatgctgtagttagttcctcactaatcatggttacaatttctgcttgtataggttcttagtctgttgtctgctgttcccgttggtagctctgtcaggttttggtttatatgagtttggtattcctgtggtaactcttgtaagaaaagcagagtaggttattatgtataggtgttgaaagaaatactattgggatataattgttatacttttaggaattttaggtatagtcttgtatttacatgtggaatttttattgaattctaagggattaaattatcgcaataacggatagtgagtgtttgttgtcgacaacgacgagacttctctttggagtcaaagacatgaacaaatttttattggacttttaaagagaagtttttaatattggataattattag

SEQ ID NO: 266617 - DNA, 5095 bp, Cannabis indica
agtggttcattgtcttcaattatcgtttcagacaccagtggtttgatgttttcgccttttgtttcggataccagtgctccgttctcatcgctaaccaaagcataaactactgctgtcctactaggagtatacactaggaaagaacgaggcctatcatcgtaccacccttcctgcataggcaagtttggtcagattaatctttgaagcataaaactcaaaaggatgatggaaatataatattcttacagaggagaagtattcagcttcgtgattaagcctattaaaccctccaaataatgagtcgtctgaatccaatacaatctggatgaaagaaagaaaaaagaagtcagagccacagatcaacaaggttatatagtttatataattaaagagaaagatcaaaagatcatgttagagtaaaagaaaagggaaaaaatggtccagcctaataatttcattgacattacgggatccatagaacaaccagtagatattttcaaatcaattgcaagtataagaaaacacacgcttctagcaagaagatgttcacggaaatatgctgattagatcgcctctgttcatctagggttcagggaatttaaacggataagatttattttgatgttataatctgagtctgctgtgtatgaaaacaaattcaacctttattaagatgtaatttcttgtacttaataaaaaaagaaaaaaaattagaggcaattaatcagaatgtataagcatgcgcatgaaactttttatcacgatatatggttaatggaaatggaaaataattgggattcactcgaattacacacacttcttacacacaatgatatataattaatctcaaccatacaatggaaaataattgggattcactcagtgtatctgtctatgataagtaggtgaatgaacaatgaaacataaaatcacaattagtataaaagctttgggaactagacttaaaatttaaagagaatattaccttgtactttcctggccttgagcaccctacccggtaatcagaatagctattagaccaatgaaagttgaagacgaaaacaaggtttcccctttcaaagacaataaccctatctgtttcatctttccgggatatgtattgatgctcagaagtcatgaactgcattgagaatttgacccaatgtatcaactttttattcagtcatcaccaagattaaaagtgacacacggtagtgttcacctccacgtttaaagcaaattttgtttaaaacaaatcagaaaactatagatttcacatgaaataaaaataagtgcaaaaatagataccacagaaactggacaagcatttgacaagcaaattattatccaggccactgggaagtgaaattcagctagaaaggcaagctcaagtagaacttacgccataggcatcttcaagatgctgcattgcccgatcaaattcttgcattcctcgatatctcaaataatctgcatcaccctacgtatgcataacaacaatgaaacaataagcgatagcaacatttatagtgttctctgttgcaacatatcataatataagaactagtacacgggtttgcacacacttcactcctagtacataacaatacataataagctaagataggagcttacaagatcaaacctacgccgacatttgtcatagctaaaaccatttccaggaactattgaaccatcaggaagatgctgatcagcccttggaaaatctatccactctgaaacaacaaagaataccatagcctcttgtgtaagttttgaaaggtagtacgaacaattaaggacactgaagacaaagcaatagaacattatatttatataaatatatattatatatacttatatcacatattaggccgaagattaccaggatgtccaaattcattccccatgaaatttaggtatccttctccacccaatcccatagtaataagcctaatcattttgtgtaatgctattccacgatctataagaggggttgctggtcggtccaaagccataaagtcatacatatcctgaaacagtcataagatctgattaactcttgaaaatgtagcacataaaacacacaaacacgtaacaaaattttctaaagtagaaaaatatataagttattagcaggtttcacttgaaaacatgctgcaggcaggggtgccaaattttttaaaaggaaaggatgaatagaaaagcaagcatgttaattttttgaaaacacccaagcaagcattgttttgtcaccaagcagaataccataaaacatggaagaatcatactaccttgtccatcaaccagaatgcaattgttttgtcaccaacaagagcttggtcgtggctttcagcataagaaacacacttctctgaccatctcctgtttgtgagtgtgtgaataatatcacccattttccagtattcttcttgcatcctaaatcaccaaaagccaagaaagatgaactagtttaggatccactaaaaaattaaagtaatgcttcatttttcgattcaaacatacttgaggagttcaatccatttatcggcaatggccatatgaaggcgataatcaaatccaacaccaccatcttgaacaggaatacagaaagttggcattccgctgacctgtaaacacagaacttgctatttgaataaaaatgtaaattttggcatttgattccattgaaagatgattcatgatttcaaatctccaataatttaatatttttaaatccaacatgtttgcacgtgggatcaaccaacaaaagagaacttacatggtgaaaatgttttaaatggtaatagaacatgaaagaacaaagtatatatcaaagcacatgcatttcccttttaagaagatctatttactgggatatgaacccgacaccactcaaaaacaacccacccaaccaattaagcgcttcaagtggtaagcacatattttatgggtactaaaataagttttaatagcaatttatattgtactggttcgtgagttcagctgattgggtgtgtgtttcaattattaatagttttaattcactaattcagatcactctttttaagaatatctctattttacaaaaatattgaacagtgggaaaacgaaataaaacaatgcttatagttataggattatattacatcttcaccaatggtcactgcttcagggaagagcccatgaatcatgtcattaaccagcatcagataaaccacagcatctacatctgttgcgaatccaaaatattcattgtaatttcctgtaaatgctacctgcaccaaaatcatgtgtagaaagatagataatgaatgcccataaaatatttatataaaaaagaaaaattgtgagcaggtaaaaccaaactttcagttctaacattttcccagacttggaatttttaagactcctgagaatgaaaccaacagaggcaaatacaaaataatctgtactaattctccaacatgattttagatatgcactcataatactggctttatgtttctcttcaatatttctaatgcaaatgtgtgcgcatggttaacttttagtgatctgcttctgcagtccaacccctctcaaagatataaacaataaatgagaccatatcaagtcctgaaagagcagaagatccacatctaaatctgttcaaacatcaattccatccctcaattaactttgaaaaggaaaagtctgcgagaccttaggtgaacctttttgtggactttctcaaaaccttgttaaggagggactgaagtcagtcaacataaaaacttttacgtgcctaaacaaccttgaggactaatttacttcattaaaagtgactgaaatgcacttacaaattccatacactgttttgcaccaatgacacacaacctttcattcacactgagtaaaatgaaaataggtatcatagatagaaatatacagcataattaattttctacaaacctctgtagccctatcaatataagagactgttaaagaaaagacgactaaagaagaatttagaagttaagagttcaaataatttgatttcttaagcaagctaaaaaaaaatgtataacatagttaggcccatataaagatggtaaaataaagaatcctgactctgctacacaacctatactaaaaattctcgtataataagaaactaacactgaatttttaaacattatgcagattatctgtgtcacagtggtaaattaatagtacctccaacccatggtgagtatacatcattgaagtcacaccatcaaatctgaaaccatcaaacttgaactcttcgagccaccatcttgcatttgagagaagaaatctcaatacctacatacatagaaagaatcaattaccataaaaatatattaaatttaatttttttaaaaaaaaaaaaaaaacctaagggacttgcctggcaacacctcttttggttttacaagtaaaggcagaaatcattctgatataatgaatacttaagaaatctttatcctcaatttcacttttaaaacaaacaatgagagggttacaatgttacacagcaagcataggcctaattctttcaaaaagaaataaaaccatatacctcccagcttccataattgaaaagacgagaatcccacatccagtgatatccacgtgacccagagtggaagtactggctatcagtcccatcgaacatgttcagtccatctaaagtattatttgatgaatggctggtacaaccacatagcaatcagatttatcagatatgtagcaagaaaacaaaataacttcgaattgccaaacaccgaagggaatgccaatatgttaatccagtgagaaattaaggttacatttcagctcacagctatcacgaaatgggtgtactgaacaaattgagaaagtttgcactcagaaatctgaaaatgggctttaagtttgaaaatgaacagatcaactaagtgcaaattttctgatattaagaatctaataaacaaacaatttcaacgaaaacgaaacctgccaaataacatatgctaaaccaagggatgcttcaggagagagtacaaaatagttaatacctgtgaacaatatccataagaacaagcaggcc

SEQ ID NO: 266618 - DNA, 1869 bp, Cannabis indica
tcgggtcataattaccaaaatgccactgtctcaccaacggggtcttaccatgttataaatcatattaattcacataaattgaactatataataatataattcctcatttattcataattaccaattagggttttgctaattcatttctaattctagggtattacagttagtcaagatctatgattgtgagatccttctttacctagagaaagcaattgtgatagcagttaccttaaatagaaaaggtcccgagcaaattttaagtacgaagatgatctctccttaattagtaactaacctgattgagatgggtattgagtttgtagttgttaaacattggaatttgacgctttagtttgatctgttaaaaaagaattagaaatactcaaatggaagattctgagttagttatgtctcgagagaaagtttaggctatccaggctaaagaattctcagtattagatagtggaatactactttacaaggctcgagtttatatttcggataatggtgaactcataaaggagattttagatgaagcttgcaccactccttacttgttatacctaggtgccaccaagatatatcaggacatgaagccttactattggtggtatggtgtaaaaataatgtcgtagattacatatccaagtgcttgaattttcataacactgaacattatagagacatgtgagtttgttttagcctttagcacttcccgagtggaagtgtgaagatattattgtgtactttgtggtagcattacctagaaccacaagattgtacgatttgatttgggtaataaaggatcattttattaaagtgacgtttgataatacttttatttttaaattttttaatcacaaaataaaagtaaaattttgtttttgaaaaacaaaaatgtgttatataaccacttttattttttaatttaaaaataaaaaataaaagtgtgttctgtaattttcatttttatttttatttgttgattttatttaagttgggttcgagtttgggtctaggaccgaggtgggtccaagttcggggtcgggtctgggttccaaggtctaagttgggattgaagtccaaaatattaatttaaaaaactatttaaaaattttttgaaagtgttttttttttaatttttaaaatttagattcttaattaaaaattaaaatgtaaaaacagttttatagaacatgattttagaaaatatttttactattctaatttttaaaacaaaaaattgattaaaaaagtgtaaccaaacgcacacaaagttagctcattttcttccagtagaaacaagtttgatagtggaacaatatgcaaagttagatagtttgtctgcaaagcccattgtttcagatagagatcaaaagttttcttctaagttttgggagagtttccaaaaggcaattggtactattatcccgattttttctcgcataacgtggcacctccacgtggccaaaagtggaagacatgtgaagataagtcagtactaatcggccaggggagttcctgttggaattatctaccaggatctagatttactaacaagtatgttattaacatcctaaacatgaactactaaaacgatatgaaataaacacatataaagtatcaggaaccttacaatggttgcagcggaatattatgtctccttccactcagatctctaacccttttatcctttgtgtagcagagtatcaccaagatctgagtctgaatctccttctcttgaaactggattcttcacagccttacacactatgattgagtaccacttgatgtgtgtgggcactcactctaatctctctggggtttgaattaaagagagaaagagagagaaagggtttcagtttt

SEQ ID NO: 266619 - DNA, 6097 bp, Cannabis indica
taaatgttaatttaataatgagatagcataatataactaaatagactatgtatattagatattataatagtattagacgtaacaattgtatctataattatattaatttaattaagtttaagtttttttttgtttttttattatgtaaaagtaactaatagtttattatcaatatcataagtaatcaaaaattttacttttgaaaatctaaaaaaaataataaaaaaattaaagtttaggattaatttcattttaggcatattattttagaattaaggtattttttaatgacgtggcaaggtgttattgtaattgagatttattaaggtatttttgtaaataatttatattttaagtatattattaaaaaaatcccataaacaaattcccataaaataaaaataaaataaaggaacaaaaagaggagaagcagccacggaagagaggagagtgaaatgaagtctctgcctttagctcatcctcttcttcctctcaatactttctctcccaaattacataaccgcataaaccctaataataaaccttttacgtttcgagtcttctcttcttcttcttcgtctacatcagaaccagttcgattcttctctaatcttttactattatcaaaattcaacttcgcttcacttctaaatccaatcattcttctttcaggtaagacacgaatacaaagcaggagcgtttgatgagctcttcctcaacgtcttccgtacaaaatggtggaggaggttgggtgggactcggataagcctggatacgagggacttatcgaagtggcgaatcgtctagtgatgaagaacaagaccaattcagacactaaagaagccgccgttcggattctgagatcgctatttccgccattgttgttggacctttataaattgcttgtgtcacccttggctcagggcagagttgcagctgtcatggtcggtgagtgagttgcattcattgtcgtttatgctaaaagcgacactggaaaatgttgcatttaagaaaactgatgaagtgtgtgcgtttggttttgaaaagcaagggtgactgccctcacttgtcagtggctcatgggacgatgtaatgtcaattctgtggatttaggcgatggaagctcttgcaacagtggcgtgagtgaattttgagaccttattattctttctgaaaaaaatgacaaataactaaaagagtcaaaattgatttagattaatttttagtctataaaagttgtaactggtgaatcttgctgcaaaaattagtaaacaaatttttggtgaatttaacaggtgtttgtggagaaatgcaagtatttggaggaaagcaaatgtgttgggatttgtatcaatacctgtaagcttcccacacaggtctgtctttttttttctttgattaattagtttaattacaaatgcaaaattttgagtaaaaggtcaacaaatggcatagttgagataatatttaatattatatgttccaaatttttaatacacaaatcttgtatgtgtaaatatgtaatgccatttctgagtcactatgcaatttttttaacatgtcaaatttggcatccatgaaattctttttttgccctccttttatggctaaaagcctaaaaatcagacattgctcactatgcaatttttactgttctgttccagactttctttaaggattacatgggtgttcctcttctgatggagccaaacttcagtgattatagctgccaggtagcaactgagtcattatataataatgtctacttcattacttggcccatgaacccatggatgaaactgattatgtttatgtctccttttggtttaatcagaattatttgagaatagattgatttgcttttttacactctttaaattaaacatggcagtttaaatttggtgtacatcctccactggccgaagatgatgccattttaaaggagccttgtttggagatatgccctaatgccaccagaagaagagaacttgccataaattctgaccaatgccctaaggcttcgtaaatttacttcattatgacaccagaccccataacaagttgcacataattctagctttcataaatgaaaaatgtaacactaaatttaaaatcgtgtatctatataagtatattgttttttgtatactgtgtacccaagcaaaacaataatagagatttgtaaacaaaagcctaagtaaaaccttaagatgacgctaaaacgacaattggtatttaatttatttggcaaacatgctaatgctatgacaatttgacttgttcatttgaatttccttatccaaaattcttcatacagaatataagtacagaaaatgtcatattcactgaggagctagtaatgtcattttagtgtgaaaagtaggatggaatcataatagaatcataatacggttagaaattacatagctaaccacgcatgaaaaattatacaggcattccaagatttcgatcttaaataacaaagaaaaactattcttgtttgaagttgaaccatccatccaacttaacggtcccaacctgagcgcctccgtctttctctagttctatcacttgaactgcaatatgaacgatatatgaaaaccatcagaaagatcaacattgttaaatgtctaaattttagtatatatttagaagcatataaattgacctttctgagttcttttgatctgcattctggtcattagcgttctgactagaggagttggtcatccccgatgctggggcataattacttggataggttgtctgagctctataactgttatcaccgccaattgaaccaccagagacaaagccacgtaatgctggtctcttgtttgcagatgcacttgaactgttacttgaaccctgactctgagatgttgatgaagcagcgacaaagctactcttaaattgagtcattattcctgtcttaagagaatttacagctgcagatcgaccaggagcagcatgagatgaaccgctgttggattcaggagtataacctatacccaaaccaaaatctactccacgaacaccacgatttccaccaccaccaccgccaccgccaccacctccacctcttcctctacctttttttccacctggccaagacattaaacacaataatatcaagttagacatgactattcaacatgtctgctgcagatcaatcaaatagctttctcatttagcaaaaagatgttggggaaaaaggtcatttaggcatgatacacatccgtacctccttttctggcatcgcgtttggatctataccttccatcctaacgatttgagacaaaaatgtattcaataatagttcggcaatacaaatctttcaacaatatttttaaggcagagtagaaatagtcagtttaaaagcacagccacaatcagatggagaaaccatgaacataaaattttacaattcaaggggaatcaggataatcacacatctgggcataatcaaatcagagttatatcacattctagatcaagactgttagatagaaataaggcattaccttcatggcaagatccataagctccactgacacattctgaccagcagcaatcaaattgttcaccaattcaccagcaaaccttgcctccttctgtgttataagagtgtatgcagtcccatctttgtcaccagcacgacctgttctaccaatacggtgaacatgcatgtccatgtctcttgcaatatcgaagttcaccacagacttgatggacttaatgtcgagaccacgggcagcaacatcagttgcaataagtacatggtagatgccggatttaaacttctgcaatatatccattcgggaagactgatctttgtcaccatgaagagcagcaattttaaaacctttcagagccagctgtgactcaatttcatccactgtggcctttttcgatgcaaacactaagacatcacctgcatcaatcattgcaggtagtttttcaagaagccaaggtaacttctcagcgtccgaaggaatcacttgaacaacctgagtgatatcctcgttggccataccaacctccccaacagtaactcttacagggtcagtaagtatctccctagccaacttctcaactttacgcggcattgttgcagaaaatagcagagtttgacgatctggcctaatctgaccaacaatagatctaatctgtggttcaaatccaaggtcaaacatccggtcggcttcatcaagtaccaagtaagttgccctagacattgttagggctttcattttcagcatgtctatcagtctcccaggagtagccacaactatttcacaacctgccttgagctctttgaactgttcaagtttggacataccaccataaacagctgagacacgtataccctgtgtttttgaaaatttcttgcactctatatatatctggtgtgccaattctcttgtgggtgcacatatcactccaattggaccctcttctttctgaagttcgggctgatccatgatatggacaatcatgggaaggacaaaagatgctgtcttacctgaaccagtttttgctattccaataatatccctcccagaaagcacaattgggaaagcttggcactgtattgatgttggtttttcatagccttgttttctaatagcactcatgagttgcgaagagaaatcacaatcttcaaaagtttttaccggccttggaacatcaacaccagacacacgaatggccaagctcttttggtattcagcaacttcttgttcactcatccctatagaatggaaagattattacacaaatgaaggaaaaacaaaaattgatgagttacaagttacaactaacaaaacaaggtaagacatggcataacaagcacaacaaatataagaagacaagtacagcaccatccatccctgtatgttaaaaaatatatatatacaactatggtttgaatggctgatcaccagtttcctttaaattatgcattttgtaagagagttcactgtcattctaaaataagttcagataagaacaaccaactaaaattttccttctcgtaaacggatccattgtcattctaaaggaaattaaatgtagaatcaactaactaaaatttcacacttcaaaagccagtccattctaattcaacgggacgatacatacatatattcagaaaataaaattgctcaagtatgaagtatgcaacttttcactacttacttacccgatattgaatctttctcctcataaaagtccttgttaaatggttcatagtcaatcgaactatgatccagagctggaattggctcaatcttcttcctatcagtaacaataggattatcatccgaatcatactccaccaacccggcatcgacagccttagccgcagcatagacctcctcatccgaatcataaccagcgtgaagcacgtctgaagccagcgtcagacccacatccttctttgccctaagaaagctctcaatcggatcatcatcctcatcatccttatacttctccgccttctctttaggcttgggcggcggcgccgacctcatctcctcatgaataccctccatgaacgcgtcgagtggatcaacttcttcctcctcctcctcctcctcagctccaccattaccttcgtcaccattgccactttccttggtagcatcagcagcagcagcagcatcatgttcttcgtaatcgatattgtcaaggtcagtgtcttcgtaattgtcgtgaccttgtgcccgcgaagatggaggcacatacaatcgctgaggagcttgttgggagcgctcgaagttgtaagtcgtttggcggtttatgccaaagccttcgaatccgaatttcctcttcgacatggtcaattgtatttcctgtttggtttccgcgaaaagaaaaagcggtaaatctgcaggaattgtaaagaggggtttttggtagggatgaaccctagttgttgttgttgtggtttcaaaaccacggtcgcgtctcgtctcgccgaccgagtttggggttacggtgccgtactaggcaaatacccgattgaatttggatattccattgggtttattttataaatatggcttttttttgtaagtggtttagaaatatatgg

SEQ ID NO: 266620 - DNA, 6290 bp, Cannabis indica
ttaaagactagaagaaaagcaactatacctaacaaaataaattaagtaaacttataatcaataatctgatgatcgagtcgatcccgtttactttctcaactatgctcccacatttgaacatagtattagaactaaacaaaactctttagtatccgatcaaaaatagtcacaataaaaaacaaagtgtcatcttcaaaaaggtaataacaatgtttactctttaggataagaacatgttaaataagactattacaagatgaaaattaattataattataattgaccaaactatatagaatgaacaaagaacaaaaatatggtccataagggtatgctcatacagaaggggaccagtcactttctctaccccagaaataattcaactcttctccccaaataagaggcagtaagatcaactttctgaaaacatgttttcgtattaaaattctgagacgttatcatttttgtctcttggacttaaaatgtcaacaacctataatttatatatttatatatatcaataatgacaaacttggtatatgttacaaattctgtaaacaactgagctaatactactaatgtgattatagactgtgtttcctttctctaattttgtttgatatattagtttctgtacctaaatttccatgatcatgtgagataagagcactgatgcatgcgaaattccctgcaaatcattctgtccagcatgtgattttgcgctcgtcaatttagggtccctccacggaatgcttcatctgaatctcacactaaatcaagagagtccgtgagggagtcaaaaactatagtcaaagaggaggaactagatagcggtaaagataccgagttttctgatgtcaatatagatgtggagttaattttggtgttgagaatcaggttgagtcatggcgagtaagaaattggactatacagggataaagctgctccattgcctgcaaatcatagatatataaaggaattgaattaaacaagttaaagaccaaataagtactcacccgaaaagtttgtgaagattaaattctaatcctaagatcgggagaaatatgggccttcaacatgactatttattgtagtaaatgaagcacataagataggtctagttcagaactaaaagggaaaaacaatgtcataccattcgtcctccaaccaaatcgtaatgagcatagtgtggcccagtaggttctccaaatactttataggtgacgaggtgatcgggaatcaacttggcagtttctagtacacatcaagtatcaaaaatcattaagaagccaataaaccaccagtaatagatattaaaagagaaataaaatcatttccagtgtggctcacccttaacagcttcaggtgggcatattagatccctgtcccccgcaagtgccaagacagggactttacattcgcgcagatgatctttatagaagaatgtaccttttcggtcacgtaacccaccttctttgaatgctgttgtaagctgtagaagaagctttgccggtatagtgcctaccatagtaacggaccagttttcagtgactagcattaaaattaattggaaatgcaagacatgcaccaagtgtaaatcgcaaaggcataacgtctcaaacaatctttaaccttttcattttattacaaaatatttcttattcttacctgaaactaaacgtgcaaccatctacatgtctttaactatttgaataatgtatacaaagcctcttgcaagattaaattgaaggcaaaaaataagttcttttcaactataaagaagggaacctattttttctgctgcaatactttttaaataagaatcagctaatccttagtctcagctagatttcgatccctatttccccataaacagtgcatcttttcataccctttccagaagctaagtaaacatagtacttaactatgtcaatattgtataaaatcatccgaaagttttattaactaaatgagccaaagtatctattaagaagccccatacaagaatagcatattcaccccaaagtattttcacaacgttacactaagatataccaatgtctatatttactgtgtcaatgataatcgatcaaagagtttagcagcagaaattaaatttccatattatatcagcagagacacttacaaaaattgttcaagacaagcttctctaatagctctgggtgcatcatatcttctgctgaaatcaaattattaagccaagacaagacataaggaggacgagacgaaagaggataagcagcagccaaaattgcccctaaaggaacaacaggtacattaagagcctgtgcaggatctgcctgtaagacatgctctttgcagttaatttcttagcataagggttgaataaaaaatgacaagacgagacaacacaagtatcttcaaccacttacaaggggtaagagcagtttgagtgttgaatttgaagaggtgtagtcaagagatgctgccaatgtaactacagctgccaatttaggatctcttctttcaaaacctaacaaacccaatagatacatcagtccatacttctccctaggcaatacattgatagcaagagaaaccaaaagaacaaattcataatttttcatcgcttacatatagtgaccacaagctatcagaaaataagatagctctagcatgtagaatatggcctttacatagtacaaggcaaagccagtaagcaatcattccattattgagggaagaaaagataagtaatacattgaataagataaatcttaccatatcgtgataacatagcataaagcaagatcccacccatggagtgtccaattgcaagcaatttaccatcatttggcttatttacagaccttatatattccatctgtattaacaacaccagagaactgttaacacaccaatcatcattcaaatttcaaaacattacaaagcatgtttagaacattaaataacaatgacaggcaagtgtttaatgtctaggtaaggaaaacaacagtcatattgtgcaagtacacgacagccttctagaaagataaaatgtcacctcaccgcagcaggaacatcctcttccaggtagtgatcaaaatcccaatcatacttcaccatcaagtcaagttgattctgaaaatcttctatggttgaagcaaaacgctcttgtaagtcaaacagttgaggtgagacagatcgctgaccctcttcaacaatagttacaaccttctcactcaaatccttaatttgtccagcaacacccgaattctgtcttgtctcgaacaggtttagcaaactatcccttatctcattaaatcgctcagataattgagagtctagaagcagttttgaaatttgatcaagtagcttagcggacataagcttggattgaccttcactgagaaagccagaaagtctttctgacaatcgaataaaagtgtctgtcaactttgtcaccaattttgattcatcccacattgttgccacgtttttcatgtcatcagacattgacatatcagacttttctcccctaacaatagagctatcagaagtcaaggtattgagaacattgcttgacttctgttcggaagataaagctccattagttacactctcagcagcagcttccatttgctcagattttgcttgggctgacttctcaatttctttggtatttgatccacgcaggctcaacccagcacctctaacttcaagaatccatgtgtcaaatccttgtcgagacatgtaacgagcaaatgaagactgaaaagaagcaaaaatcatttaagcaacattagatctgctggccaaagggtcaagactgtcactacatattctgtgtcttcttttctattacttttgagcttcagtaaattatatgaaagtagaagttagctcctattctactattgattaactgcttatagagaaagcaggctcaaacaataaacagaactgaaatattttactgttttattattattaatagaagaacatcctctgatattgcaggaggggcaagatgaaatatacatggacaaattcagcaatcacacagtattggagctggtttatacaaacaaagatgttctaagtgaataatgctcaaaagtgcttacaagtttaaacataatctacatactaaaataactcaataaacacagtgggcaaactgtttgctttgctaccagtggaaatatttacataccaacaactgtgactttgaacactaattacccaaagagaaatgctaaggggaaccttatggtgccaagtacaagaggtggcatactgctattggtgcaaaataagatcggatcccatacattttaatttaataaataatataagaaagtactaagtactaaccacttgtaacgtgtcacatcggtatgttgttcgacaccataaggttatggtgcctaatggcaatgctcttacccaaaatgagaaattgatatttacaaaaaaagtaatcaacttaactcatatgttactctatttaccctattgatgaatgtgactcaaagcacattccaaattcattttcataatgatgcgtgttatgctagtcaaacaagtaatattaatataaaaacataataaaaattcatcgattactaagaagaaaaagctaaactttagcataattaagcaaatcaaatcaagcaagagaaccttgggagaaagatcgtatccaacggcatttgtccccactcctgacaacaacaacagcggatgattcctctgaacagcctatataaaaaatcaccaaagttaatcaaaaacgaaggaatgagttcaaacattgtaaacgaaacaaaactaataaaaaaacgaactttagggcaaggtcggtaacgccagagagcgagtctccaatcacaattgggaacggaaacataatgaagttcatcagcagtacaaatcgacggtttatcatcgatcttaacggcggaagtatcagaggtgacgtcactagatgagaaagccctcaaacgaaacgaagccgtggaataagaggaggtcaaggtccggcgaagtacggcggcgcgagattggacgaaattggagttgagaaatcgaatggtggaggaggaaggagaagggaagggtggggaggatgataggtggagaaaaaggcatcgaagatcggattgaatggtagccattttggttgagaagaatggggtggcttgtgctttggtttacatggattcacttgtgtcctttttcattccacgttttcttttaccacatttccacacgttttttttaatagaaaattgctaaaagatactattggtgtctatcatcttcttcctcgttgtcttatcgattggagcattgttattgggtaccgcccaatactttttatgagtggcactccaaaattagttaatgatattactttaaagttatttttttaaaattatataagacatgttacttaactataataataatgttatgatactgatgagagtattagacatcaataatactttttagcaattttggatcgaatctcatataacttaaaaaaaaattaaactttatttttgagtaccataaattatcacataaaactagttattagtacaacaaaatatttaaactttatattttgacaccctaacttatcacataaaactagtcactagtataataaaatatttaaaatttatattttggtaccataaattatttaaaatatgccgaaatagataaagagtctatcaaaatatctcttagtagtgcagtatagatattcccaaatatgacttgatttattattttgcaaaacaccaatggttaaagaacacaaaagtgaggaattttgaaaacaatatcacatacatgtcactagaagtctagaaaacataatgcgccaataaagctattggtgcctagttcttcctgtgtgtcatattactattagtataattaagtatcaggtcttataaaacttaaaaaaatagcttttaggtaatatcgctaaccaattataggacgccgcctataaaaaataaggcactgatcatataagttgaaaactacttttttttattacacattaatcaaatataactctaaaaataattttaattgataaatacttgcttttataatcaaagtattaaatatatcctcatataactttttaaaattagaatccctaacacaataaggatataacctataaaactaggtataaattaaaaataataaaataattaaaataaactagaaaataaaaaaaagagtatacaatatattttgaggaaattagactctat

SEQ ID NO: 266621 - DNA, 2666 bp, Cannabis indica
aatctatgtcttacataaagagagctaagtttagacatagatcaatagttacatagatttttcataagagcttgttgagaagccaataagtaaagttgatagaatgtacagagcattgttattaagtaccagtgctaaacattatagtaattattaaattaatgatgcaaaacccgctatctaatttcacaaaatattgctacaaaatagcaaaataacaagtgccttttaacattaatcttatcaaaatcatcatggttagttgctagaatctgtagtcttataatttctgtctcggtttagtttccacatgttggctggtgagttttagtttttggttgtggtccagatcacatttccaaatgatcacagctcttcaaattcagcaaacaattacaaatagtaagatccacaacattatctagattatcatttaagtcaccaagttgaaagctcatcatcttcataatcaaaattaccaactaaatgtgaattcatttcattctctctgtccaccttcaaaatcacaaaccaaaccataatgtttcaagtcactcagttgaacccaccacctttgcatcggcaaattaatcagcctcatcgtctctttcactaaacttccagccaaaattacttacccgagttcaggtcaatctttctgcatcatacaaacatacttcccatttcgaaaaatcacaaacttaagccttagttgaatccacattctccccgaatccacaaattttttggccttgtgatcttcatcgccaaagtcactcctcgaattcaaatccctctatggcatgtcttcaaaatctgttccaccatcatccacatagtcttctcttccaaagcctctcaccccatgatcattctcccttcctctatggaagttaaccaattccctatcaacttttgcattcctaggactcaacaaaaccaattcagccaactttctccttgccaaatacaaatcatttggctctatcaactcccctctcttgtatgcctccctaagaaaaacagtatgaatcttcccgtaattccctcgagtcgaaatgtaaaatataccctgatgttgaagaagaaactccttcaacttcttaggcaaattcattgccattctaaaatgagcaatcctctccaatgtaatcttcttctcaacagtcaaagtcaacaattcatgaattgtggcaactgccctcttctccattctcttttgagcctcaagtgatctcaaatcataaccagaaatatcctcataaggtgaccagtaaggaaccctctgccatttccacacagcaatcctataatacttaccaatcttaaaaccaggtggaaaattcacaataaatgagaacctaatatcctcagcattagcacctctctctctatactctttctccctaagtttctctatatcacataccatcaaactagggtctttctcaacacactcaatgtacttattcctagtttcttcagcatcaattaatcgaaaatactgagggtacttgagaattaccgagaactcgaaatcatcaggcaaaccgaattccgccctagcaatgcggatgtgctcgagccgaagcctggcagcattggacatcatcaagagctttctgagtctggtgacggcttcagggatttgggcatgaagtgtgtgcttttctagctcaatctggagatgggcttttcgggttaagcgacaatagaggactcgttgaaccgggtgctcataaatctcgaaaacatgagggaatttgagtaagaaagcaccaacttcatcttgtttgaagccaaggtgacgagctaggatgtcaaggcgtgagactggaagagtttgattgggttgggctagaatgagggcctgagacttgaggactttccgggttttcttctccacttccatgtagttatcaaacccatggtctcggaccctctgcatctttttgggtatggaggtggactgtgacatgggtctgtagaagatgaattggatgggtttaattataaagctttggctctttttgggtctgaagaatttggcagagtaagcaaagaacattgtcatcttggtgttctaacatcagctaacaacaacaacaccagacaaacaatatatatgagataatttaaggtacaatacaatcatatatatacacataaaattatgtaataacagttaaacaacaacaacaaacacacctacttaatccttcaaattctgtttttggccattcaactccttcaagttcaactcaatcaaagctttcaggatcttaaactataaaaaaaccagcaacatagtcatataaaataaatgtgttaataaataacaataatttataacaactaacagtagagacatttgatcaaacactttataagcaattctagaaaaagagaaaaatacctcactcaaagagacgagacattgaatataagacactgagctcagccctttattaagattccaaatctcttcaaaagctgtataaaattcaactttcaatgtggtctatcattttgtcttcctcacaaaatatggtagcgtaagctgtatatttcaatcaaatgaaattacctcaggaggaggaggagaaggagtgaagatgaaagtctctttgccggtgccggtgccggtgccgcgctggttttgccag

SEQ ID NO: 266622 - DNA, 3352 bp, Cannabis indica
atcgctaaacatcgctaaatatcgcaaattatcactaaacttcaaccatagcctcagatttattctaatcaatgtcaatacatcgctaaatatcgcaaaatattggtaaactaaaagaaagaaacgcaaaaaatgagagaggccgtgacagaagatgacggcgaggccttccgaccggggttttgagtctgtgtgttcgacggtaagggttctaagtcggggttaacgccgaagagtgagagaaagaagtttttttttgaaatgtaagggtatttttgggaggaaaaaatattaaaagtatatatataccatttctaatttggtggtatattaaaacaacatattttacatttaaacatactaaaccaaattttccatttaaaactacataagttctaaggatgaaaaaagaaagaaaaataaatgctaaagtaagagaataaagtttgaaatgttgttttggaggattccaatttaattatagttatattgtatttcaaattgtataggtgacattcttatattttaaattatatatttctctctccgtacattctttaattttcaaggaaataattaaagaggctaagaactttaacctagaggatttttttattcaagtggcccctgataatgaaacagctcgggaaatgatttctaagacagtggtggggaggttcatctctaagaaggtggtctcaaaagggaccttgagaaaagctcctatgggcatgtggaagcttactccgggatggcatttgcaggctcctgttccaaaaacctatatatctcacttgaatagtcctaagaaagtgaaatttgttttggagaatgggccttagggcccttgtactggcttaatgatggtggcgacactttcgaaggatggtaagtgggaatctactgatttatcagctttggatatctggattaaggttaatgggggtgtcgttgccttatatggcaaatgagtgcatagaggacatggctaattatatggtgactcttatctacgcaaacaaggtgcgaaagaatggggtcattatgaataactatcttcattttcaggtcaagcttaaccttattgtccccctccttgttggggtttcgttgctggatatggggacaaaaaaggtgtggggtcattttatataaacgtcttcctatcttttgttacaagtgtggttattggccatgtagaagatgactactttggccagaaaaggatggtgtctttctaagatggtcaatccattcccatgtttggaccttggctcaaggaagggtctcgattggagaatggctttgcacttctagaagttgaagacctctaggattgtcgaaggctttagacagatgactcaaagttgtaagggaatagtgtggtgttggccgtttccactagtctggtgggttgcctgaaagacagagcgattgacgagataggcataaggcgcggtggccctaacgctattgaagtggcaccactagggtggaggtagagggtatggtaggggttgtttctcaaatagcggataactcctactcagtgacttacaatgactatgtggaccgctcaaactttcctactcaacatgtggtgcatgtggccaatttgttcaaagaaaaacttgggtcggttagatttagagtgacccatgatgaggatgggtctgggcttagtaagacagacccaattcagaaattgaagaagccccacttggctgggctgagaggagtcccgaagccaccaatttttggataaaaaaatgggtgaacttggagctagcattggatcaaaaagaaaaaggatttctgagaattttgttaacaaaagtgattttatgcatgaaagtcagggacaaagttgctatacatttaaaaaagcgagtggcattgatctgaacgataagacgactagtagggatgaaagtgttggtataggtaaaaaatctcatcttcttcataattctatgaaatctgttgagagctcctatagttcgaagaaggatgaggcagttcgagatcgggatgaatttaacttgcctaagggctcaaaggatagggataatgataccgtgctttgtggggatactagtaaggggctcattactgagtcatctccgctccgtttggataatcaatgaaaggaggaagagtcatttgcttcagatactagagccccgagaaaatttgagaacaagagtgttcaggggaaagacattgagagggattttttttttggtcgaggaggcgagccaaattataccccccaaagccccatgaaagtactttcgtggaactaccgcgaagtcaagattataatggctaagaaagcgcttagagctttagttttgagagaagacccagatgttttgttcttgatggaaactaagctcgtgggagagcatatgaatggggtttggtgaagtttggggtttggtagagcctcagtggtggatgctattggtacggctggaggaacttatttatgctagaaatttcgtgtggaagttcagattattttggttgaagttggggtcactttggtgattttttttaaacattcttaatggcccagattggtgtgtttttttgttttgtctatgaccctccacttaggattgctagaaaagagttttgggaaagtcaagctttggagagtttgactctggatcatccttagatttggttggagaccttagcatgatcttatgccaagatgataagtttggacaaaatggagttgaagaaggagattgtcaaggccttagcgatttgttggatgttacttggggtgtggacttgggaactatagggaatcatttcacctagacaaatggtcgccgctttcaagatctaatttgggaaagattagacaaagttgtgtgtgatcctgattggattcttacctatcctaaaccaggtgttcgatcccttgctactaatattggatcttttgttggaacaggaaaaatacagaacccaattcaaatatcttaatgtgtgggcaagagatgaaaaatttaaggagatcattaaataagcttgggctattaaagtgctaggagctaagagctaccaggtggtcactcatttggctaacacacggaggtgtttggcaaaatggaacaagactcattttggtattttcaaggaaaagttgaaagtgttaaacaatctcttgattgaagtttagcgctagaatccttcagaggtgaatttgaaacttgaaacggatattgccttaagatagaattttgtctcacagcactcatgttggctcggtaaataataaaatcactactaggggttaaaagagtcactcttttacatataagtatgaagatac

SEQ ID NO: 266623 - DNA, 4331 bp, Cannabis indica
tcctaccatctccaaccacccatcttactccattaacaaccaggtattgtgcctcaagtatgcttctccacacaaaactaggattagagccaatttcagccgtaagaaaagtaccattagaaaaataccgagctttgaaaatacgagctaccaaagaattgggtttagttagtaagcgccaaccttgtttccctaacatagccaaattaaagtcacgaaggttcctgaaccccatacctccatcagttttgtgatgacagagtctctcccaggacatccaatgaataccagagttactactagccgaggttctccaccaatattttgacataaggctttccatatctctaacaacctccataggaagtaagaagacattcatggcgtaactagggagtgattgggcaacagactttataaggatctcctttcccgctcttgaaataaattttgatccccatccttccaaccgtttcctcactttttctttcaaaaaacccaacgctgaaaccttgttgcgactcatagaacttggtagccccaaataaagactaccttccaaggccggagccattcccaacactgtacaaaggtggtttctcaaagaatcatgagtattagcactgaaaaagatcgatgattttgagaaatttaccttctggcctgaagccaattcaaacttgtgcaaagcttctttaactcgaagagcctcagattcagtagccttacagtaaagataactgtcatcggcgaaaagcatgtgagaaattctgggcgccccattagctactttacaaccgtgaatccatcctcgttgttcatagcgtctaagtaaagccgacaggccctccgcacaaagaataaagagataaggggagagaggatccccttgccgaataccccgggatggaataacaggcccgacctcatgattaccatgaacaaccgtatatcgagccgaagttacacaagataaaatcaaacgaacccagctttcagtgaaacccaaccttctgagcattgcttcgagaaaaggccactcaattctatcatatgccttactcatgtccaacttgagcgccataaatccctccttgcctttgcgtttccttttcagatagtgcaaaacttcaaaggaaaccaaaacattatcagaaattaagcgcccaggtatgaaagcactttggttttctgacacaatagaatcaatgaaaggcttcattctattaaccatcacttttgtaatgatcttgtacatgacgttacacagagcaataggcctaaggtctgacatagtttccgggtttttctttttagggatgagcaccacattagcttcgccaatattatcttcaaggacaccattagagaagaaagaccgaaccacttccactacttcattgcgcactatctcccaacatttctgataaaaagctggagtcattccatctggacctggactcttatctggatgcatctgaaacaacgccttcttaacttcctcctcttgaatgggttgacacaattcagaattgacataggccgaaactctaggctgaacacaatcaatcacttccatacagtttgtatttgccgaggaaaaaagatcattgaaatagtcttgcaccacttctccaaggttcgattcccatgaaacccagctgccttgagcattttttaattgctcaatttgattgtttctctttcggctactggcagacttgtggaagtaattactattttggtcaccctctcttagccagaactgttttgctctctgcttccaatagctctctctttgatcaagagctttaaaaagcttttttttgacctcctggtaacattgcaccgatataacatccctcttattctgcaagttcttcaactccttcttgtaccctttaattctatggttaagagaccctgtaatctctttgccccaaacttgaagcttttcggcacaaagtcttaatttgccacttagactgaaagagtgcccaagagcccagcaatctctaataatctcagaacaaatcggctctttcaaccaagtgttttcaaatcgaaaacgattatgaggagcaaaaaccgtggggagaaacggttcgaggaaaattgccgcatgatccgaactagaaaaatctaaattagagagagtagcatttggaaatacctgaacccaagtcgatgatgctagcgctctgtccaggcgtatctcaatccagttattagaccctctccccttttcccaagtgaacgggtgaccttgaagctcgatatctactaaattacattgctgtaaagtggcattgaaacctgagattaggctttgaggatatggccgaccccctcttttctcctcttgactaacaatgttgttcatgtcaccaacgagacaccacggtaagtccgaacgagtagccaaagtacaaatcaaattccaagtctcttggcgcctactcctgtttggttctccatagagcccagttagtctccagtttccaaattgtgtcgaatgaacagtaatgtcaatatggttattagaataacccaacaaactcccatcttctttgtttttccacaagagtgcaagcccaccagctaacccaatggcatcaacggtaaagaccccttcgaagcccaataatctagcaagcccaaccacttttgatttttgacattttatttcacacagaaatataaaattgggtctcttatgagaaaccatctctttaaggaattgaatactccgttggttcccaagcccccggcaattccagcttaacacattcataattcttggcgggtctggataccagaacccgccccactcaagttttttgtaaccccctcttcagccaatatttcttcacaaccaattaccacttcatcaactaaatcatgggcttttgatccattctttgcacggcccacctccccatttacctttccaattggcccactaacttgaccttcaataactcttcttcttttggaatccagaaaaactagcccaacatttgaattatccacctcatcaccctccttttctttccttaataacgtctcccctgttataagggatttgttattattgacaatatgtggattgcgagtgttatggtcatatccccccatttgctcactttgattattctcagccattaattgatcattaatgccccctcctgtcatcggcacccccaccggacctccttgctggtttgatgaactagccccaggccacccagcattcttcgtggccattcctgaacgcagccaccttgatccatccgcataattacgtcttctcgggaccgctttcatgtctaaatcatagttctttttaatcaactctctcggtgtatcaaacaaacgttcacagaatttttctgtgtggccaagtatcccacaaatgaaacaaaaagtgggcaaatcctcatacttgaatgtgacatggcaaacccgccccccctgcatttccagcttcttcttttttttcagtggcttctccaaagggatcttcactctaattcgcaaatagtctcgccaaactcccgaaaaattgttaggatccgatttgatgaaagtaccgatgtaattacccacccctctgataactttttcggacatgaaaccaattgacaaattgtgtaattgaacccagagttccaaagtattcaaaggtatcgatcttggattaactccatgtgttacccgctccatgatcaaaggcgctcgatcgaaagtccatggactaccatcaataactcgttctatgtctacctcgtgataaaattgaaaaagaaatagattaggatctaattccttcacatacaagcctcgccccggctgccataacgatgctattttgttttgcatagcttgaaaatcgatagatcgatttgttaagaatctccccactaccaaccatctatcatcaatctctgccaacccatcctccccctcctcaaacagcaatccctcctcgtcatcatcatcaatcgaaaaactggcatagttctctgccaagttctgaaactgaggttgtctattatccattgatcacaatcaccaggaaaaatccacacgataagcaaacaaaaccaaactttagaaacaaaccaaatacaccatgtcaaaatgacaagactattatatgcaacaatatattaaaaaaatgtataactaaaaccatcatatgactggccttttcattaatatcatatcaattggttataaatatttattatacaaatctatatatagaaagttaaatcattaatatatttattataatttaattaaaaatatgtatgaatttttgtaaa

SEQ ID NO: 266624 - DNA, 3595 bp, Cannabis indica
aattaagtaacttaaaaagaaaagacaaaaaaaaaaaaaacagagacattaaaatggtaggttcagagcataaatatggggaaacctaaatttgaaatgcattgatgtatgtattgcaatttcacttttaagtattcataaggtgtagtattaaatttaattcatttttatgattcaatatgctttactagtggttttaaaatttcatgtttgatttgctaaatgagcttgagagcaaaccttactttatgtatgtaaatcttgctttccattcccactacaacattgacacaaattattgcagatgctgttattgaagtagcaaactgggacacgtctaaagtaagggacaaagttcgacgtgatatagatgcccacatttctttagttcgtgatgccaagatatctgaaattactgcattttatgaggtaattcggtttatggctcgtctttaatgttagtaaccatagtctctatgtggtgtcgtatcacgaaaatttaacctggaagttcattttagatattttatacgacaataaaaattttatcagttagaaaaacggtgactaaaatctcttttatgtttgtaataagtttggtaaagttttccttgggactatcactgatgttaataacacatgcagggcaaactgaaggaagcattatcaggaccagtagaagcactgctagatggagcaaatagtgagacttggccagcaataagaaaactccttcgacgagagactgaatcagctgtgtctgggctttccaatgccctttctgggtttgacatgtatgaagaaacaagaagtaaaatgcttacaaatctagaggattatgcaagaggagttgttgaggcaaaagcgaaggaggaggctggaagagttttgatccgtatgaaggacaggtacctgcctattttgtattcaaattttcttgtttactttcagcttctattttcatgcattgacatttgaactgctattaggttcacaacaatgtttagccatgattctgattcaatgcctcgtgtttggactgggaaagaagatattcgagctattacaaaaactgcacgctcttcagtatggcaatataaatactgttaatattatatttttttatattaactttatatgatcctgactgtttaactttttaacagtccttaaaattgctttcggttatggctgctatacgtttggacgattctgatgctgataccattgagaccactttaaccgtagctttggtggattccactagtggtgccaatagagataggagcattacaacggctgacccactggctacgagctcatgggaagaggtatctcttataatttcatttgtgtagtgattttgaagaagttcccaaacctactaagctatttctctgtggttctcttataacaagacctccatatgtataagtttcaagttgagatgttcttgtaatttgttttgcattcagttgacattagtcaccagtttaaccttgttttggattaacagaatcagtatttaagacatattttgcagtggactcaatatctatcaatgataggaatctcattctgttagatgtgctcattatgtgtaggagcttcttatgtctgtgtaacattgatatatttacattgattgatacaggtcccaccaacaaaaacattgatcacgcccgtccagtgcaaatctttatggaggcaattcaagactgagacagagtacactgtatcgcaggcaattgcagcacaggcatgattcgaaaccaattaacaatttaaattattttctgtttgcgatgtacttcatgttgttgattcataagaccagctggaatcgtgcgtggtatatagatatatagatacagtgaaaacattgacatttttacaggaaaagaaaaaatctaaaacagcgattgtaacttagatgcatttatcaaccacatatatggatgcagtgaaaacattgacacttatacagtaaaaaaaaaatctaaaacagtgattgtaacttagatgcatatatcgaacacatgtttgctccttcatttctccagtaatgggtcactactatgctgttgttataataaagtattttaagatggctatggttaaagtcaacatagggtgcatatatcaacctcatggctcatattatgctgttttaagagtagtgtaatttaagatggccttggttaaagtctgtctctgtttattatttatgcggtgatgaaaaatccaaaagcacttcaattaatttttgactcttctagtttatatttttaacaaatggtctttaagtattagctaaataaatttgtctatctccagatagtttgttacagtcctgcacttttttttggctatatcatttatatgtaatttctacaattattggactcaaaatttgtgtgacatcgatgagactttggatactgcatgaaatgtatatatatattaataaatatttattttaactgctattcaggaagccaacaagagaaacaacaattggttaccacctccatgggccattgttgccttggttgttttaggattcaatgaatttatgacgcttttaaggtacgctgtttccatctttatagttttactggtgttatatttttgtgtttgtatttatttcttgtattttggttgcagaaatcctctgtatctgggagtgatctttgtggctttcttacttgtcaaagccctatgggtgcagctagatatctcgggtgaattccgcaatggtgctgtaagtatctaaattgcgttctttaatacgtatagcctccttgtcaaaagctagtttagtaaaagatgcaatttcatggacttactgatgtgaaatattaaaaaaacgcactactattattgtaggctgcatttattaatcagtttatacatatatttttaattagtttatatatatatatacgtgcatgtatatatgtatattagtatactcttaatagctattacccaataagtattattaaaaaaattgaattttctatacttaattttgctttctaattaaaaaaatatctctttaatgggtggttatatggctgaagttgctctatcagttgatagagataaggaaaaattgaattagagatagatatttttgatataaacatacttttgatatggtttacaaagtaatttttttttttaattaactaaattagtcatagaaactcaaatttttcttttattattgaccatttaatcaaaataatggtttactatttttaaaattgatatttctagttattttttttttttttaaaataaccattaatgattcaataggtattacccatttgagaagtattctatatattacccattcagtttatatatattatatatatatggttgcactctttatgggtattactcttaaatgggtaaatttgagtttttaagcttaaattttctatctaattagtttaatctttcattttgataggtttggattgttttatcggctgaaaaaaaaaaattatgaaaaaaaagttttttggacaaaaaaaagataaaaaaaaaagttggaagagtgtgtatttaaatgttttgt

SEQ ID NO: 266625 - DNA, 4634 bp, Cannabis indica
tttggtaacttagcatacaaaacatagctcccaactttccagaaaagtcaaaaaaagtggttcaggtctatttggtactaaacttttttaccagtgacaacgttaactatgattacaatcgaaagaaacgaccaacttctaggctattaggctatgatgacaaggtatatatatattaattaagaccaacttaatggagattgatttccccaagttactgaaacgtgttgaggaaataattttttttctctcttttctaattctgcattctcttttaagtgagtcagattagttgaacgcattttagttatgccaagtttagtttgatccattgacgctagttagtaacattcttgatgaatatacaagctctggaggcatcttcatatgaattcaataaagtcacgatggaaacatggacgcacaattataaataatgttacaaaaatcttttaccaaaacttggacccaataaaacagaatgccacatatgacatgtaccttgcatgcacatgcttgctgctaatatacaggtgatacattttttttggtcctttttcttctttgtagcccacaattcagggctcgtggctgtttacacgactctgaagttccagcatttcttgatggcttgggtccactgagagggcagctcgacagtctcgtaaagcacccaacacatccccaatatgttcatggaatgcggctcttaggtgtagaagatgaacatctgctttgaatgcaattgccctcgacaattcagcaatggcctcctgttctttgtggctgtccattaacactgttgcaatcatgaaggcagatcaaactcattaccaaatatggcttctttttttttctttttgtgaaatgtatacactaaggcagacacttaaaacagcttggtactttattttggggtcagtgactttggcagtgttatttgtattacagagtcaccaagtagtttcaatccatgttttacggaatatcatatcaattatggtaaaaagaaaaaaggatttactgtattaactatggttatctgacccctgtcccttgttcaaaaaaaaaaaacaacgaaactattagaaagctaaatatgttaaggactagagtgctaaccagcagctcgatatctgtaagggtaaacccgaagtggatctaaacgcgtaaccatctccagatctgccttagtgagttcccgatcacagtattcagatctcttctcataagcagaggcattgttctgggccttctcaatcaatcgagtcatttcctcatacgcagcagacttattgtttttcatggaatgcacccgtgctagcccctggtgggctcgagtatgccggatgttaagagcttcagtgtagcattcagctgccaaatctaatttcccacagtcaacataaacactgccaagattgttgagtgcctgcaaatggatattgaaaggtagaaaaggttagaaatgttctgtggtatgctcttttcatgcagtaaggttgaggcaattccttctagggcttttatcactaagcgtccacaatatacattcaacaaataaataaaaaactttcaacatcctaagcttcatttgtcggtcaaagatttaacctaaaaattttgtatttcctaatagacactctaacaatacagaacctatctgcaaaccagtatggccaacaaatatcctttctatgattgttagtcttcggtttctttcagctaatctgcattttcaattcaaactaacctcctaaaaaacggtcaccattgcagttcttacttccaatcagcaactgtataaaattcaaggccagcgttctctcttccctaatcactatcactaagatgccaataagtaatgtgttatctaattctctctagaagacatgcgaacagaatggttaatcagtcaactaacctacggtatatgaaaaattatcaaagcaatgcaggtacgatgctcgagactattagaaaacacattccatttctattccagcaaaagaaaaaggaaatatttaagaaatgagatgacagtgaaagcacacctggcctttccgtagcctatctgaggggcactttaaggcatcatctagtagagaaataacagttgatgatgaacaagatgggtcttggctagaatcagccagtgcatatgctttcaggaaaaaggcttcaaaagatctcttgattttaatagactcctcagcttttctagtccttctcgcaatgacctgtatcatataaaatccaaccctcatagacaagctgttcatggtcactggatgcatgctgacgagccaactgtaaactccgcatggctgcttcaggacagtttaacctggtcatcgaaagacataagacttctagagaagttgacggctacaaaaggaaggagcccaagagaacgtaaactgttcaaaaatggagcatgaggccaaaaacaggatttaaacaagttatgctagatggctggtacacagcatttgctgcaaactcatacaattgtttttcttggaggcaggcttggcaactcaggaacacaaatttttaggttagacttggacataatagattgttgagacctagataacacaacaatatgctgtatttaaaaatattgatggtaatgtactagactaatctcctggtattcatgaagataaaaaactcaattagatcaccggtaccaaataacataccaataatttaatgttcatgttaatgtaatataaaactataagaactaaaccaagaactacctgaggagaagcaacgactgtctaaaatacaagacgccttttgctgaatctgattcaagcatctggtagataacagatagtgatccaatatcatccacagatgaccaccgatcatacagttgcagccagcaatctgcagttgtccaattttgcacatgctcacgaacaagcgttcgaagttgggatgctgccacccgtccctcaaacatcctatattctggggagagtgtaagaattgcttgaacatcacatagagctgattggtaattttcaagggcaagatagaaacaaaaccgtagctccaagcattctaatgccagtttgaatccaaggatccgattaatctctgcaagtgcagcttgaacattctcatttcgcatcatggaagcagcacggaacatgtaagggtaagtaagagttgggtccaattcagttgttttctcaagatcttgccacctcttatcaccttcacagtatagtgacctttcttgatacatccatccaagtggggacattgaggaaattacagagctgagtttctcgtaggaccaaagtttattacccttaatgcaagctagtctagctaaacctgtaacagagtaaagatgtcccacttttaaagctgcctcaaagagacgttcggcttcatcgtactcttttctcatgagcctcacacatgccaactgatgaaaagccagcattctctgccggtcattttcagcgaattcagccagcctttcaaggaagcaagctgttgtatctgaacgaggatcaaggttcacagcaacttcacttaataaacagtagagcgaaaatgatgccggtccaaccatgataaatctctgttgcctatcagcatgccggaatatttccacaattcgactatcatttatacaattaggaagatcatttaaaaaaacttgcaaacaagatgcggcaaggacacggcaattctcctccaaagcacattccaagagctccacagcatcatctctagacaacaccaaagatgcaagtatcctatcacaagcatctttgagcctttcacaacaaaacttatttgcaaaaactaatatttccaacaaaagatgtggtcgggctccactcaaacttccagtcactgagaattctctgattaacttcataccagatgcagaaatattgttttcagataaatctatgtcctcacagagtgattctgagaaacacccattaagcatggcatgaaatggagctgaaaggcttgatattttctgcctatcacaaactattttttcctctccaattctaaaaacgacacttttcaaaatttggttcccattcacggacacagtctcgtaggaacttgtgtttacctcaaaaggaagctgagaagaaacatctatggtgccaaactcttgagcacatttaccacaagtggcaagcaagtcagctataagctcttccccttgcttctcatactttaaccatgctccaaaaacaagtttttcatgaacagtgctagcattttgccaagcagcaaggaggcttctccgcatcagtttaacttctccaaggcccctaaagacctggaattgtaacaagtagagattcgaccgctcttcttgagaacaagagtcaagctcttcatgaatttgggctaatacctcaacataatcagcaggtttaaaaaaagggagtatggcaggctcagggaccttgatgagagactctctacaaggatttgaccaccgccatcacaaaaatgaaagctttagtaaatcgattcagtgtttttatatgaaaaaacatacatatatattttgaaaaagaagtgacttacatggatgaggagaaagaagttgaagtagaagtagaaggaggggg

SEQ ID NO: 266626 - DNA, 1078 bp, Cannabis indica
tgttccaagcactttgcttccagtgggagtatctcagcaagattatgaagaatgtgaatattcaacaaagggtccaagcgaaaatcttctgagtactcctcagctaaagccaaggattccttgtatagtgatacagcttcagtagacttttcctcaattacagctattcctgcaagcccatttaatgcaagaactaatctcctaagagcttcttctccttctactttggttttatttatgagaacctacgaaacagacgactttcagcaggcagtacattaattataataagtgctgggaaacacactgaaatatataagaaaaaaaaagtaaaccaccattaatatttcctccatagtcatgggagactggtgcaaagagcgaagcccagaacttcccacttgaggatggcagcaagcttgacgtagcttcaggagtgtgttcagaagctttccagcctccgcatgggtgatgaaaggatcagatgaaccatcagatgctacagaacaacatgaaataacttttaaaatctgaaaatatcatctcctacttgtaattttggttttaaaaaccaaatcttcactgatggaaaaatcaaagaaaagaaaagaaaaagaaacctgagacatttctttttgagaatttcatctttcaaacttgcaataacttcctgagcaacaattgcacaagtctcatgttgcctctggtaaaagtgttcttcaattggcgagaaagtgagccaagaggtgtattcctcctgaggaggaagttgcaactcatctgctacgtgtgcttttgatgaacgccacattatttgtttgaagaattggtgagtaaattcaatggccccagcatctctcctctgccatagacagtgatcaaaattgagaaactggtgtgatatatacaaacatggttctcacatcaagaaaagaaaaggacagacaaaatgcacatcattagaagaaagcagataaacacaggttacaggaaaataaattaagtgggcagtccatgggtctagcagcaatgtgagttactggctattgacagtacagtattaaaatatttttttctt

SEQ ID NO: 266627 - DNA, 553 bp, Cannabis indica
tttatttctatcaattgataattgtagtttccatgaatgaattaggaccgtctctcccgtcccaagcacgaaggtgggttaggcttttgtctcttccatgatttcaatttggttatccttgcaaaacaaggttggagatttttatgtcatccggagtctttggtcactaaattatacaaagcccgatatttttctcatggtgatttcctatcggctgatttgggaagaaattcaagctttatttggagaagcatctagagtgcctaattcttagtcccttgaccaactattggaatcgattcctcaatcaacattttgaattatccttggctccccgacgctaccaatccttttgtaacttcttctcatgtgggccttgttggccaaccagtcagttctctcttttctgttgatgatagagtgtaggatattgagctagttcatggcatgttcaatgaaagggatgccaacttaattcttagtttttcgttaagcttctcggcatcgtgtgagttttggtcttggtctagtgaaacctctcgtcatttctctg

SEQ ID NO: 266628 - DNA, 1235 bp, Cannabis indica
aggtatattaattaaaaaccaaaaaaaaaaaaacagtaggtacaactaactagtctgtaaatcactaatttatatatatcatgaactcagtaaaaaagaatagaataattcttactttgaatatatatttataattattattaagaatgtataaaactatattatattaaagttctatattataataagttccaaaaatagaaatttctatattttctataaggaatattttatgaaactctttttttttaactatatttttagaaactcctgttggggttcaattgaaattgcaaaatatatttttttttctaaaaaaatatttttcattctaaaatcaaaataccgaaatataaaaaagcaaaagaattggaaaaagtggaagcgcggaaaattcttctgagttttggtgtgagaattaaagttgactgaccttatgattgagatggtattaaatttcaacttttgcaattgcaaacaagggccttaaccagtacttatacaattgatgtataacgccatatgcccagtttgtcatcaataccgccacgccacttgcttccagttggagatgtgcgcgcactataaaaagagataggattttttccaattggacacgtctaatgggtggatatcattacttttcttttttttttttttttgaatagaaagtttggataaggctatagttactcgacaatttttaatgtagtcaaagtagcaaccgataaataataaatataatatttaatatttgtagttgcaagtatttaaaacttattaatgacaatcataaatagccactgctaaagaaataatagtcagtaagagcatcaataaacaataatcagtccctccaagttaattgttctacaaatttaccccccatcttataatttataaattctccctccgtctgtctttaatgatattatttttaaaagtattcatcacctaaaaataaaatatattattttatcttccttttatatcatttttgacacatttcattttaaaatattcttataataaatacatataaattttagtaaaataatattatattactatttaatatatgttaaataattaaattttttttactttataacaaaataataataataaaaaataaaaaagagaagatatataaagaaagtcatacaatgacattttgtttttcagtgtaatatggagccaaattacctgtctcagttcctgtcccactccctgtc

SEQ ID NO: 266629 - DNA, 999 bp, Cannabis indica
ttgtttgcttcccaattcacagcatatttaactgggcctaagctaggcctactagttcacagcatagttcagttattggttttgggctccatttgactagaaagcttggtaacttagaatgaaagtttgttccaaatcccaatttccaatcaaaatatttaccacaaacaagctaaaactaaaagagtactactagtacggacttggaaagcccacaagtccaagggacaatatgaactggttctcccttggagttgttcacataccataatatttgcaaaaaaaaaagaaaaagaaaaagaaatatcattagcactcgtcactactattttattttatttttgaatatttatattatatttttaaaacgaaacaaaaattatatgtatggaatgaaatgtgcaatttagaagaatgttattcattagaaaataagaagacgaaaaacgtttaagcaatcataatcaaagctttatgaactaatgatagaataaattaagtacttatgttattcataaatttcactctttctcattaatgagaaccagatcttaaggataattaaatgcctgttttaagtcccatatatcaattgatagctataacaaaatttaataaacaatagagcccatttccaatacttactaaatatcaatgagattttgctaatttcagaaaccatgtgatctcttcaatactgctcggacttttagcatcaaattgcttgtagttcaatcaaagggtagccgattcaagaagtttgtgatccaagagatccctttaactttacacattaagatcttaaatgttcacttcattcgaaaaccaccaacgaaaaaaataaatataaagagttatagcatagtcaaatctttatattactttatttgtaggtcaatttgaaacgtttacaaatcttacatcatctctaacggtgagtgataaaaaaaaggtgttaagatactataaaatgtattttaaatttagtatgtattaaaa

SEQ ID NO: 266630 - DNA, 1564 bp, Cannabis indica
agtgtcaaataaatattattaagaacacaaaacacatggtactagtcttatatattttaaaaaacataggttaccaattgagtaaactttagttttttaatggtagaaaagtagatggtttttattattattgttctcgagacaaatatacagatgagtaaagaaaagaatatgtatcaaagctttgcagaaataaagtgatattatcctactccaaagaattgattaatacaaaactaaaataacaactctcaaaaagaaaagtgggggaaagaatcctaaattagaccatgatttccctgctgtggtgctgtacttggaggaaagctgaaagggtctccaaatggatttgaagatcctacatgttgcgactgttgttgagaatattgattttgttgaggaaattgaggtgaatattgttgtggtaccatcatagtgttggcttggtatggttgttgttgttgttgtagcatcatttgttgctggttctgttgctgttgctcctgatgttgttgggccattagtgccatttgaacatttgttgggggcgctatgttgtttgacatcatgaacgggtcaagttgatcgaaaggattttggatacttattccactttgtccatatcctgcattctgtagatgtatttgtctcctggatgattcgtcttcatacaagctatcaagtagtagtttgttgaaaccaccggcctatgttaaaaacacaacaatgctcaatttagatgtctttacacaattggccgaaactagcattggagatgtgtttttattttgattctcatttaatgaataaaattccataacaatgaatttggcagagtacactaaccaatttgctgtccaccacatgattagcattgctgcttggagctgtaaccaaggctaattcccaacctggtgccccaagaagatcattcaagctatgatttgtagattgtgaatcattccctgcaaaaattttcacaaaaaaagatcacaggtaaggaaattattttagtttgtagttgaatagtctttgaatttatgtgcagcagatccaccaatcgcgacaatctataaagttgagtatttcttatatgattgctcttatatgtaaaaaattattatagtaaaatatattgaagcctaccaggtggaattatggcaagagccaaagcattgctttcttcaatttccaaggcttttgaatttacttctcgcagaccctgaaaaggagataaaagtggacaatgcatattgaagcagtagaaaaaaccccaaagaagtctagaacatgtgactcaaatcttaccaggaaatcaggctcttccattgatatcaagggtagagcttcagcctcttcctttggttgggattcttcaactgtttgttcaactgtttcttctactggttcatcctcatcaacttgtttttcattttcttcttcaggttcctcaagtttctgagactgctgatcagactgatcaacctcttgatactcctgagagtcacacaaaaaatataacaaaaccgatccatcaattcaggtcagaggagaaaatgttaaa

SEQ ID NO: 266631 - DNA, 2519 bp, Cannabis indica
gagccaccatataataattattaaaaagtttaattacaatatactataactaagattttatattgcatatatataaatgctaggggggggcatggccactatagggagacaagtacgtccgaccctgagtccgaccctgaatacagttataatattttcataaatacaatacataatatatatacacacaatacaaaatatatatatacacgcatattcaataaaatacaaaatatatacatctatactatatattaaggtctaaacttttaccttataagagtaattcgacgaccaattctgataaaaattcgaccaccatgcacatacacaacaacataatgttaataatatggaaaaactctaaaaaaatttacaaaacaaaattaaaacaatgtgcattactaatatgaataaaaatcatatttatattttaatggacgttgagattcaatattttttccattaaaattggtggtcggagttgtaacaactactttatttctatggcttcagtttacaatgaaaaatggaaaaaaaaaacatcgcaactttttgattgtataagtttaggtatcgaaaatagaagattgtaaaaaaaatggctcaaatggtgcaaaaatagtggagatacggtaattttttgaagtagttggtgagggttttggtcgtgttctctaatttagctggctgctgtgttttgtgctgaagaagaagtgtgaagaagaaagttgaacaaggtttgttaaataatcatatggagccggttgcggttatttataatacacgtgtcgatatataatatgatgtcggctattttcaaataaccgacgccataggattttttggcattctttatttttgattctaaaaccgtctctaaattgtatgatcaataaatggtatacctatagtttttataaaaaaaattgcctataaatgtaattttaaatcaagcgggtatttttacactctttaattttcctttttaagagaattgtaaaaaataaaatagcttctaaaatcccattttataatagtgcaccaacaactttttactttgaaaacagaagtaataggacgtctgttacttcgattcttaattatataatcgaagtaatcgacctatgtaaggattattcttattagctaatcaatatatagtatttgaaattgcttaactaaggataaccaatttatatagcccatatttgctggctatgctctataagaatatctcaataataattaagactttggtagtatttgatttcagtgtgctttattaattatacaaatacaagattaaaaaaaaaaaaaaaaataaatgtatgcaaccttgacggcctgagcacattataggaatattttgtaatagttctgttgtatacgaatatattaattttgattctactgtagatatatagcaacaacaacttcaaactgatgttaattttgtttgtgtcagtgtatattattaatgacaacattaaaacaagaatactccaaatcacattattaattttggcatcaataatttctactgacatcaatacgtactcaattttgttatgtactaagtactatgatactattactatctaaaaagtaaaagtagatactgtaccaaataataagtccaatatatatatgacatcgatcgccattctcactaatattcttccctagcttcttataaaaatctaacttgtattgggttaaatgtcatataattttatcatcagttgtttgcgtttagctttttttaacgatcttcacaaatattattgttgactgtacttcctattaatttgactgtttgcttgagatagagaataatggacattaattgtaaagctttttgttatgttagtctcctaaatatttgtttgtcccttgaattgtgtcagtatcagatatgatttttattggaactttgcaccttcaattgtaattttttcttttatatatatatatatatgagaggtgtcgatgctaattgacattgacaatgcatcgacttaatcggttcaatattatttcaacctgggtttaaattatcctatctcaagtctcttctatgtttcgattaaagttgcctatgtaattacttcgttggtaagacttttattttaaacattattaaacccatagttttactttaaatattattttttttttcaaactttacattcatacatactttaataaatttttttattttattttaacaaaattgatgtcttgttatttttttggttaatttatagttgtatttttattattttataattattatattgttgttttttacggtattgtttaagtgttttatagttgtttttctgttatttttatgtatttttttttttgtaaagttgttatttagtttatgttcattttttatcgtgtacattttctgattattctagacaatattttattgtatatatgtgtctttgttttattatttttatgttattaatcagtttataattattttttaactattactaact

SEQ ID NO: 266632 - DNA, 4280 bp, Cannabis indica
gatattaaattaattttttaaggggaagagtctgccacattagcttgctattgggattcttgagtgtcgctcgcgttttgcaccattccacgggcttggcgcacccctcttttaaataagaaaaattaagtacaatctggtgtgaggttcctgaagtgatatttgtccaagattctactatatgcaattacgggtcccgccagtaactcttgatctttttgttctgtttcttaggaagagatgaaataaggcatatagttttgctcttaaatatggatgaggctatggttgggccatctttctcactttataaggtgagcttttgacttaatttgttttttctttcttctcacttttcttttgcctcaaatatcatgtacttttatatccgaaagatgatatggctaatttgcagatggcagttgaacgcaatttcacaagaggtcgtaggacaacacaagttgcagctgcttgtatctatattgcatgtcggtgagttctttttgttattgatttcattgttttctgctcgatattagagatctcatttggctatggaaatcaatgtaatcagttttcattcatctagaatctagacttagttaaatcattttcttgctttccatataatcttagagaactcacttgctataattttggtattcactagaatgtcattgtcatataaacaagtagtattactattaagttttaacttttaatgtgacttaataacctttgctggaatctatattgcaatgcagaacttcaaacccaccaaaaccgtacctacttattgacttttcagaagctttgagtataaatgtgtaagcaagcaattctatttctacatttattattgaccgagttttcagcaacaataagtagatatatgatatcttaaacatcaccttttgcgtgcactagtgattgtatctgtttgcatatgtaggtatgtggtcggagctacctttttgcagctttgtcaactgttaagccttggagagcataacattattaaagagacccattgatcctactctttttattcctcgatttaccgaaagtaagtttacgcctctttgttttttcagcactttgtatactcactttattactgaaatatattccacatgatgagatgattccagttttggaagcttctgtagtgattatagtagtattagtttgactttgtattttggaaatgtgttacatcttaagttatttataaagcaacattaaattttcccttctgttttcgggattttagagttattagctggaaaagatgtcgaggtttccagaactgcaatgcgcatcatagctagcatgaagcgagactggatgcaggtacgatttaagcagagagattatttttgtttctaaaagctgcttcttcacctccattcatgaaggaaggcatttaatactggatatcgcctttgttataaaaatctagaattaatcttgctacagccctaactcttagattagtattacacgaatgcaccacacaatgaattacagaagtgtttcaataaaagccctttagtaccataccaagttaaccaaatttctcctacaatgctacctgtttctgcctagctttatttatttgccaaagtcctttgctatgagaaaaaccttagaacccatgaatcttactagctagtgaacctctgcatctctttcctttttttttttgactcttatattagcaggtatagataatatacgtgcatgcgaatcttactatagctacatattatacagacaggtagaaagccaagcgggttatgtggcgcagcattatacatctctgctctcgcacatggtcataatttaacaaaattagatgttgtaagtccagctattattaaggattgcaagtataatgttgtatatatattttttcttgttttgttttttttcttataaggtagccaacactacatgagatgacattttatgtatggttgacatacataaaatccgatcctacttattataatttaataagtggtgttacgcacccactaaaccgtacattaaatgccgactcatgaattgtttaggcaccttaaggtgttgtgtagcaacgctctaattgtaatgattactcattttaatttttaaaggcatacactacctttttgaagtacaattattaaggtgagaattataatgtctgcagtttgttgtttttaatatttcatcattcatgtaccatgaatcaatcataaattggtgatttgtttgtgccaactgctgaataacttctggagtaccaaaaaagaaagaaattgactttttatttcttctgtgttttatactagaaatgtctgtatatactgtgactgatggatctcttttattactaggtaaaaattgtacatatttgtgaagtgacattgcgaaaacgattgattgagttcgagaacacagaatcagggagcttaactgtaagttcttctgtgtgacattctcttgcatgtttgttcttctctttcacacggtaatacccggtataatcgcttctgagatacatatgtgcttgtattgttttgatgtcatgtatatttcaataaggattataccaggtattacacacactctaagttttctatttattcttgaatttgatttttttaataatatcacaccaaacatagtatttattattgtcagtgcctgtataatttaaaattaaaaaaaataaagttatgtatttttaaaagatcattacacaaaaaatcaattaataattaaaaaaattacttaaaactaaattaaaaaaaattaaatttactatttttttttcaaattaattgtacacgtgacgttgacgtggcaattgtctaaataaccatgttctgtttgccacgtgtgataaaacttgacaaaaggatcaatttacaacactttgtatagtttgggggccatttttaatgggttaaaaaattcaggggcacaataatacataggtcatagttcgggagacaaaaatcttaaatagcctaattaataagtgcattgtgaaagcaatatcttggttaccagtctctgagttaattactcagttaactgagctgcttatgaattacttgtgtaaactgttgggagtattcttggcgatgagtaattatcttcatctttggacatgtctacatttgggtttctagtttcagtacataatttagtaaatatttctgaacagattgaagagttaaacaacaacgctgtggagctaaaaaaatcgaacttgtcacctattggtccccataagtccggggagttgctttgtcaacataaagagagtaaagaagctccacctccatttgctcatgggctatgcgagagttgtttcagagatgtaagtttccaactgctcatcacaattgtcaaattctgtttttctatttctgctcttcatgtgtgaatattatgtcattgcagttcgtggaaatttctggcggagttagtggtggagcagatcctcctgccttccagcttgctgaaaaaataagagttgccaataaagctgctgtatcagatgattcagaagttgatctccagcacggggataaaacaatggatcacattgataaaacaaccgatcacgtggataatacagttagtttcttgccttccatcaccatattgttctctctcacttttatattctctttttattttcggtctagactaattttgtttacaatgtttggtgaaaaattagtgatttgattgtgttatagattaagttgaagggtttgtatttatacttataatgttgtctgcatagccttaaaacaaatagtatcaagtatttattttatcattcattctgatttattaacattcacatgtttatgtttatttcagaacaagaatgttgaatcttcatctgaatgtgaccaaaatatgaaccataaagaaaaattgggaaccgtagagtctgacagtaagctatattgttttgtagactttggattgtttaagttatgtttcttgttacaatacatttcagattaattctgtgactgtttttctagctgttgctgcagatggaatgtcaaatgacacttctgataaggcctctaagtttacttctacaagtaatcttactagtgacggatcagatgatggcctttctgatatcgatgatttagaggtatgtcacctcatttcctggtgctgtaatttttgtaataagatttgatgataattcagattggtggaaattaaagtatattgttggttttatcgacttttat

SEQ ID NO: 266633 - DNA, 4293 bp, Cannabis indica
ttaaacacaaatttatccagtaaattcaagtgcaaacaaacaaacaaataacaatttcaaaaatatgcagatagtagagaccaatttgctggaggcagccttgaagattgtctaaaacatcttgatttttctcttcatttttatataataagaaactcatcaattggcaattataacatcaatacaccatacactaaataaattaaagtaaaaaatgcctaagtagtagcctaattctattcggcaacagtaaacaatctatcacataacacaactgtcctcagtgttgttacacagaaatattatagccaaaaccttggcttttgttgtatcaataatgtaaggttgccggctggaatgagaaaaaaacaatatagaaaagtaaatatcaaaatctaaaagacatgcaaaagtaaatgatcacattaagaatcatcattattggatttggataagataagactaagaagataccatgaaaaatacatcaacggactttaagcttctttcctcgttatcctgtcagatcacaatgaaatatattaaacttaagttttttttaattattattattattccttaaatttatgtagtaaattctctcacctgaagcaacaaattcccaaggctgtggtgatttcatgaattactgatgtggcaaagtgcaaatagagcacaactgagtacagaaaataaaggatttgtcagtgaaacatataataaaatgaacaaggtatctggtataaatatacagtatacatctaaatagatgcagtagttacaaatcagtaaagacttgcacacaaagacataattcagagattgtttagaaaacagagtaatgtagcatatgcataataataaacaccatacgtgtgaataagaagtatccaacaagaaccaagctttcatcaaagaaaggaacactgcaagaaagaaaggaagaaaaaaaaggtaaaccgaatgtcataagcaaaaatctttgtaagagatgtagagaaagcaaaatgaaagaagcaaagtacaacatacccatcattcaatctggctgtgagcgcatttgcaatggcgatagggatatacaatagtgactgcagaaaatattcaagtcagcaaaaatagtcaggcttccgtaacggaatccacaaaaaggtttactttaatatgatttagtggattaagagtcagcttatatttgaaccttaaaaaatcagaaagattactccttgtttatcataatagtaatttacaaacaatcacagaattcttgcaacataccatgcacattccagttttcaagccctttggttcgtcacacagatgagccagtaccaatctcccctgccagccacataaaggattgcatcagcccaaaagaaggatgaaaatttgataagaactaaagatcacataatagaataaatttgcaaggactcttttctaacaataatgtaggtttgacacaatattacacatatattgagataaatcagaagataaggtcacggagaaaaagatatcttaccacaaggaaaccgaaagcaagtccagttccaagtacaactaaatgtggatagctccttataatatcagatggagacaaataatccctacatgaatatagtttaagcaaaaaataagaaataataatcaacatgcataactatctttaaagaaatgagaaaaagaggttacgggtgtttgagaaataccaagcaaggactccgaatagaaggacagtaaaaggataaagctgacagaaaattcaaaaatggttaagagacaagttcattcataagtgagcagggaagcaaggcaagttcaagataattataaaataaccattgccagcgccagtagcaagcttcctttccttgcttgaaccaccttacaaacattgtacacgctgcatcaaacaatgaaacgcaagttatggttttctttacattttgagatctaattagctcaataccaatatcaactaagccatattaggcagagagattatatacatatatataatgcaattgttaagtgagtcctgcaaagttcaatagtatattaagagagaaatacatacttgaatgcaattgttggtataacagcaaaggctaccatgaagaacaacacaagtctggatgttgggatttctgaggtaaacaaaataaaaataaagtgagagcatgtcaaaagccacagcaaaacagtaccaaaatcatgtatcataagcccataccgaaaaaaaaaaatcatgtataataagcaagagcaatgatattaagtataaagtcagcaagggttgttacacagaaatttttgggttgtcaacatacaagaatcttaccactgataaatggaacccaacttaaaaagggtacagacttgccaaattgttgagcccaccattcagcacctggcaaataaacaatgaataaattttccactcatgctagatatggatagggataaaaaactacggtacatatataccaactttaaatataatcaaaattgaattgcatgtgcataagaatctcacaaagagtcaagacattacccacaatagctgtgaagaaatgaccaacgtatatcagcatgagaccctctgtaggtccattaataatggggagagtaagggtatttgtgaagtaactggatcagaaaattttcaaacataacaattaataaagtttactaataaaaaacgatgaaactagtcctaataaggtaatttctgaaaaagaaataaataattgttcaaacagtacaagcatgcattaataaaagaggatcaaagtcccccgtctccaaggctccaagccaaggacaacgcaaaatgacattcttttcagctggttaaattaaccaattcctacttcatttcctcaagaaatatgcgaagaattaaatgcttttattacagcaaagagtcaaactatataacttactgttcccatgtagcaccataaaatggaacagctgagatcacccagaaccagaaagtatctcttccacacatggaagtgctaccaaaagccactgcctcaagctacagccattaacaaaatagcacagaatattgtaagcaaatgcaagtttatattttagagctgcaaaatgccaagttgcgcaaaagacataccgcacaagcaagtgcatcacatcctgcaacacaaataatacaaggaaaaggtttaatgaatcattaaacagttattactcatctacaaaatataaataagatatacttagagagagagagagattgtaacaaaaattaccatgatcgaaaagttcccccaatggacttgatgaatttgtccgccttgcttgcttcccgtctacagcatcaaaggtcttgcaatgcgtaccgaatgaaatcattaaaaagatgttttgaatatgcacatatgtgtcggtgaaacaatccaggaaataggatggacaacataaaagatccaaatttaatcaaattgtctttagactgtaaagcaaacaaaattatcactatagactggaaattattgcattttcattggagataaaaagatgatttatcaataaaaaagatggaaataaaaactattcatcaaataatagggtggtacatgctacacatactaaatgataatttatggaaatcaaagtgaatatacaattctttaagccaaaaaagatggatatacaatgtgctatgcaacaaaagaaggatgaacatacacttcagtgataactatatcattatcaagctatctaactttcaagctagtgacacattctacacatgagatatttgaaaagaaaagaaaaaattatgacgaccatacaattctgtgttaactatattatcaagctatctagctttctgcaaaatgtgtccttcttcaagtacatattatcatcacacgttatgaatatacagtggacaatttgatatttcttgaataaatttcaccaaacctgatataagaaaagtagtaatccatgggcaaaatgaacccatcttggaggaggtgaatccaactgaggtgaataaatctgaacataaaacatataaatataaattaaattaacacaaagaagtaggaggaaagatgaagtctctattacatttaatacatagcaccatttgtgttagtcagtgtatgtatggagagaaatgtttttgacgatccttatcccacactgaataaacctatattacaatatacaaagaccaagcatttcttgaatacttcgaagaaaaaacaccacaccacacacaagacaacttaaagtaccagcagaatttgt

SEQ ID NO: 266634 - DNA, 1984 bp, Cannabis indica
ataataataataaataaaaaggaaaatcatcccctatcaattaattataaatttataaacgtatattttttatcaagtgtataaaactatgaatacaaatacagtatgcttctttaaaaataagaataaaaaaataaaatgaataaagtaatactgaaaaactattccaacacatttaaaacaagtgatgaaatacaaagggctgcaactgccaacagccacgcccacctgcaccacggccccagaagcttcaaagaaacgacaaaattataatttaatataaacataaaatacttcaaacgacacacatcttaacctcccatctatgactatgacttatattatgtcacatgatcacatctcatatatatataaatagatctgaccagttaagaaacatgtatccaatcaaagccattgtattcactcaataatccaataaacatgtcgagaaacctaatcatgacagacactgatttggcactattggattcaataagccaatatcttctacaagatgatttcaatttgtctaacgtgagctgtagtttcaatgtcggtagtagtatatctagtcctccaccacctcccatcaccgacggggcatcaactgatcatggctgctctctagaggtggcgcgtgagaggaagattccggtaatgcattttcggggtgtgaggcgccggccatgggggaagtacgcagctgagattagagatcccaagaagaatggagccagggtgtggcttgggacctacgagacggctgagcatgcggctttggcttacgaccgagccgctttccgcatacgtggctccaaggctaagcttaatttccctcatcttatcggctccgatgagctggagctggcgcgagtaactaccaagcgtcgatcgccggagttgtctgcgtctacgtgtgatgaggggtcttctaagcccaaacgaacgaggagtatggagttgggtaacgttaaggtcaaagcagagttagatgaatctgattggtttaatttatgtcaggtggaaacatctgatagttggtagccttttcttagtccttcgattcatgtatataccaaagacaaatgattctcgttcattcattcattcatttaaatttttcttcaaaataaaagctgtaaagaaatatatataaatgagttgattttatcgtttgctgcctgagttcctttttctttgaaattacatcctaaatttacactaccttacttaacttctggtattaaattagattgagatttatcgtatgagaggcaaatacaaattattaatgacaaaattgtcttttacgtgattcatctactcgcttgcaagttccaactacattcaatcatcttacaatactagattataactatatgtagaccaaaatagtattaataataacaataaacaaattttaatactatatcatcaaaaattatttgaaatttttacaccaaaaatacaaaatgctaactttattacatatataccaccacacacttagttcaacatttgtacatttttctttaagtttattatatttttatcacatgcacacacaattcaacatttttgacacgttaatgatacatcaatcactctatacatcatttttctcctttttcttttctttttccttttattttccatttcttttcagttttttttaaaaaaaatagtaacctccatagctgaatacttccctctccacaatcccaactctattttccctcttccttttgctcttcaaattttttttcaactcccattaactgaattccataaccgttttccctctttttatttttctcttaatctatatataaatatggttgtaactcgttcttcatcaactccttcccctgttcaaaaaaaaagttctaaaatggggttgaaatctttagctaatagaaacaagggtaaacgacctgttgttgaggaggatgactctgattttgctcttccattgtcgaaa

SEQ ID NO: 266635 - DNA, 3214 bp, Cannabis indica
ttatcttcttcttcttgcatgtcgttgtcaaatctgggagatgcaattagatttggcttgactctagccggatctagactgggacaagtcgaatttaggttgggttcccttaccattcttcttaggtccaatggcggactgaccccaaaaagtcaagatcgatctcagtcgttcgatctcaatcgtcctccctagatttgttttctagatcacagtgtggtgtggatgggttttccaaatttgtttttgaattttttttatatttttgggtataaatttagttatatagatatttttgtgttttttagatttagatctgagaaatataatagtgttggtagtgatggttgcattggttcattgggttggtgtaatggtggtggtttcagtatgctataatggtggtggtggttgtttcagtatagtgtattgatagtggtggttatgggagagaggagttagagttgagttttggtgttgtagtggtgggtatggtggtagtagttttggagagagtgggagttactgagagagagaagtggttttggggggagagaaatggtgattatggtgggagtggttttgggaagagagggaattacggagatagagaagaaaaaaaaaacaattatgtaattttttttaattttttattttaatataatttatttttaatttttttcactttaaaatattattattttttttaattaatgtaattacatagacaaataggattgtgccatgtgtatattgtatacatgtggataatccagcatgtcagttaacaatcaaaattgaatagaaacagtaaactgctaacattatcatggttttagagagtttcgttgcaaaaatttgaatttgaaaagttaaagacaagcaaagtaaaaatattaaaattttggtacaattaactcaaaataaatatatgtacgatgataattaattaaatttttttagtatgttattctagaacatatagagttactgacacaattaattaattaaccacttcgcgtgtagtggttaaggattcaaaattcttcttaattagttaactccttttaattttcatataccaaaccatctatatatatatatatgctcatcattattattctagctatatagatgttaagaaaatgagtaagtaacaaaaaaatcttacttttagtcacaacaaaatttatgattaaaagtgaaaaaattgtgactaattataaattaatattcatatattgtcactaaaagttccgcgaataaaagtattcactactataaaataagcctttagacgctttttttcagcttagtaataaataaccaacgccatagggggttggaaatctatagaaaggaatttgcacctcttatggcgtcggttatttggaaataaccaatgccaaaagggtttataaccctagtcatccatttgtcttcctcattcgatcagccaacccagaaaccctcaaaccctctccgccaaccaccatagaaaaacacccccatttcaccattcactacaagaaaacttacttttaccggcacaattaaccaattgcgctgataaaagttgtcaggataaataaaatgctgaattttcactttaatttagcaataccttttgccggcgcaattatgcgatggcaaaagatgttaataccaacgtattattaaatgtgcgccggtgaaagatcaaaaatgaactgccaaaaggcgtgaggacgtttccacgtctttaaggcttttgctggtgcataactgcgtcggtaaaagtgtaaaaaaatttggtgggaatcttgactgcctacaagaaattttggggagaaaacttcccgcgtggaaattattggtaggtggagatacttttgccggcgtaataatatgctagcaaaagtattaatcaaaacggtacatttcaaattagggtttatggacaaattttaccggtgtatttcaatgcgccggtaaaagtatttatataatagaggcgatgagcccccatttttccccattttttttttcagatttgtttttttctccgtccctctctctctttcatctcattctctcaatctctctcaatctctatctgaatctatctcaatccctctcaattttctctcaatttcttttaaaaaaaaccaccaccgttggccatcaccaccaccgtcgcccaccacgaccactgcggaggacgacggaccacctacgccgaccaccactacgaaccaccaacccccacctcctctaatttgtttaaggtatttttaatttttttaatttttcgaaatatttatatatatgtattgatttgtgtatgtatgtgtatgtatatttatgtatttattagtgtatatatgtgtatatgtatgtatttgtgtatgtatgtgtatgcatatttatgtgggtataaatgtatatatgtgtataaatgtatgtatgtatgtatatgtatgtgtatgtgggtgtatgtatataatgtttgtatgtatatatgtgtatgtatgtatgtgtatgtgggcgtatgtatatatatatgcatgtatttgtatgtgtatgtgagtgtatatgtgggtgtatgtgagtgtatatggtgggtgtatgcatataaatgtatatgtgtatgtgagtgtatgtgggtgtatgtatatatatgtatatgtgtatgtgagtgtatgtgtgtatatgtatatgtatatgtgtatgtgagggtatatgtatatgtgtatatacgtatgtgtatatgtgtgtgtatgtatgtgtatgtgtatgtgtatatatggaaggtttaagtataagtgtatgtatatatatgtgtatcgctaaattgtgtttatatatttatttgtgtatatatatgttcattattttaatttggttttacttttatgaaattaagtccctattttaccggcccgaagcatcgctaactactttttgttgtttcttttgcactgcttgaggtttagtttttttttcttcatattattattgtaaatttaatagtttttgtaataagttagtatgtctatgcatgttagtgaagtaggttctgtgataaagtttactgcagtctgatcggtgaattattttttttcatatattattatggaaagtttgtttgtattatttataggttaaaattttgggtttacgatttttcagctgttatgctgcgaaaatattgatagatagttaaataatgtaa

SEQ ID NO: 266636 - DNA, 6007 bp, Cannabis indica
agaatgcaactacagtaggacatttgcaacatttttatactttggggagaatttttgaatagaaaaaaattcaggggcaaaactctacaaaatcatagtttgggagaataaatcctatttattcttttaataaaagttagatactgacctagttggaagtttctctaatcttatttctaaacataatcctccaaaataccaagttgagctaagcagtttaggatactaaatagtctaatttacaatttggtaaagctgaaaccagatactgattataactatataccgaaactcatcaacatattagctcaatgcagttttcctattaataaattagttaatcaaagccaaagatctcattccccaggttcatgactcttgaaattctccaaaagatatacaaggactttgtgagcttagtgttcaagaatttaatgccataataagctcatttaacccaccgaatcatttgtgtttactaaatttctgtcccaaacctcatcaatttaatcctaaccaaactgcaccatgaattttatttacattataacacccgcataactagtttggccaaagaacaataaaaattgaagcagcaatttcgtaacaaaaataagaaggggcatgccttgcagcttaataggaggataaatttcgagagcttctaacagtctaagctccaattcaacctgcgattgctcctagaagaaaacacataattaataagaaatatatgcatacataaacataaatatatatgatatgatgatcacgagagagagagaaagacctttgggagagaagaagcagaggaagggggagccttgcaaggagagtgtacggacattccgtcttgttcctcttcccttgctttgccaccactctccatttctttatttcatagatacatatatattgtgtctatatatataaatatgaattcccccgctaagaaaatcacgctctcttctttctgctgctgtcaaatattaatttcagacaactctgcagaaattataacggaaattattacttttttactttttttttcttttctctttgatttttctttgctagggttttgagtatcttttttttttttctctctcttcatcaaatgggctgtcgagtttgcatttgggctggccattttgtctgaagcccatgaagattaggctagtgagagtgaggcccagtatcataggtcagtcagtagttgggtttcagtttctacaacttcaggatggtctgagttctttcttccctgcttttcttcttcttcttctctctcaagtcagtcattttgggggcagagtggctaagctggtaaaatcactgtgcccctagaaaatgccgagtctcaccaagctcttttccatggaagaaatctcccagcataacaccaaggatgactgctgggtcgttatcgatgacaaggtacctactatttcattcatggcttctcaaaccaagtgggctttgtaatggtgttttgtctttatagttattatcatgaatgggtatgtgggttttatttttgtttctttagatctatttgcttatttgatgtttaatggttatcttttaacatacgtatttttttttgatattcacattttctgactagatttttggactctgagtgaatacataaaataaaaaaagaacttgcaattactctagttataggcagtttgatctgggtttggtgttattagttttcacccagtaatgttagctcaaatgatcacagcgtgatacaattactctagttatatactttcatatggcaattgttttagtttttttgggttatgcagggaaactgttttataagaaatagttttcgttatgttttcttgagaatttcaatttgttgcaagcaagtttgacgccataatatgtgaaccaaaactcagttatattacttgttggaatagttgatttttaatcaagtttaagcttaacttttttttatcagtgtttgttatgttttcttgagagttttagtttgttgcaagcaagtttaaggccataatatgtggaatggttgatttttaatcatgtttaagctttaacttataaaaattacatttaaattaagtagacaaaaaaacatttttaatatggttcaacattgccattgcaatgtctacggccttaataatgtattgtaagtttttccctgagcttgaaattaagtctagtccaccacccccaactgtttataatgaactttctgaaatcatttaaaatgtcttagttttatgccttactgtctttaactttaacagatatgatcaaagatatttcttgatccagtgtgtactttggattcccctcgtatgttggtgtttcacctactagtggattctgagatccattttaacttgcgaagaacttgaatttcttcaaactttgttggttattttgtgaagaactttaatttcttcaacctttgttggttatttccaactaaatgttttcaaagagttagttcaagaactttgtgaacgtactgcagttgtagcatgtcagaaacagaggaatttttgttagaaagttcacttgtattcatgaaaacccatgaagcgataaccattacaatttaaagggtttaaggagaaataaccatcagattctttttatatgatcttgtaccacaataacagatcttttagcaatttttgaaatacagatagtagtaaaaaaatcaaattgtctatactctagtttgaggatatgaagtcatgaatggaagagtactctcacagcctgtcaaggaaaacatataaagtcaatacaaccatacagaaaatcaaacgacattgccttagtgcagccactttgaactctaaacgtcaattttgacataatatctcggtcgggcctacgctaacacatgtcaataaacttcaaagtgatacactataatggtcgtagatccttagaatgtgatgatattgaatggcatcttagctctcaaacatggctgggatgaataaaaaatacagttaatgtgacttcgtatgttggcagtaagctaggttggaaactttgatataattagtggtttgatataaactttgatcttttttaaagactattttacttttctgggaaagccatctttttgttttggttccatgctattccattctaattgttttattttccccttcctatgactacaattaggtgtatgatttgtcatcttatttggatgaacaccctggtggagatgacgtagttcttgctgcaactggtatatttctcattacttaaatgattgtgctaacatctttacttttgtatagacgtgttcataatttgtcaaactatcaacaaaaacgttatgaatacaaatcattcgactgaaagatattggtttccactgaaggaaaggatgcaactgaagattttgaagatgctgggcacagcaaaactgcaaaggagctcatgcagagctttttcattggtgagctcgacacctctgatatcccagaacctgatattgtctccacgaagccaacaagaagagattatgctcagaagctcatagacttggcaaagcaatattgggttgtccccacagcggttgttggcctctctgtagtagtaggattcttattcttccgcaagaaatgatgctattgaaaagtttattagttgagctgattttgtcacaattttgaataaatttttacgggggtaggaatttttactagcaattgatttaatataatgatgaaaaatattttgcatatttgaggttgtgcccctaaacctgggatttgttttaccttttaagttaaattctgctattttcgctgtttgttgctaatattttacagtgattaacacgaccaatatctgactagattatgtccaactccattacgtctttcgtgcccaataattctgttcggtacataacttgatggaattgaactacgtgaagaaggggaagaaaaaaaaccttgcatttttaaccaatgaacaaaagtgtgcactaatatatgtatgtatatattataaatgaatgttacgagcaagtaggttgttttattttaagttattgtttttttatgtatatatataatttatatatatttaagtggtatattgtatgtaatttgaaggaataataattaaactaaaaatgttagctaatatattagaagcaatgatagtatagtataaaattgtatataaagttactattaaaatatattgttatgtaattgtaaataaagaactgtgtaaaataatatgattgtaagaataattgatcacataaaggcaaatggcgaataagtttgaattgtttaataagcaaatgatacatatattgttattaataatagattatacattaattttaatatatacacactgacattggtctaacattcattattaatgtagtatttgtaaagaaaacacatagcatagtattatggcaaagggtggaacaattgtttagaaaaatttattgtttaagtcctgataattcaaaaaataatatatgtattttacaaaatttaaaagaaacaatgtataaaagaattattaaataaaatacttcattgtttggtgaaatacatgctgaaacacattttgcatatgaataagagaagaaaagaatacatttaggatgataaagaattggtgttactcaaacgacagtgaaaccgttgtgtagagcatatattgttaaagcctacctctagaagtgaccttcccatacagagatcagttaaaggtgtttgctcaacagtctttaggaaaatagtgttcccacaagctagagcaggtccaaccgaacatgagaagagtaaagttcctcggaataatctaccctactacaccaattggctcgtgcaacatttgaacatgataatttacatacagttggtccatagatttattctacccaacctagaaaaaaatgccaagaaaagcataaccagaaaatggcaagttagagacctttattatatactgtttaatacagagtacaagcatagtataacagaaataacaaccaagacactacacttaactaacaccaacaaactaaagaaacaactaacagatttattgactaacatccttcctcaaacgaaatggagatttagccatttaaagtttgccttttgagtaattaaatctatctatacttaatgatttagttaagatgttcgcaacttgatcaaaggaagaaacatagcaaattgagagatgtctcgctattctttggtctcatacgaaatgaagatctatttcgatgtgtttacatcttgcatgaaacactggattagctgcaagtgcagtagcactttgattatcaacccacagtggttgagatagaggaacttgaagttcaaataaaagagatgtgatccattgaacttctacagcagcattggcaacaagggccatgaactcactctcagtgcttgatctaacaacaacatgttgcttctttgctgaccaagacactaagttatctcctacaaacatgaggtagccacctgtggatcttctatcgtcggtgcaattggcccagtctgcatcagtgtatccttaaagatgtagggtgtcacttggtttgagccacaagccttttgtgagagtgcctaattagttgttaaaaatatacttttatttattttaaatgataaaataagttgagttttaatttatattttcataatatattttataaataaaaatatttagttttgattcaatttatgtttttcttgtaggaattaaagtgtattttggttgaaagaaagagaaaggagcaaagttgaaaagaaatgaagaaaaaaatggcatttttgttggagtccaaagcaacccaatccaaaaaggtcaagcctagcccatgaagcccatcatcaattttgtctcttctaaagcatgtgatgcaatgatgataagtctaggtcatcatcaaccctattttcctcttccacactcaaccttcatccaaaga

SEQ ID NO: 266637 - DNA, 3044 bp, Cannabis indica
ctattcaaagattttgtgatctgctaattaatatgttaagactttttttttaaaagagaattaataatttaatatgttaagactttaataaccccaatatatacccgtgatttgctttattagttataaattgatcaattggcaagatttatattatctcaaaaaaaaaaaaaaactaaatataaattattaatatatatatatattcaatctaaatcaatcaatgtaagtagctttagaatttgatcatattaaagtttctgcgagattaataatagtaagaagaagataaatactaaatactaagaaatgtatattgagaaaacaaattataactaataaaaataattgaaggaatagatttgttaacaaatattttggtttgttttgttttgttttttttttgaaacctaacaaatattgatatttttttttttttattttgaaaatattgatattattataccttaaatttttaattaaagacgaaatatacagactactagaaagtagttttttatcttcgattttttcactaaaatgtcttcagcttttatactcggaatcaaataagacattctaggtgagaaaaaatattttgataatcgaaatacttacatctttgattattatatgaagcaattgaaagtatcctatatgttcgattattaaacttataattatggatttattttttcttaaaaatggatatttataattataaatttgaatttatttaattaaatatatttatatgtattctaatttaaatattttttaattaatattttaaattttttaattaattttattataagacacatttgataaattataataaacttaaatctaaaataaattcacaagttatataaatatattcaaatttatatttcttttttttttttttgtaataacaagaggctgagaagaaaagagcaacagaaaacagtcagcctataaggaactagaaagagtccctagtcttcatctcgcaacctgagagcttgctttgcaagagagtgcgctttgtcgttgtgctggcgggacacatgcagcaaagaagcttcagggaacctggagaggaaggtcctgatcttgtgaacaagagtcgaaagaggggagtggtcgtgccaattcctgttgaccttagagacaaggttgagacaatcggagaaaatatatgctggtgccaaattggaggacaaacaccactgcagtccttcagcaagagcttgagcttcagcaaaaagaggagaggatgcccctggtttgtgaatccttgcagaatgctgaatatgggacatgccctgcataaagaccattcctaaacctgtggctggagtgctgaagttgagggcagcatcaataaaaacagcagtggttgaaggaagcaaaatctgatccagaactgttggggaagggcccttagagacaatagaagaagaggagtgaatctgagcatcttgataatcctgcagaaaacgagatacgtagtcttgaacattagtaataacattttgtctttgaaaaatgtgagcatttctggtgttccaaatttgccaaatgattccaataagtaagggaagttgagctttgggaagtgatacaaggctatggaggtaaaaatctctgatatccagcctacgattgtcagcaaagaattgtttaaaagtagattgatgccagatggtcttaactctgggacagtgaagaagagcatgggaaaccgactcagtgcttcccccacaatgaaaacaacaagcacaaatttacatttctgtgttgcaataataataataattaaaatctatgatttggtactttatttcttggagactaatgattattgctctgcgagcattgcttaaggtatttcacctaatctttctgtcctaagatctggtactgtaatgcttagtctagaaaaatcatactcgaattttatttcgaccagtaaggtgaagataattgttgatgatattcaagaggaaattgatttttagaaaccttctattgtatgctatgtattaggggctaatccccttctatcaatattagaaggttttgtaaggagaatgtggagagacaaggttgaaagagtagggatggtatcctagggtatgttcctaattcagtttaactctattgaagatagaaatgagatgcttaaaggggcatgtaatttcttcaataagagacatgctatcaatttcaagaaggatgacattagggtggttccaatttggatccatcttgatgatctagacttcaaatattggggtaaaaaaaatttgttcaagattattggtcaagttagcaagcctattatggttgatgaagcaactaaaagaagagataaacttagctatcctatagtgcatatcgaagtagcattgaaacaggattttctaggaagcatagacttttaagatgagaatggattcaacacctctgtagttgtcgcgtatgaatggaaacccattgtgtctggccattgctctagaatgggtcatctcacaactgaatgtaggaaaaaaagtggaggtaaacaagaatggataaagaaagaacctgcaaaaaagattgatattgtggaaaataaagtagatgaggtagatttggatggttttcaatgagttgccaagggttggaagccaaaaggaacaagtgtagcattggttgcaactgttggaatatatttaccatgacctagatttactaacaaatatatttataacatcctaaacatgaacttctaaaacgatataaaataaacacataaaaggtatgagaaaccttacattggttgcagtggaattaaatgactccttccgctcagatctctaacccttgtatcctttctgtagcagagtatcaccaagatctgagcctgacactccttctgttgtttggattcttcacagtcttacaaactatgattgaggctaaacttgctatgggtgggcatgcactcaatcactaaggcttgatagagaaaaagaattttgaacttaatcattgaagatgaaaaagagaagaag

SEQ ID NO: 266638 - DNA, 730 bp, Cannabis indica
acatgcatttctcttacataaatagtcgtaccacattattaatgaaagaaaataagattgtcggttgatcgtttattaagtagttgatgatgtcacccctaaaaatggaataattaattttagagaaacatggagttattgaaggtagtcaaaaaaaaaaaaaaaccctttttgaaagacaaagtagaaaaaggtaaaatggaaaaaagaaataaaaccaaaaaatatccattaatcaaaataaatgaaaagtgattaattttaattaaggactgaaatgtaaataggcaaagagaaatggcctatatagtgaacgattatgattgtaatgaaaattttgttctaactagtaacaaaacacgaaagatgtcctatgaagaagaaatcgaaaagaaaagaaaatgataagagctatttcagatgttaattaaaaaaaagaataagcattttgatgaaccgcctaatattttattattagtttttttttttctatttttctttaatttgtgtattttggctctatttttcagtattttcatatgtaattttgtttgtagggtttcatacatacatatatattttgttagttttattggttttttttattagtgataaacttactaattttgaattttgttagattcatattgttttttattgtttatttttacataggtatagtatttcattattgaattttttctatgcattttttattttattttgtaat

SEQ ID NO: 266639 - DNA, 4775 bp, Cannabis indica
gattggatcagatgaggaaaaaaggttggattggatcggatgcccacccctaatagcaattaattaaaataataatttataatttaatccaaacatttttctgttaaaaacacaactagaattagaataaaaaaataagtcaactaatcgaccgcctgattagtttgaccttgaaaatacgtgctgaacaaaaatcttctctccccattatcctattccattgttgtccatccacttaaattgctcaatttcataaagtttgtcaacacccaccaagacatatttaactgataataaatctacagtcacatcgtctgtttgggcattatcgaatctacataataatcaaataaaactcatccttctctcacattttgctttcccaaatttttactaaaatttttaaaaactaataaaataaaataaagctaaagaaaaataatccacaaagaataaaactaaagtttttacgtggttagagtgttaacgagtcaatattattataataagactgaaaaagtcttatgatttacacgtgtttgaacctaagaacttgcctgagcactcaaagattgagattctaaccctttgcataaataggttttcttatatttatagtactagagttcttgcccattgagggagtaaatacaaataatataataacatttgatctgacttagtaaggcccaacccgttaggctataatcttctactgacatggaagccacatcacgttgatagctgtcaaattgtgccctaattttatggataataaagacacattagtagttgattggcaattaatttatttcctcattcgaaagatacgaatcttagaaataaagccttgatgttgtgaaatttggtaataaatatctatgatacgaagctagatatccgcatgcccattaattacccatcccagagatctgctcgatgtcattcggagatacgttgtgccagaggtgtaccttgtttggacaagtcatttgtccaacatctggacagcttgactttgccaatggatccaatccattatcttagttggacctacggttgggcctggaacaattaagttgaaaccctcttggaattattcgtgtcctccatctaaaaacacgcataacatttacttcccatgcctttgaaacttaaagggctttgtaggctttcattcttccttccagatggctagaggacaggtgatgcttgaaaaggcagattcctttttaaattccaaaaacattgtttatggttgacaactacttgctttttgaaattaatgaagtgacacatggaactatttctttggctcgtggagattactttcaataatggagcacgtgcaacatggatctactaaatgaaggttgctcatgtcagcgagtgtcccaagaagaatatcaccatttgtatgtcttagttccaagagacacattgaatgcaaatctaaaagcccttttggacagttggatgtacaatatattttcttggatatcatcttggccattgatttgagttcatgcagatcaccatctttgttgtttagatgcagtaaaatttgcccctttaccacttttgcccaaattttaatataagtttgaattttcagagagaaaatgagtgaagattacttttggtgaatgaaccactatttcaatgagtttattatcttcttctttgaatttgtgagcgagaatatctaagagcaccacccccagttttgacaactgattcttctacaccatcagaactactggatcttcaagatgagattgaagcgctcatcaacaaaacctttttccttcagactatgcttgtgcgccttaacaaaccttcttaaacatgaatttctttaggaccaacacacgatgtttgaatcccctttccaactcctgcattttccccaaattcttcataaagtaagtaattttggtattttctaaaataggatttaggtcgtaggagagactctgaacatttcgttgaaatatggatactttctatgcatattgtttgtagacattattaagttttgtgatcctctatttttgttggtggcttgaaataactaacatttaacactaagtactactaaacttaattcctctgtttaacatccttgtttcggatgacacatattgtagcttttcatttcatttcattcttcctgatttgatcatcctagaacaatattcttcaagaattttactttcagatgtagggttcgtggggggaccgtctccaagcagtgttaggggagaactctcatataccttcactatcttctttagtgtgggtatttaactgcttgactttatttttttattcttttctagttcttaccatggctggcgctattcaagctgatgaagttgaagttttagagagagagtagaagttgctactctaatagtggtatataattcatctccttgggagatggatccatacacaaacaaatttaggaattacagagctcttcgggcgtatgaagatgattagggcctcatgaagatttcaggtgtgttttggaacagactatctattttgggaaaatactcatacaagtgtgtggatgactttagcgtttggagctaggtccatgttgagatgggagcacacattttccttaagagctattttgaacgcttctatgtggaagttggcattattctattacaatttatcccccaagtctacaagttgttggcgacatggttcgtgctttgtcgaaccaagaaggtggaggttctgtcaccggaggaaatcctttacttttaccaagtgaaatcgaaccccatgcagaaaaataagagcaaaagcaacttctattgtcttgagaaaatatacagagcattggtctatccaactagcattgtgaagtatatgcatgacttctggaactactagtttttaatattggattcctgttgaagagggttcaaactctgtcttgggatttcaatgttgcaggtaaatgacactatcttttctcttctaattttcatcccatcatttagtttgatatctgatgtggaatccttttcttcaatatcaaacaacattgcacgtagggtcggtacgtaattcgtgttatcatgtcgtgttcgtgtcaacacgtttattacacgatacaattaaggtaaaacacgtacacaacacatttattatacgtgttaaaacttcaaacacgaacacgacatatttattaaatgtgtcaaaacctcaaatacaagcatgacaagattagttagtaggtcacatgtcacgaacacgacacgacacgataacacgattatcattataaatacaaaaattttgagcttttttatgaaatatatgcaaattaattcgtcttattgtgtcaacacgattatgacacgacacgattactaaatgtgtcgatacgactatgacgcgacacgactaagataaacatgaacacaacacaattattaaatgtgtcaaaaactgaaacacgaacacggcgtgatcattagacgtgtcagaaactcaacacaagcacgagacaattattaaacatgtcacccatacccatttatttcgtgttattttgagttttgtcattatgttgtgacctatattgccagccctaattacacgtctagttgctacccctttcttgctcgaaagagaagccttgtacataggttttcctccagaggacttgaaagtggagaagcttgtcacctcagtcaaccttaggaaagttggtttgattgctcctcaccagagcatagatgcctatcatgtttgtttgctaaaatttatacgtacatacaattgaatcaagtaatataatgatacggtagagtatcgttcccacgaggactgatatcaattactaattaattttttcttcgtttctatttgtataagtaaaaagttttagaaaaataaataaagaaaataattaaaaattagaaaaataatgaatcagaaaaacaaggattattatgatccccaactatcctttattttacttcttaatgcaattactcaatttctcttcttcctattcaattgacaagttgaattaagtagttcataatcttgttaagacttacaaacccaaattatgtgaaatctcaccatattcctatagaaaagtttaatcacaaaaaaagcattaaacaaaacaactcataaaatcatacaaataatctaaatacttttgtcctaaatcaatttgtatccataacaatcaaagcatattcaaatctcacttttcagaattttaatttaaatttatgaataacaattatagatgatgccagtcaaaaattgcaaaattaaatcatagaaattacatatttttataagtttttatacaagctttctataaaaaaaaaatgtaattttattagaaagttattttatataaaaaaaaaattaaggagaattttatttgtacctcaaaaatttataagtgtaccatatttcaataatttttattttacataaaatatatatctttaattatatattagtttcttttttttaatttttttcttctagcttatattcttaaaaaagatacttatcaaacaaaaataaattatattatagatataataacaaaaaaattacacaaaattttatcaaaaaaataaaataaaaaaagtcatacattatttttaaaaaaaattatgaaaataaaattaaaataagtattgcaattaacacaaaattatgcttgaatttttttttaaaaaaaatattaagagtgattttaaaaattattttaa

SEQ ID NO: 266640 - DNA, 1152 bp, Cannabis indica
atatgtacgtacttgtaacaatatcgtagaaacaaaaattaaccaataacaacgtacgtacccgtgatttacattatgacgaacgcgagtgtcggagatgactgcctgccttcgtaaaattctattttgtaatatgtaggtacgttgaaatcgtatacaaactaacaaattaatcaaataaatatagagagcatgagccttgaatatctcgtgatactacatatacctgtcttattcactcactacaataaatgtaacaataaagtccaaaaactctatactaattgcactttgaattagcgagagatgtccgacaaatgcgatcatcattggtataataggatccctttttagtgtcactaactactgtcgtaacaaaaatttctttctccacactatctatctatatatataaccaaaatatatactcaaagcccccacttttgggtttcttgctctaggtttttccctcattttatatccaccttttacattgggattttcgcaaccaactcttactttttctctctttttattttctcttttaacactcagacaattaaactcctatataccccaactactagtccctactactttcatctaaccctttccaaatataagtttaaactagaactattattgcttacactcttttatttatatttgaaaccaagctgatcattcatcattaacattattgcttacactcgctatctcactctctctctctctctctatatatatatacgaataagacattattctactatatataaatattatagtacttatggatgccgccacagctgccgactctccaccattaaagctcttcgggttcaacatttccgacgacaaccatataaccctaccatcagatcatcacgtcgacacagataataataacaacaatactactagtctccaaccagtaaacgacgtcgttggacagcagaaatacgaatgccagtactgttttcgagagttcgccaattcccaagccttgggaggccaccaaaacgcacacaagaaagagagacagcttttgaagagagctcaaatgcatgccaataacaacacttccaccgttgctgcagccgccgccagaaactacgctcttgcggccgccatggctgcaaattattctca

SEQ ID NO: 266641 - DNA, 2499 bp, Cannabis indica
ccattgatatgatatccttgtttggtagcgtcattcaaggttgtaaaatgatgcttgcatctcttaataatgttgttgtgtcttttgtttaaacgatcagctaatgtagtggctcataagttttgctagagctgctagattatatcctgatcgtatttttagttttggagtctgttccaactgagttgctactttgtttggtagctgatgtgagggtttactttcaataaaagatgaaatttccattaaaaaaaaaaaaaaaaaaaaaatttaaaatttaagcttttttttttttaaaaaaaattaaaataagtaaataaaatgtttgaccctctatatcgatgtgacctagtgttacactaagttagcatttgaatatatataaatatatttcattaaaatggaacatattgattgacacaatcccaactttggtagtctgccctgttctcaaatctctctccagtgctcctaaagcagcagtagcaacaccatcgacgaccacaatggaaacaaccactggaatgccgaagaagccatagcaggcaacgcccaagctcttcaagctctcagagaactcatcaccttccctactctctattcacgccaagctcgaaaactcggtctcaaagttatatatatattcaatatatatatataatttattactacttttctttttcctattttggtttgacttttaatcttttctggttttgctttttcagtggcatcgaggtttaatcctctacggtccgcccggtactggaaaggtatattacttcaaccccttttactaaagcttgtgactttcttcatattcgatgtgcattttgaattgggattgttatggcataattgattgtgtttgatttcagacaagcttggtccgtgcagtggttcaagaatgtggcgcccatataattgttattaggtactgtgttcatctctagttggcaatggcttctaaggtttatgaattattaattgtaattttattattaaactggttctgtatacagtccacattctgttcacaaatctcatgctggggaaagtgaaaagtttttgagagaggcatttgctgaggcctcatctcatgcaaagtctggaaaaccatcagttatttttatagatgaaatagatgcactttgtcctcgtcgtgattctaggtatgacataactcacaatcatatcaaatgggttttaaggtttaaattttgatttaaaaactccattgcagaaaagagcaggatgttcgcatttcttcccaacttttgatattgatggactccaataagtcctcagtttcacacgttgttgtagttgcatcaactaacaggtaactaacaggttgctatatgataattgttgggctttgaagccaaatagcagttttatggttatttgatcttcatcttagtggttgttgttcaggtgaaaagattgtaaactttgatgcaatatgttagtgattgtggttataactcctctgtgttagtggttgttcatcttagtggttatttgatcttcatcttagtggttgtttaggtgaaaagattgtaaactttgatgcaatatgttagtgattatggttataaatcctctatatgttttgttgtttggcttgttgctgattaatgacaagcctatgatcaagtctcttttattgtagtgatgatagtgttcttgttaagcatgtaacattgctcaattacagtggaatcttgttctctctctctctttcttttgatattgaagctataatttttgtttctgtatgaaaagagtggatgccattgaccctgcattaagaaggtcaggacgatttgatgctgaaatagaagttacaacacctaatgaagaggagcgttttcaaattctcaaggtggaattcgtttgtttaagccatagtaaaattattgaactctctctctcgcgcacacacacacttttttaaagattctgaactgtgctaataattgtccagctctacactaagaagataccaatggagtctagcattgacttaaaagcaatagctgcatcttgcaatggctttgttggggctgatctagaagccttatgtcgtgaggctgcatggtctgctagtaaaaggtcctctgatgcaaatgaagatgatgtcaaatttcgattaacaatggaagactggaaccatgcaaggtctgtggttggtccaagcataacaagaggtgttaccgtggagatccctaatgtgacatgggaagatattggaggtttgaaagatttgaaggttagtaatttttcatgcctatttcattctgaattttcaaagttaaaaatcatactcaccacctttttcatggacagaaaaagctccaacaagctgttgaatggcctatcaaacattctaatgcatttacaaggtttggaatatcacctatgcgtggaattcttctgcatggtcccccaggatgttcaaaaacacgctcgctaaagctgcagcccatgctgccc

SEQ ID NO: 266642 - DNA, 1971 bp, Cannabis indica
tactagtatagtaattttgttttatttttttttttttttgaagtatttgtaattatttcatagttcaaaaaggaatttaaaaataataataatatttaaattttaaaaaatgaataaaattctttattttttcgttcggattatttgacccgggtcttaagctgttacacgtggcattgtacaaatccactggtttacgggttttgtcggaacgagtgaattgaaacggttttgaaatgatgtcgttttttaaggacaaggatgaaattgacatttcacaataaaataaatacaaaattaattaactaattagatattaatttcagaaataatatacaattaatacattttttttaaggatattaatttatttagaatagatttaaaacgaaatccagaacaatctttgtttgaagcttccgcaaatgacatcaaaataatatattccaagctctcaatgcatgactttaacaaaaatcaaagtaatttattagaatacgtcaaaaaaaaaagtaatttattagaaaaaaataaaataaataagccttagaaggttgaattcaaaataacttagagtatagtacagtttaactgtgcaattttgattactctaagtataattattgatttttttgaaatatatattcaatttattaattattgatttgtgtcttaaacttggggatttgaatttaatgataattgattcaataataactgcactgacagaaaaaatcatgccaaatcaaaataaagcttcgttaccatctgtcaatgacacaattaaattacccaaaaaaatatataaatatatatacaactatcataaataaattaaattataaatattaaatagactactttgatctgtttacaaaaaaaaaaaaatagactactttgatatcatttgtcttaaaatcaataaaatatttaaattaaaattaatttaatattttatgacaaatcagttcgaaattcaacattttcattcatttttttaaaatacacataattttgaaatatttattaaaatttgcaaaaggaattactgttttaaacttatttatcatatacaaaaagttaaaataatatttatcatacaataagatgctaaattgtagcactcatgtcttatttttggctatgaatatctacaattgtgtaattgtagttaacaaagatatatctaataataaaattgtaaaaatagggctcaaatatttttgagaaatgctaagagcaccacatttagaatgtcatatcaatgtgtattaagttttacataatttaatttaattactattacaaaataacgttaatcatttacaatacgccattttattatcatagcaatgattgtatgtgtaactattttatgtgaaacataatatttgaacattattaattttgtcaacttaaattatttacaacacatataatcatatatattaaaaaaaatctaactatttaaatattaaaaatacattatactaaacactaattaagataagtacatttataatttcagtatcatttttttacctacatttttaaaggtattttttattataagaatataaatcaaaagttaataatggtataaatttattaattttatttaagttaaaagggtttttatataataattttaagagtaacctttagataatttttgccttgggatatgttattcaagattgtaaattataaaataattctatttctcttgtcaaacgatcaacttgctcataaatttgtactagcatctatttcattccttgatcatattttcaattaagttgtgacagtcagtagtcctatgatccgtaagaagaaatacctggtaagctgtgcaatccccacatcgcttgggggaaggtcaaggtgggatgattctaagactgtgcatgtaatacccgggattaagaaaatgattagcaaaaccctaactagataaatatgagttaattg

SEQ ID NO: 266643 - DNA, 3031 bp, Cannabis indica
agaagattgtttgctgaaatgtgttgacttgaatagaacttttaagaactgcccattatcacatctttttattagtttaaagtctatgatgggttccttcactttcagtactacaatggttaaactcacttgttttgatttttttttttaaacaaataaagagggaagcatgataaaaaagaagcagctgttatgctttgttgaagtctttgagatgtcgaaatgatcttttttggcaaagtgttagacctgtgattgataaggcgatctcatttgcaaaacttactatggatcaaaggattctgctcaaaattcttcttgtaatctttctcataaaaatcttgttgcttgtgagaaagaggagcagtggactaaaccaagttatgctatgatcaaagttaacgtagatggagctctctttaatcaatcaaatagcttcgggtatgactttgttgctagagatcatggaagtactttcattgaagcttttcatgcttccaaaccaggtactatcaatccagagattgcagaggcagtatgaataaaggaacctctgagctggatgaaatcccatggatggtccaatgttatgacagaaactaattgtatcaatgtagtgcatgcaatagagagtaaagtccatatgattttgatattttaattcatgagtctaaattattgttatttgaattattaaatatttcttttcattttgttaagcgatctacgaataaaatagctaatttgttagcccagaagtcttatttaaaagctggttgttgtactattattattcattagtgttgtatactattttatggcacttacactataagtcccatgacattacagctgaacaatacaaggagtaccaaaaatgccattctccatttcttcatccactaaaatggaaaaactaaaagcaataaatattacagatcagtattagagctctacactaaaaaaaaaacaaaaactattttcttgaacaattagactaattaagaaactgttcttctcttctttgccatcaacatcaacttctcaatcttttctttttcttcaaccatattcttggcctcaagtgcttctctcaacctatcatacaagccgtcctgaggaagaaattcctttgaaatcatttccttaaagaaagcgcaagcatgttcaactctttcgctcttgcaaagcccgctaatcagaacagaatatattgaaacatcaatacttatgttgttgttatacatatggtttagcagaaagtaaatcaatttcatcctcttcttactgcagctcatctttaacaacgccgcgtaagtcttgaggtctggtttgaaacctatgtcctccattttctgaagcaacttcagagctttctcctcttgcaaatgatcacaataacaaaaaatcaaagtattgaaggtaacctcatctggcatagctcctttctttggcatatcattaaacacctcttctgcatctttcaaccttccagctttgccaaggatgaaaatcaaagagttgaaagaagaagtttcgggagcacaatcactctcgttcattctcttgtaaatctccaaagcttcattaatctgtttcgacttccctaaaagacacatcaaagtggtgtatgtagcaacagttggggtacaatctttgatcttcatttcattcagaataccattaagttttcgaaaatcctttttgtcacagtaaaatctagctaaacaagtgtaagaaagagcattgggttgacacccatgtctctccatttcctccataatcttcctagcaataccaaccttaccagctttacaccacccctgtattaaaatgttgaaagtttgtgtattcacaggtaatgaatccttaaactccaataaaacttgttgggcatgctcaacactatcactattaacaaatgaatccataagaatgttcaacattgaagtgtctttgcttatcccaaatctctcaattcccctaaaaacatccatggcttccttaaacatgttagctcttacaagcctcctaatgacctttgtcattgtgagaaacgaaatgtaaccatcccccaaactcttcatttcatcaatcaaatcccacaaaagctcgaacttcttagctttccccaatatatcaaccattaaattatatgattctggggaatgcttataatcagtttgagtttgtgcccagttgaaaaaatcaaaagccaagatccattcattgctgaatcgcattaagaagtgttgtactatactatctgataaagttaaaccacacctattaagatcttgagctacttcttcggttgaagagaataaccttttatggagaatctttctcacctgagttatgtcctgctgggtcgtctcgtaatcagattgctgttgaatttgtttgcggggttcaatctcaacagttgtctctgtcccttgcgagctaagtagaagaaggtaacgttgcaaagcaaatggattaggttttggaagggaaaagaccatggctttctgcaatttcgacatcatttcgtatcaaattcttcaaagtctaaatctttctctgtatttatgatccgttcaacattaaccactaagaattgaccaacaacaatcaatagagttcaattaaagatatccaacaaaatctcttgcaatgcatcgatgtcaataaatctgagtgaaagaggaattaagaaatggaagtaaatcttgaattgaagtgacctttgagggtaatttcagcatccggtggtgttgactgcggtgcggtgcggtggcagaccagcagcgtccattgtcgattgtccattgtcctcgccgcaatacgcaggctggtgttctgattttctttttgttttatgaattttctttaatctacacatacacatggatttcccatagtagaaattacaataaggaaaagtataagagattaattttgtatggcataaataattaatgcgatttatggagtttttcgttttttttttaatttatataggattttttttatgttatatttttgt

SEQ ID NO: 266644 - DNA, 4508 bp, Cannabis indica
gatgatgaggatgaatattatgctctctcttactactacttctacttctactcttgcttattagctacctctttcttcattctctctctctctctctctctctctctctctctctttctctctttgtcttctttactgctgcttttccttaaaagaagatttttaaaaaaactcgactagtactgccctggatctctctctctctttctcttaccctgctataatattccatgcgtttcattccatttcatccctttcttcttcaagtaaatacagtactcaaattaaaccaaatccaaattcccaataatccttattagttatacgatttggatctctctctctctcttattagttagtacaatttggtttattatttaaacaaaggttttaattatcaatttgagagggatatatatatatatatatgcagcacgaatagaaggaggtggtggcggtggcggtggaggagtgtcgttgatggaggatactactggaacaacaggtggtactgagtcggcgatggaagtacaagcaacaggtagtggaggagtagaagcggcgtctccaatcagcagccggccacctgcagcctcatctctgaatttagatgagtatatggccatgtcttctgggggaggcggaggaggtgggagcaagtgggggtggaaatcgatggcctaggcaagaaacattagctcttctcagaattaggtcagagatggacactgtgttccgtgatgccacactcaagggtccactatgggaagatgtctccaggtatatatatctatatcttaaatattattaataatctgaattcttcttcttcttcttctccaattctccattattaattaagaaagaaagatagaaaagagaattggttttgttttgttttgttttgtttggtttggttttgttttgtgtggtctaatcaaattaaatcattgatgatttgaattgatttgattcttgatttggttcattggttaatttgtgaggtagtagcagttgcatatagtattcgtagtgcacatgacatgccttcccttcccttctcttctcatcaatccctttccatcacgcttcacgagagagagagagtagttttagttttagttttgtttttgttttgtttactagttgcgcatctctcttttctttctcttttcattattttattttaagagaatatatagatagatatagagtaagtaggtaggtaataaggaaatcccagccattgtattttcaatagagaattagaaagcacgcatttcagtataagattagatattagagattagagtcgtcccagatccagatatagcatatgagtttgtatttgtgtattatctaataaaactcaatcgcctactactactactactacttctactatttcattcctcttgatctcttatttttaatcatcattaatgattaattattattttaattaaaagaaaaagaatcattcatcatctttatttatttgtttttgtgaaaattccaaatcccgagaggatttcttttcttctaaacctcaaaaatattattaaatataataatgagcgtctaaacacacgcgctctcttctctctttccctctcaattattattatttattgcctgcctacatgttttcgtatggagaatggagatggactcactcaccgcattaactatttgtctttaatattagaaatgtagtaaattctaataataatatgttaattgtacgattaagagaagagaaaaatgatttatatatatttacgtttagttttgttgacgttgtgtaagtactgtgcaggaagctagcagagttgggatacaagagaagtggcaaaaaatgcaaagaaaaattcgaaaacgttcacaaatactacaaacgaaccaaagaaggccgtgctggccgtcaagatggtaaaacctacaagttcttcaccgagctagaagctctccatgcctttaaccaacctcaccaccaaaccctccctcctcctcttccttctcaaccctctctcggcgttggtatcagtaacccaatgcccatttcctctttcagagctcctaacatcactatcactactcctccacctcctaattatcccacacacccaccaccgcaaccacaaccacaaccaccacaaccacaacaaccccagcatcagcagcagcccattacaacagctgcagctcctattcctgcactcagtttctcctccaacaccgcatcctcatcacatggctcggaagatgatgacgatgaagacgacaacgaagatgatgttttcgaattaggagagccttccacggctggtgtaggaattagcagcagccgcaaacgtaagagtagagattggtcaagcaggcacagtagtggtagtacgatggagttttttgagaacctaatgaaacaggttatgcaaaaacaagaggctatgcagcagagattcttggaggttattgagaaaagagaacaggacagaatgataagagatgaggcttggaagagacaagagatggctagactgagtcgtgaacatgagcttatggctcaagagcgaaccatttctgctacaagggatgctgctattatctcttttctacagaagattactgggcagacaatccacttgcctgatcctcctcctcctccaccacctctcaacacaataaccacttctactgctgcaacaaccactccaaatatcatcaatattcccaatgttactattcatcatcatgttccaattaccactacttctactgctccaccccaggcccctattactactgccattactactactactactactgtacctcctcctgctgctgctgctgctgctgctgcaccatctcctccagctgtgatgatcccacctgttgttgtaacacagcagcaaccacaacagcagcaactagtgattagccaatcgccacacgcagctcatgatcaacaggatgggggaagtacaacaccttcttcatcaagatggcctaaggcagaagttctagcgcttataaagttgagaagtgggttggaattcaagtatcaagaggcaggccccaagggacctctttgggaagatatttctggagagatgactcggatgggatacaagaggagtgcaaagagatgcaaagagaaatgggagaacatcaataagtatttcaagaaagtgaaagagagcaacaaacaaagacctgaggatgccaaaacttgtccatactttcacgaactggatgccctttaccgcaacaaggttattgggactagcatggttacaccacaacagcatcatcatcagcagcagcagccgccaaaaccacctacacctgctgctccacctgcacctgcacctgcacctgcacttgcagcaccaccacccaatattaatgtaccagctgaaatcaaaacctctggcccggctgcacctaccagtaccaccttccaacaacagccaaccgataaggtaataataattaattatacttaatcccatattaatttttaattatatatgtagaaattaagaaattatttgctgataattgttttgtatatgaagccagaagacattgtgatggagttgatgaaagtacatgaacaggagaaatgtggtggtggtggtggtggaggaacaaaagctgtagtactgcccaagcaacaacagttattagtgaatgattatgatcatgatagggcgcttgaggaactggtagagagtactgaggatgatgatcatgatgaagaagatgaattagatgattatgatgaagaagaagacattattgatgaagatgatgagggcggtcaagtaattgttgatcagaggaaaatgggtaattataaaatgcaactccaccaccatcatcagcatcagcagagacaacatagtgcagtagtggcatcatccaataatggtaatgctactgctactgctactactactccaaatgacacaccaccttccttcttggccatccccatggttcaatgactactactactactactactatatcaattcatcatcatcatctacctatacctggctacctacctagctaaaactatatatgtgtatatctatcatgagaaaattctaacacacccacatatatatatatatatatatacatatcatcatcatcttgaaattaattcaccatatgccgccatttctcataacgtacgtagtagctatattggatggatggatggatattctcatcaaaattcatgattctttttctatatatacctttggaactactttgtacgtagtacctcttctttctcatctcttctcctgttccatcctatatatacatagctttctacaatttttgtttttgttccttatcagctctatatagctagctagctagctagctctgagtataatgatgatgatgatgatgatgagatacgtacgtagacgtacgtacgtacagcggtgaaattataaggtgtagagagagagagagag

SEQ ID NO: 266645 - DNA, 2444 bp, Cannabis indica
aaaataatttccaacacatttttctcagcgaaatttgcgaccaccatcaatcagagaagtgagtgctagtggtgaaattaacaattctatggttatccgtactgaatccttccctgattgtcatgaattaaattcatttctcaaattcttaagggtgaagttacttagatttgatggagctaatgtagatgattggatctataatatcaacacgatttttaatttttattgtgttaatcacgcaatgcgattggtagttattccatttcatttggatggtgcttcttcctttcgatttcaatggatgaaaaagagtgggggaattatagattgggagtcattcctcaaggcattgtagtagcattttggtagttctatctatgataatccatttggacgtatttctaagcttactcaaaccgccagggtcaccgactattgagctgagtttgattccttctaagcctagagttttaggcatggttgaatcgatattttgatttttttttttgggaatgaagcttgatatttggagggcatcattgatgttcaagccaattgacttagtcgatgcaatggccgaagctcaatttgttgaggatcgccatgatgatttgagtaatttaggaagaattgaagggggtcacactacctagtcatctcactctggaggtattagtcgtatttcaatcaatttaccacagtcacctagcaagcaattaacatcacctatggcaagcacaacaaaattctctcctacatgtacttactctttatcaatcaagcaattaatgtccatggatatgaaagaaaagcaagacaaggggctttgttttacatgcgatgaagaattcagttatggacacaagtgtaagaataatgtgttgttgttttatggttatgaggatgtggatgattactctatcaaggaatcaagtttcaagaaggtgaggagattactaaagattagtttagtctcaattcattatctaattcgattaatccactcattttttgaattatggcaaaacccgacaataaaaccttagaagttctgattgatacgggaattaataataactttatacttgagtcatttgcatcaaagttgaatgcacctttggaggaaacaaagtgttttaaggtattcataagaaatcgtaattttcatttatactctaagctttgtaaggtttttgatctactgttgcaaggtcatcagtttgaggttgatttatatgtgttatccttatgtggtctagatgtggtgtttgggatgcaatggctacagacgttgggatcgtgtgttcatgaccataaaactcttactatggatcttacatgaaaaagaagcttggtgaagttgtctggatcaattgattatttactaaataactttcatatatatttagttatgttatccgtgtttttgaataaaagacacgtggcaagaggcagaaggcgacaaactaagtaactaccaattaagtcaatttaattgaagaaagttgcaaaaagactaaacaaactcgggagaggtccaaattctgttaagctaggagatgcaatcaaaggcaatataccatttgagacccagaagtcctgtcatccctttgggacctggagaaggttgcatcaactatccttgcagggagacacttggaagccttacaaagagtctaaaatggatggcaaatatacatggaaaatcagaggactgtcacaaagctagagtcggatggctcttgtgacagtaatacttttttcacacaggatcagatcttgtcccatgcgtcagaccatggtagagcgcgtacctcctctgaatacacctttttgtctgaagactcctatgagggttttgtctactaggtgtagcttccacacgacctgcatccagcaccaatagtggtcccaactgtacgaacccttcacccacgaggaagagccttgttaggggcccaatagtctgtattcttttgtattttaccccaatcgtgggtggtctttttacaaaaaaccctagacaggtcatgggtatgcccatactcgtactttaacctttataaacccctttataatttcttcacaaggggggatgatataaattacttagctaaagctttgctaaaatactctctatgctttcttcttcttcaagagaaacctagacaaccagagtttgggtttttattataaacaccatctataatacatttttatgtcatcaaggctaatatattgactcgtggactagggataattaacgcctaaactacataaaatccttcatgtcatttacttaatagtcatttaatttttaaagctttcatttaattattttttaaaaatctcaataaatattttggtgctttcattgagagctaaggaaagatctaagccatggtgtgttgggttttatgccctaaataaaactctgtttc

SEQ ID NO: 266646 - DNA, 2845 bp, Cannabis indica
ttacaatttacaaatattgagtacttatgctaataaaaataaatattaaatttatgttacttataaatttaaaactttaaatatttatatctctatttaacctcctcctactctgattttattgtaccatattttagggctttattgtgtctttattattacataacacaaatatcagaaacaacagatttcattaccctgatgttacatacagctgtgtattagaaataacagaatatcattattcagtaccctaaatctgttcaggagttatttgtctttcttattttacttctaaggttttgctattaaaaaacctttctttaaagaacaacacttgtaatttgtagacgcgagagttttacaaaacgcaaagtgcatgaaaaattctggtaagtcataatatattcatttatatatatacatagcacaaatagaaaaatggcagttaagtacagtaacaagcttacacaaactaaattgaaaacaatttagctcctattccagttttacctctatatataaaaacaaataaacaaattccagctctcataagctactaaactttcctaatattgtttcaagaagaagaaccgccatgacgaaaatggagaacagagcgataaatggcagcaacatgaaagaagaaaataagtataatgatgagatcatccaacagaccaactatacccagtatgcctacaagatcagccaaaacaagtcaaacagaatattaatatataggtcaaccataccatgaaatattgcgcgcttaccttctggaatgatatcaaccggactgagtacgtaaacaccgctcattgccatctgtacacagtaagaaattaagaaatgatatgcagcccacaaactaccaaaaatatatgttgaagaaaagatacctatattcaaacattatagttaatatacatgtactgttagcttgatctttagtaaaagaaaaataacaatgttcgcttcatactacagagagaaagaaacattccatcaatctagaatttgggattttagattctgttaaaagtatcatgacctggataaagtatctcattgtccttatggatggaatcatggtgataccatttaacttatatttgcttattgttgcttgactaatgcctgctttgttttacaatgtgcagggaagacatagtgtcaagagtctgatataatgggctggcaagaatcttagctcaaagttttgggtattcttagaacaatatgtttctatggaagctctccaaatgtaccaaagttcggactaggagtgacatactgtaagaaatactaattccctttccctttgctaataaacagtcttatatgtgtacttctatttctaccaagaaataaaagcaccaaataaaattttattggttcaataccgttttctacaattcatttgttcattgttaaaggtcctctacaaagccaagcaaatagtttaaccttatttcttacaagtgctttgagtctctttatagattctacagtagcaataccaggtattgctcaatcttttgggtgtcttcccactagaattaatgtaacataacaatgcgacagtaattaatactaagatgaaagtcataatcattgattataacgaacatccaaacacattttttgaattcaatgtagaccatgttaagtgatttccctagaaaagctaaatatataggatgatagaacccgaggaaaagttaatacaattgcatttgatgcggtgctatctgaaaaacatggactaagctaataaatagatcattaggcaatgaagaaaactttgaagtttgatgatagtatttttaatgatgatgactaattatgaaagaattaagacaccaacgatgtcaataacatgtgtatgcatgtaaagctaaatgcaaaatgaaagaactttagacagcagttagttgcgtcattatcttaactgcaatgtagatacgtgcccttatgacaagggggagagatcgctgaggatccattagttctcgtaacaacctccgtaaaaagaaaggaaggtcttgaagtctctgcagtagagaaaacccacaattctgatattaaaatgttgaaggtgcttgaagacaatcccaaaatagacatgaaacaaattagtctagactcaaagtgaaagaaaatggtctcctttggacagcagataaatgcaaagaactacttgctttcacatagtaatatcgctatttatggaacatagttagcacaatcacctgaaaaagaccaagagtacgcccagcaaaatatcgattgtatctttcaatctttcccagaacctcctcagcatcattttcgtggcgttgtcttaatgaagcctcacttggaaccaacaatgtaatttcacgtcgacaaagaggacatttacacggctgtaatgctgatccatgatgccaaacaagcataatacaacctcctgatgataaaaaggaaactataagtaactagtaaaagtatatttgtctcatgatacaaggaaggtataaaactctaaaattccatcccccaaaatctttagatactacatctaaccctttcgtttaaaacaacatattgcatgtattatatattagtaccctatcttttctttgaaaatacatttggtaacgttttcaataatacttatttggtaccttatattttgaaattgtaaatatttggtacctttaaagtaaaatttaatcaatataattttttaatttgattaaacggttctcaattatatgtaattaaataattaaatttaaattcaaaatttataaaattgaagacagtttgactgcattgataaaatttatcaaaaaat

SEQ ID NO: 266647 - DNA, 3296 bp, Cannabis indica
gattgtcatgattcatgtctccatattcagcatgaaactaattacataggtttttttttgttcataacaattgtaatgattattagttttgtaactcatgttgaattgtttattcttttcccgtcaaaaaaaaaaaccaccgtactttttttttttatatatgaacgggtgagagtgatatagagatcaggcgctgagatttttctaatgtgcgccgttatttacaatataaaaggaatgaagttgaattggattaaggagccacgccttgcttatatgtacgtaatttatataattacttgttagcgcatgttagcagtgttttaaggcgggattggtggcggtcaatgccacagtcaaacgttttcgagttagtttagttctctaccatgcaagtcccacgaagcactttaatcgtttaaaatgaccgtagtgcccatgattatagcaactttagttaggtgtctacgggggcaaaagagtaatattttagtacatagttaatttcgtttcagccttgtcttaataaagatgttcaagttatacaaactttttgggtcaacactgttatatattaatacatagtttttttttgtgggattttttttaaattatgtatttattttttaaaattttgtcatcttttaaaaggttcacaataattaaaagatgaaataaaataataaaaggtagataattaattaatgggtaaattgcactaattctggtacaacgttggctatattgggaatgtttcattcatatatttccttgtgtgttctaattttcatatatctaccttttctataattagtgagtatgtaccactatatatacgtagggggcagcatatatatatacatattctatttagttttttttttcattaaaattaacaaactttttatttatcatataaaattgggagatcaatttgcatcgtattgtaaaatatatctataaaatatatataatataacatcgctagatctccaccacatgtcatatttttgttcatgtagggagtgtaggcaacacttggcacatatatttaataataataataattcttttaatagtattggcatttatgcaaattgtagttatgatatatttatacacaaccccccactcaaatcaaatttcattagagggattcgctttttttggtcactttctcatttttctaattgaagccatgtgtatcagtttttttattatcaattcttcaaaactttcacttttttatttgttaactttttccttttccacaagagtgaaacaaaaagtttgtgcttaataaagttctatatatattaataccataagcggtcttcattcattaattaagaggtagctgaaatagttccaccaaaaaaaaagcactcataatcatatggtataatgcctctactcacatgtgtaaacaatatatacaagcacatgatttgaacatttattttcctttttttctcaaaatggttctctctcgtgatttgattcttcctttacatttctttggtcagtattcttggtcatcctagtttttcatagatggtagtcctcttttattttttttttggtcactttcagttgagtttatttaagactagagcatatataattgtgtggctttaagtgtagaacaaaaaagattgtcaattgtttcaattttctgttctggattctgaaaatgggttttttagataagatttgtgtgaaggataaggatctcgtgtcttactttcttgctttttcgtgaacaaatatagaagatttaccaatagttggaatctggttctgaaatacctattttaaaaagctattaaaaaagaagcttgtgatccttttgtactattctctcaactgtctaagtttcaaccgtttttaactgtcacattttagcatcattggacatattgttagatgaaatacactacaaaatatatatttttaatataattatgataacacctgcaggtagatatagctggatttttctttttgaatccaaaaatgggatatcaacaaaacccggaatccatgtgtaaatcaaaattcgatgatgttggtgagactattttaggctcttatacatcatggctggtaaatacactcttttttttttgttgaaccgtgcattttttttagcatattatttggtgaatatttaagcttgaagattttgtctaatttttctcaggccaaacatccatctgctttggaaaattttgatgagatgatgagcaaggctaagggaaaagttattgtagtatttttggactatgatggaactctctccccaattgtaaaggaacctgatcaagctttcatgtcagaagctgtatggaaaagcctttttactctgttctttgagaaaaacaaattgatatattattctaaattttcatgttcaaatgtgcagatgcgttcagcagtacatgaagtttctctatgttttcctactgcaatcgtttcaggaaggcgtcgagataaggtgattttatacattacattatacattaaaatatcatcaagaaataaaaggaaaaattaaaaatactaataatgttgttaatatttttatataaatacaggtgtttgaatttgttcaattggagaatgtttactatgctggaagtcatgggatggatatttcaaccccatcagcctccaaaatgtgtagtgatcacaaatgtcaaactagaacaactgatgaaaaggttattaattagttagtgttcttagaagtacttcttctgatttttcttttctatatttgtgactttcttttttctacaggggaatgaagttgttcactttcgaccagctcaagagtttcttccaaagattgaagaggtagctagatactgacttcacttcctgcacttatagctttaacttgatgtatatatatttataaaacataaatatttgtaacgtgtttttgttcagatactaaaggctctgaaagacaagacaaaaggcataaaaggagccattgttgaagacaacaagttctgcatctctgttcactttcgacaagtaataaatgatgaggttagatatattataacataaattaaatttaatacaataaaaacattatgtgcataaattgttaattgtctaattataatgtaggatgttcgtatacttaaaaagagagtggaaaagttgatagaaggttaccccaagttcagaatttcttcagggaaaaaggtatgttaatagcttacataaaactttgtgtccttatcctttgatacttgtatggtatcaacttgttttgaact

SEQ ID NO: 266648 - DNA, 1597 bp, Cannabis indica
cgaggatccatgaacgacgtaggtcaaacgctatctgataccatgtaaaacaagtaaacttatctatgcaattctaggaggacacaattagagaattgaatcacaagactttgcaaaagtttcaagtcttgaaaaatgaattggtatttataagaggatgatttacagagtttgttacaaggagaaggaaagaaaacagttaaagaaatctgtaacgattacaaccaactaattaacagtatataacaaacaaatcctaactgcctgtaactaactctaaaggttgtttatcaatgtataataacatttaggaatttgagatttgaagagtctttaggaaaaacaacaatataatggattgtaatgaaatgtttgatcaaatcatagagatcaagtgcctttatttataatgaaagatgatacaaacactaagctgtcacaaccaagaaagactctaaaaatttaactacaaatagactagtcataactacatttaactaactgtacaattaagaggttagttattataccgtcgaatgaaagggagtagcaacgacattgagtttattggtcttttaagtatattgaaataaacggtcaactggtagagcctttgtgagttaatcgacaacttgattaattgaaggcacataacatacatatgggtggccaaaattttatcacaaacaaattgcatttatgaattttgatatgtttacaacgagcgcatggaagagagggttgctactgctgcaggcccttggtcatcaacccacaaaattggaggctcagctaaacgtagttcaccgagtaaggacacaagccatttaagttctcatgatgcatttgctaaggcttaaaattcactctctatgctagagtgtgcaacaacaatttttttgcagaccacggcaccgaatttcctcctaaaaacatgaattgggactggacccagacctcggacccgggtcccaaacttgaaacctaaacccgaacctaaagttgggggtctgggttttggttttacttcaggtacaggtctcggctcgggtctggggtctggggtccaagtcccagttcggatctgaagtccaagtcccgattcaagtctggggttcaagtcactgtccatgtttaggtctaggtccaggttccaagttcaggtccaagtttgggtttgggtctcggtttggatttggtttaggttttaggtttgggtttgagatctagggtccgagttaagggtccaggatctagggtttggggttgagttcggctctgaagtcagggacttgggtctgggtttggggtctgagtctgggtccgtgttcggggttccggtccaggtcagggttttgggtccgggtctgagttcgagcttggggtctaggtcccattttgggtctggtgcatgttctaggtccgggtccaggtttgggtctggggttgatgtcacccacactacaagaataacagtcaatagcggcgggagtattagcggcgaagctattccgccgctaataatggcagtattagcggcgcaccccggtatccgccgctattggtaggctgaaatttaaattttttgaaaaattta

SEQ ID NO: 266649 - DNA, 2700 bp, Cannabis indica
aagggactcagcagcaacctgatgatgattggcagcagcagcaacttgcgcccttgctaagataacaatcttggacttttctgggaacttcccagcaaactgccccaagatttcttcagctttcacagctttattttctctaacaagaacagcagcctggagtagcaccggcgttacagaatgaggaaacatctctgaaattgtagcaacgagctctcgagcctaaaattttttattgccaaagtgtcagtaagataaacaagagcagacaatatatactagaaatggtaagctatctatgatgaacaagcagtccaacctgatcaagccgatttgcatgaagaagtaaaagaatccgatttgcatataatgcttccctttgcttcggtgacagctttaaatcaagaccacgggcaagctgaaagttttgtatatccttctcttttagcctatcaaatttccttagaccatcagaaacatcttttggacctcttactgcaattaggttgttcacagcaactgcaagtgatgactcatctgctagacctcgtttaaatatgtctgtgtatgcttcagcagcctcttgtctattcccaaggagctaataaagtgtacaaaacaagaattaaatctaaaggtatttgtattctcacactcaacaaggtgagagataaagaaactgattaatgccaaaacatcatctcaattctcaagagcacatgtattccagatctgtccgttttttttttttgaaagctatgacaaatatcattgataatcaaataatgtcatccagcagatctgtccgtgtttttgtttctgaagaaaagtaataaaataaaacaaaactcttgctgactccagtgttacaaaattacctgtttaacataggccaactgaacagctattggtgccaactcaatttctatctcatcatcaggcaagttgtcctccattaatgtttcttggccaattctaacaaaaggcaaggaaattacttttcatgagtttatttcaacattttcatactgcaaaagttgtttgggtaattatgaatgtgataagaaaataacagttataatacaacttcaaaagatgaggaaaaaagaaaacttggtagaaatcatcttactacataagtagaatatagcttgtttgcatcaatttaagaaattaccttctggctgacaacaggaggtgttcagcatctgcatacttgtttctgtcaattagtgagcaagcagtgttaaatgccaattcaaaggtgctagttgctttaaccctcagtgcctccaacattccttgtacttctgaagcccttccagcagcaaccaaactagccacagaattgatctccaaggaatcaatcttggacttctgaagcttctgatagatctcaatacagtcatccaatttttctaaacggtatagtatctgagattctaaaagcatggttgcagaatctctctcttgatttttcagagagctcaaagcttcatctaacttgttttgtctgtacaagcagtatgcctattggggataaaaggagtataacatcaagagagtagtcatttgagtttacataatggtgatcatttgatcaaaatgcactaatggttcaaatgagaagaggaaaagtacttaatcaagtttaaaagaaaagcaaaatttataaaatatatgacaacaaacttcaatccaagctaacaaaattatcagcaaagtgacagtgccaattcaaacaaaacttactttctatcattttattttgttatacattcaagttatcagaagcatgcatatcaatcagtcaattctgagctatctaacagagaacaaacacaggttttggttgtttaattaatcagtataaaaggattgtcattgtcactaaaatgctccaaatacataattgatgaataccataacacaatctacttcaaatgcatgattataacattacatatttacacacaggtcgctaaaaacaaacaaaagggttcaaattaaaaaccaaccttgaagaagttgaaatcgacaggtgatttcttgtaagtctcaatggcggaaagagccccgtctatattatcagccttgatcaaacccacaaccttacatcgaatcgcgtcttcgtctccaggggaaattgacagaactgtcaaggagaaaaagaaacaaaataattcaaactaaaaattcagaaaattaaaatggataagaagatgcaagtagaaaataaagtttcgaccttgatctgcgactttgatagcttgttcaaattcggatctctgaatgtgcttgttaagagaagtaaagagatcttcaataggaggtggcggctgcgatgccgcctgtgggggtttcgttctgtctttaggcttcggagccatggctttgtttcacactttctcggtttccaaacagaagcgagaaaatccaactccaggaatataaggtagatttcagtcgtcccgtctgcactgtatttggtatccgctatggtagtcgggtcatcgggtcaaccgtgtacccatactatttgggccaaatatatattgggccttactagtagaggatcccggcccaccaactgtagactactgcatatttttgtttggggattttttttaaaggaaatttacaaaaaaatctaaaatttgggttaatttttacaaatatactgttacacggatttttttt

SEQ ID NO: 266650 - DNA, 3681 bp, Cannabis indica
aacaattttcatatcctaaacaaatcttaaatatttgtaaatacacaccctttttcgctgtaccagcacaacgccaaataagtaagacacaaggccaaatagtctcttatgaaacagaaatgttctatagtctcttatgaaagttacctgtaggactaaggccagaagatggtgaatcaccaggagacagagctgggccaaacgaagctggagctgccattgatggtaataaataaataacaatcaatatagaaagttacatatctgaagacaaaatgaaagtgaaaaagtttgagctgaaaaaaagggtacctggagcaggaattggagcagcagttgctgtaaatacaagaaagaccaatttcactcgttagttttacacatattgaattgaacaaatggagtaaataataagttagagatatgaatttcatgtgattgacctttgcattggacagggacaccagccatgttacaagctcgggggagggatatggctagagaacggttgatggggacttggaaaggaacacttccagtaacaatgaggcacaagcagtccatgcctgagctggtgagggtcttcaaggcgttgcagcagtctgaggttggggaagttccagcagaactgctattagtcacgaagttcatgcaaggtgtgaagctagagatcattgaagcattgcagggtgtgctgacttggccgaaaaccggtgtgatcaagactgcaaagatggccagcgctgccactagtaaccgtggtagatggactagagactccatgtgaatctggtttggctttttgtttttgagttgagaaggatgatatagtactatagtaagttttgagtgttttaagactgaagtgattgtgtattgtgtttggaagaaggataggatgaaaggggtattttataggagtaattggtggaatgagattggcttgagtaggttttggagctgataaactaccttaacaaacttttatggtaaaaagggtattttttttttgaagtaggtggagatgacatctatggaccccatatttgacttgggtttttgctgacctggtgagttttgatatgttctaaagtgatgttgtgtcactttgtggctggtcaagagctcatgtcggtacccttaataattcatcaacctaagccgagggctcaaagtcttgggggttgatataaaggtacatgtatgtaagtgatccaaaaacacagaactagttttgttgttcttaactaattataatttatatcaataattacgcactagaagatccttattgcggctgtggcactgttgtatagccatgtaatcacttaaggctgcgaactgagaatagatgacatgtgtttgaagtttggttatctgaaaatcatacttggcatttctcattgagattcatccttaaaacgtatgcaaatcaagatattggcaatattaattgaccatgattatttttcccaccttcaaaaattggcacgttccaacttacaacatcatatgatatccatatattaagggctactattctagtttaccaatgtttgaaactaaaaataaattatattagtaaatttctcttatataaacaagttcacttaacacactattgtcaccagtacttctagccaaatagaactttaattggtattgaagttctaaggcaaaatgatttccaaagtgactaacatggctcttgtagtgctggtcctagtgaccatgctttgggcaaggacaatggctcaacagagctgcaccaatgtgctgattagcatggctccttgcctgaactatgtcactggtagctcgtcgaccccatcgtcttcttgctgctcgcaactcgctagcgttgtccagaaacagcctcggtgcctctgcatggcgctcaatggcggtggggcctcattgggtgttaacatcaaccagacactagctcttgcactccctgctgcttgcaatgtggaaactccccccgttagtaaatgtaatggtaaattttaaaacttgatcaactcaaagttattactactactactagagcttgtaataacttaaaatttgtgctattggaacaggtggaacactggctcctattggttcccctgatggttcaccaggtaacacttaaaatttggactagttaattatacgaatcatgaatgggtgcatgctatttaacaacttacgtcaacagtatgtttcgtctataactgatctttattagctcaagttgttatgtagtttcaaatcagtcttaattatgtacctaaaaaacggttattttaacttgtacagttcaaccaaattagtagcggagccagaaatttaaactaaatgagaaaaacaaaaaatacaaatactgaaatgggacaaatttataatatgttgcctacacttgagcggatgtggactgaagaatgaattgtagtgattgaatattatttgttttttctaccttcagtctttcatctaacagtaacttgcatgtttttgatcgattgtttttcgtacatagatggaatagtgtatgcaactccatagtcatagataattttaattttttactatggtgaataaaattgtacagaggtattgttgtgtcttattaataatatataatggtcccaaaagaatttgtcatgagttattagctatacctatgaacaataacatattttcaattcacttttaggcaataggagaaagagtgagtcccccaaaaataaaacaaaaggagtgactgtagtacataatcacctcttaattcttattatcttgacttagtgtatcttgaagacatggtcaaactgagtactaatcccataatgcaaaatcattcagtcatgtaattttctattattacgaaataattttttttgggtgatttttgttactttaggtttgatctaaaagagattgatacatgtttacaattagtattttatatttcgaaactgtattaacttgtcctcatgaattttaaagtaaaatttaattatttaattatatattactaaaaaaagttttatgtactaaatatgtttttcgagtaaatgcaaatgagtatatatacataaataaatattgacacacatgcattactaataatttagaagagactggttagaatttgtactaaatacataggtatgaacaatagtcatgaaaatagatatggtatttttatctctcttttacaatggtattttgaatagggtgtcagagtatatttagatatatatattatgtaaaatgtaaaatcatatctccatttatcaagaaaaaaaaaagtcaatttcgccagtaatgtgtattttaatagaattatttaacaggtacatcagaaatgagtggggggagctcttcgagtgaaatgaagcttagtcttaattttactcttctagtggtgcttatagcaacctatgcttcttctacttacagcagcagcagcagcttctgatgagaattagttggatcttggaattgtactactgtgtgtgtggtgtggcctatcctattactttattttctactttaaattatatgttgtcatctggatctacttatatctaagtattggtcttgtttaatttctgttttgtgtgagataggtttctttaattaatgtactcaaatattctcactagagatatacgtatcaatgtaatc

SEQ ID NO: 266651 - DNA, 2776 bp, Cannabis indica
acccggtgtttccccttacggatcacgggactactgactgtcatagttgctactgtaactgaaatcagctggatcaactcattgctttctgaactgcatcaaacgctctctgctactcccctagtgtggtgtgataatttgagtgcatttcatcgcactgctaatcctgtcctacatactcgcactaaacacattgaaatagatattcattacgttcggggcaaggtcatgaacaaggaaatatgagtccatcatgttcctgttgaaggccaacttgcagatctccttactaaacctatttctagttctaggttccctagtttaagagacaaactcgcggtgtggtcttttctaccaccataagtttgaagggaattgttaatggtacctagtttattataggtttagttagttaacagttacaaattgttagctttttctgttttggttttcagttagtgtcaactaattttctattagtgttagttcttgatgagtttttaaggtcactcaaagtgtatatttacttgtgtatttcctttcttaaataataatgaaaacacagtgcattcttttactttgttcttcagcttttgacattaacacttagatctattatataataacaagagtaatttaataacacttcgacattcttacaaaaaataataataataaataaagtaacacttcgatatcttgttctttaaaaaaaaaattaaaaaagaacactttcaaatgaaacatctttcaatcagatataatataatgtaactcttatttaatttctttgcaaatctcacttagtatttgagatattttgtaagaatcccacaatcgaaaactgaaatgatcaagtaacgtggcctctcatcttaggaaaagactatattaaccttggtttcctggtgctgtcaacaagtatgaaccattgggttgaagggtcacacgaatgtttacccctcaagcatttacaagtgtttgtgatgatatttttggaagaatcgacctctaggcaaacactatcaccgctgctcgtcttagtagagagttgcaacctagaatccgaggtgggttcccatcttgaatcagaatcagtgcactgtatactaagttgtgtctgtttgcctaattcaactgcttgtaagcaaaatgccccttttattgtcaatttcttctcatgtgaatggtaccaataatcagaggcagagcaagggcctagtgttagtggttcaagcaaagatttcttcacaacacatagccctgttgctggatggaatataactttgtgttttctaacttctgataaacctggacctgcatgcaatgcaaatttcatcattaattgattcaattaattaacattgctaggggtcaagagtcgtggtacataattaccttgaaaaggatattgtatagaagagatcttctgtacgagacttgaatttcgagcaccgctccaatcatcattcaagactccataatactcgctcatcccaacaacgccttctctgtaatagtaactcccaacgactgtccattgaccccagtcgaagtcgagttgagctgctgtggctaagaagcaattcaggtacctattgtcattctcattgatacccctttggtctacaccaaactcactcacgaatataggaaacccttgatccaacaagaacaatgatattcccttcatgttttggacaacagttttacacacttggttcacattaccactttcccatgccttcccatcgaagaatgcgtaccaatgaacttcaaatacaagttttccagaaaacgtgagcttaacctggcgattttgcaggaacgaaaaatcatgatcataacccaaaccggagagaatcactagaagatctggatttgccgagtgaactgcttcagctcctttttgcatgtacctacacacacacatatatatatatatattacgaagcaaaatataagtaatgagttttgttgatggaaataaattaatgcaagtgatcatgtacgtacttgaaccaatcatctacgttctgcttggggccacggagctcgttcctcaagcttatcccgacaacattgctgacacctttgaacaatatggccatacgagtaaggcccttaatccagacgttagggtcgaagtatatgtccccaaaaaatccattcccatctgaatcactgcaacaccaactgggtttgcttacgtgattatccaaaatcaccataacattcttgtctccaagagcagataccacagcctgaaaaacacttgtcaattaagcaagcagctggtgcaatataaaaatttaatatgtgaccgtagtatattatcaccttgaaagcttcaaacagtgaagaatcgattatggaggggttattggcctctaccccagcaatggcttgggtgaggccaagacttttgaaggagtctcggacggttagggaggcaagagcgtcgttggtgaccaagtaggtaggccaattgagatgaacgcagttataacccaatgatgagatttgggctgcgattgcttcgatgggctgcttgctaaggccttcgggcaccaccgcatcaagatgagaagcccaattcacgcaagctagcttcactctgtgcccgctttcgttcacaatccatctcgattttgtactcaatgtcaaagccctggctggcccagtgtggagcgaaatgacgattgtgacaatcaataatactaaagctgacacaaattgagaagggcttcccattttctctttctttctttctttt

SEQ ID NO: 266652 - DNA, 5707 bp, Cannabis indica
tggtatttacccttttttttaataatgggagtatttataattttgtagggtgcaaataaaactcccttagactttaaaaaaaagggtaaaaataaaagaggataatataaaaagagtataaagtgtaattttctcgtaaaaaaattgccaaaccacctaattctagccatgtgcagccctaagtaatactgagatattgattaaaaatgaaataagaatgaaaaatccatattagaattgttagagatgaactttcgtttttaaaggatttggtttggataaattttggttgtaaaaaaaagttgtaaattattattattattatctcaaaagaaaaagaaattgttgtggaaattgtaaataattaataagaaattgttatggtgtaagttttttatatttttatatttaaagatttttttttattatttagttttatgttttataaaaataaccaaaaaataacataaaaacaacaaaaaaataacataaaaaaaacaatacaaataaaaataaaaaataaaaatataatataaaaatacatttataaaaatataatattttctataaataaaattataaaaatatatataaaaatatttaaaattccatacaactattttataatgtttgttttgtattttagtgtatttgtaacataatcctacaaacaatccaagtaaaagaaagcccaaatcggcccattaattttaccagctacgggcccaatacagctctaaagatcgaactctgtggaaagaagcagagaactgtggagaaaagagtttcagtttcgggaacgaacaatccatagccatgtctagggaagcttacgcgtcacgaaacccaaatgagatccacacagacgttctctctgaagccaggaaagcttgctataaggtaatttatatcttcaattttgctgccatttctgtgtattgtgttgtttttgctcttttgcttttgggttaaaaagtgcgtttcgcaaggctcgggactccttctacgcgtgtttggaggaggaatcggagaagaagcccactgaaatagcctcggcaggtctcttgtacccatcagaatgcaaagctacgagagcagcgtttgtaaaactatgccgctcttcttgggtaagaattatcacaaaacccaattttttaaaatctcgtttttggatttgaattcagggtgtttgattactgggtttttgtttttgtttttggtaggtgaatcattttgatagactgtactgtaagaacaaaagggttaatcggcttttggatgatagagaaacgaggagaggtccgttggttcttccacaaccttatactttcaagccccctactaataatactagctgatcatttctatggaatattttgaccatctgagtcagctaaaaatgctgttacttattagctttcaaatcaactttaggctctatgactatactgaggattatatacatgtcttgtagttcatataaatgatcaataaccacatatatacaagaagaagaatgaataaagaaggtggtttttgtttttggtatacaattttgatataatgttagaataaataggagttttacctgaactatgatacttgtagggcttggttcctaaattatccttcggttgcatttcgttcatttctgcaaacaatgttatggatttaacgatgaaatatgggaatgtgtatccataattttagtattaatgtttgaatatttaagaccatcatactcggtttcagctggtttaagttagttaaatagtctctcgtattgtcgttatgtgcgtggcttgtggccacaacagtaaattatctcaaaaaaatgagggaaatgcaattgaaggagaaaaatttgctatcatttccataagtctagggagagtttttacaaaataataattcagggtgcaagtgtcctagtgtacagggtaaatagccagtttattctaatgttttacttccactaatccaacaatttctggagttctttgctatagatagtggttggattctttatctttaatgcatgtagaagttgttagtctgacactatgtgataagagtatagttgttattggattcaagcattaggtccaaaacacttgttattggaggattttaagtgaatgttgttgttacttgcctggcctcattaggtgggtttatttatttttggcaggggtatgaggcttcacttggcccctgatcaggtggtggaagtaaagttattgggttaaagttgcatgcatccccaattcaagtccaagaaagagcttctagaatttgagatctgtatcttgaataatgttcattgttttatggctttaagaactaaatgaacccaacaaagagtgcactttaaagctgacacagtgtgtgctgtaacaagaagaatgaaaatgttctatcttttttcctaattactaagggaaaagagaagaacgaacaatctttttagaactctatattgtttgataccttaactagccattgcaaaacaagcagtgtcatgttatattcttattcatatagtactgaagggtttttgagattgttttggtttggctgtggcaacatatgtctgaacctgatttactcaccatttacatatgtagcaggtatgtttttccttctagtatgcttatatgttgactgtcaatatcttagaactttccattgatgaggtgatagacttattgttgaatttggtcgataggtcacccttttatttctttctgtttatggtagaatgactagtagggtacttgtggttgtggaagctatatagcttcttgattgttttatgcaaattccttcgaagtaaaaactaataaagttactactcatcacattgcttgctgtggttattaccctcaggagtggtagttgacattctgtgattttagatgaactaagtaatctacaaataaagcatggatatatagtttacttgttaatgttaaagaagctctttttatgaggggttttaaataagggcgtcagatcagttgcctgaagcccttgatgaattgaaacttcttctactcttgaattatacagaggttggtattttttttttatttcttaatgtggaaaggttttgctggtttgtataggcgaaaagggttagtagatcttgcagatttgctgaagtggattatgattacttactctttaaaactgacaaactatttggaacttggaagaactatatcatccgactgtcaaaacctaatcttccacttggaatattattcctataaaattaaatgactcatttttttctgttgtgggatggaatcttgacttcatatattccgggcggtagcatttgaccttatctcccatggtactcccaccttgttcaaagcagcaatggtcttttctaccgccattggaagagcaaacggggctgtttttagatctttccgtcccaggatgatattgtcagttgacttggaggtttccaaagctcaactgaggaaagttgattgattttgttagggaaatgcacagctttgaattttgcaaagctgaaaagaatttcttgaacatatttagctgcatcagggagaattttctcatgaatccattaattcttgcatttctaaatagtatccattgggattgaaatggctgtcttttcaaacaaacatagttaggcgcataaataaacattggaatcatattttgcatctacacggatcacataattattaattattagaaagtctaaatacataaaattttcaagtttggagtatatttttgtgtcagaaagtttggagtgctaaatcttaatataagtctataaacaaaatcctttagtacataatgagataaaaaagagaccaaaattcgctgtcataaaacattatgtaaagttaatgatttgtgtgtgaaagctaaactactaggattttgtttgttaagtcatataaagatcacattgtattaaataacaaataatattatatttggagaaaatatgataccgaattaattattacgattataaattttaataaaatgtgaattgtattatttaatatataacaaataattcgtattaacttgtattataacatgtacaaaaggttttgagttggggaccccaaccttgcacctaatccccgaacctggtttcaaactcgaaccctcgcccggatatcttggattttaggttcaaggatcttactttactaagaggagagatagtttatggttgaagaccacaaaccttaggaatggagtccattccgactttggcaccggcctcgaaccttagacccagccccgtacccgaactagaaccacagacttggaccccgaacccaaccctaaacctcgacacaaacttggacccagattcgacctggactcgacccaaactcgaaccccgattccagccccggccccgaccctgaatcctaaactcggacatgaatcaaagtagaggtcgagtttatgctaaagaaaatataattttacataagttattaatacaagtcaataccaaacatagtattgtaacagataatattaatacaatataatacaatctaacacaatacaatataatacaatctaacacaatactatataatacaatacaatacaatatgacgaaccaaacgagccctagagaacttatatttgatgatcataactagaaaagcacacacagtagggaaattggtgagtgctcttttgtctccatcctcgttaagaattttaattttccatcaaattattggggtaaatctgaatattccttctttgctaggttaggccactattttttagttttgagttcctattgtctaactctttcatttgaacaagatgttctattcgctcatcgtgttgcggctgcagttgtcaccgtcgtacttaagcttgggatcatttgtcttgagcgcgatgtggcagttaggtagaggaaagttgcctaggcagatttggaggttgcccgacaagagagggatgctgctagagaagcttggggtaacttgaaggtcgagtttaagatagatctagagaaagttgtgacttctagaactgaaaagacgaaatatgcccttaaggaaattagacttgtgtattaattaattaattaatcaaaaaataaattcattgaggcccatcatcagtgataggcgcatatcattgtgtaataacacggtgctagacaccacttattgtcttaaccaaaaaatagtgttgtctttatctccccaattaatctaaataataaataataaatttaaaataaattatttaatataaaataaataattaatattttgctaattcaaaatagattttatgaatatcattatttagtggtatccatacccttgatagtatttcaaggtggtcatccagggaccatgaacttataatactaagttccaataaattagattatttattgaatcatcaactaaataatcatatttattaatttcatgattactccactataaatatggaattaaactcttagtaattatagaattatattcagtgagtttaattgcagtgtctattgatacagtcaatatcattaattattcctcattgtgtcggttcataattagtttaggtcaaatcactattttatcattctaattatttatttatcctttagtattattatttcactagtaaaagtataatttagatccaatct

SEQ ID NO: 266653 - DNA, 1735 bp, Cannabis indica
cttgttaatgtttgaatggttataactataggtcaaatactcgtctggttcacccgaaacaaaatccttcgatcttgaatttgttcccaagagaaaaatcaacaaaaacactcctaataaagtgactgaaactactgaaaggaaacggcgaagtgctacgtctttcagacggggtttcttattattggccatattataaaaataaaaaatctaccacacagaaaagaaaaaaaaatcctttttattgttctctcactacagctaaataatctataacctcaccggaatcaaagattcgcctatgcaaaagatcaaaacttgagaacagaaacacaaacttttaaaactccaaaatctgcaccaacccaacggagaaaagattaataatgttaaaggagaagtatcaaaaacctccatgagagtccccaagctgagattgaagcatcacaacttgttcaagtacaaaccaaaagcttaaacttgagctgaccagtccacccaactcaagtttgaccactgcaaatctagatttacttatcctcaaatggtgaaatcaacctggaaaaatcaaacaaggatttaagaacaacatctcatattaatgagggggaaaaaccaaatagcagacaaattatgatatttttagcataagatggcttcaaaaagttggaagtctttcagatcaatggcctagtttaacagttaattgacttagaaagacagaacagaagataacaaagcttttatgagaagtgcaagtagatgggaaatttccagtagaagactcctcaaaaagttggagagagagagagagaggtgtacgtggggagttgggttccgggtctcaatctgagactgagaagccagaaccttcaaccctctcaagaagactccttcaatcgcaaactacctatggaagtggggctataatctggtgcaacctctctttctctcactcactttgtttctccaattggatttcagcttcttgtgctatcatctttaggggtataaatgtcatttcggtaggcagttatttattttcataaattgcttctttgaacttatcgtagatgataatattaatactacttattggttttctcttaatctgaggttgaaactaatgaactaggcaatagtaataatttgttgttttatttaatgcagttgcatgggttatatctaataaactttttccacagaaatgtaaaataggttaacgcaacaattaatgctaccctaaatttgttgtttttatcccgaataaatataggtttactctctttcatagttttactaatcattgtgaaaaatatacatatttatgagattagtctggatattgaagtataatcaattgcagattattaatcaaaagaaaaaaagtgatgattttactttgaaggtgaaatttaataaataaattagaactggataattattgtcaaaggaaaagataaggaatgagtattatccagacctgatccaaatccttgggaaagaggctagagtattagatcctgatccacacccgctgaagcaatttaaccaaaaaagagtcagaaacgtatgaacagatggagagagagttcaggtttcataagataatttttgatactggttttttaatttatatatatatctttcaaaaaaaaaaattatatatatatacataattgttaagcagaaaagatatttatcctaattagtttttattattattttttaaggt

SEQ ID NO: 266654 - DNA, 2052 bp, Cannabis indica
tttatcaatttctttttatgcatcttaaaatttaatttcaccctatttctattcacattcccgttcttgtgttttcattccttccaacgaaatgcaagttatgttcttccccttttctgacattcacatccattttgtccttgtttttgtaacttgtaagctatgctttatcacgtcaactataatcaactactgatgcagtttcttctgttgctcattattctggtgtttcattgcaggttcattcaatccgtgatgcagctgctaacaacttgaagcgtcttgcagaagaatttggtccagactgggcaatgcagcatataattccccaggtttattaatggttttgactttgcaatttctttaactccaggggttgcaatttttttttcttttggctaacacgtggaacaaaacttttgggatggagtttaagtaactgcttacaatgagaatatacatgttgttggtctgtttttgtgtattaatcatactaggcggtttctaattcactctaaattccccttttatttgtcacttttgatgaatatagacgtatatactgatatatctctaaattagcagaaattttcatgtaatctgggcaggtattggagatgattaacaacccacattatttgtatcgcatgactatattgcatgcaatctctcttcttgccccagtcatgtcttcagaaattacctgttcaaaactgctgcctgccgttgtcaatgcatcaaaggacaggtatctagttaatttttttgacctataaactttatttgaagcaaggatttgatctggtttggtggtttttgattactcccctgaatatttactttagagtgcccaacatcaagttcaacgtggctaaggtgctgcagtcactcatccctatagttgatcagtctgtaagtatctgatacctatgtgtgtatatattttgagctgagctgcatcagggtttcttacacacactgtcaatactctatctaattagagattctctcttcctttttccatttgggttttctgtatatcaggttgtagagaagacaattcgtccatgtctggttgagctgagtgaggaccctgatgtcgatgttcgtttctttgccaatcaagctcttcaagcaattgaacatgtaatgatgtctagctaagcaggaatatagttccaagttttgagttcattttatggctcaaatcttagaagccaagaccctttttccaagctagaggtactagtgatcagaatattactcgctgtattctaggcatgaccttatgtgatcggtctcatgcttgagaaaaccggcagcagacaaaaatattaacataattatgcatagactgttcatattatttgttcttccttttccagtccccttatttggtagtttaattgtaagaagatgctatttcatattcattgttattcttgatgaagataactgtctcactctctttctctgatcctactgcttatttaagttgggtataaattactatgattgctgttaaagatgctacattttttggttttatggattttttttttgttcactctattcattcattgatttaggtaaatgtttctgcctttgtgtcagactatcatctcgtcagtgtagtgtagactggttgaggtgcctacccaagtgaaagtgccgaacaaaaatgtgattaaatatgttataatttaaaatacaattaaaataattaaatctatatatttacacaaaggttaatgagattaatatcgatgacactttgtttaaaggaataggaaagcatgtgatgggttatgtggcaagggtccatcatggagatacggtccacatatgttgtggggactttgtcacgaaagttgctgaaacttttggcatttaaggaagctcttaactgaattaaataaaacaagtggctattcaagttattcacaattcaatggagatgaaatctagttttgtttcatgcttgtaaacaactcttagcttttagcacgagaagtagttgaagcattttgctataacgaagctccaactaga

SEQ ID NO: 266655 - DNA, 1946 bp, Cannabis indica
atggttcaattaagaaaagaagctaaacaaaatatgataagcgcgagttgagtttgaaaatctttattcagacattcttttatgtttgactaaatgaggtagaaattagaaagtggtggcagtatacagtaggaaagtacctgtaaggctataaagaatgaaagatgtaagggctcctgcagttagggagcctgtaattgtcaagtatgctccataaataaccactacaataacggagaacatggacgctgcatttagccctccgaaaaatagaccaactactttctgaagccaaaaagagtaacttcaagatcagaaactactacattactttaagaaattttgtgtgagagaaaatattaacaagaaaactcacagcttgtctgagtccaaggtttagcgtctcatcaaccttttctgagtaacttgatattgcatggtcctcttgagcaaaggaccgaacagttcgaatagcaccaaatgattcctaaatattaatattacttagaaaacataagttaatggaatcctcccaatatcaattagaataatcatttacataacttaattatcaaaccttctgtatgtagaacaatatggagtttttataggaaacagtacttcattctttttttgtttagacaagatagatttggtctggttaaagagttatagtgattaaaggatttcaagtaaaacaaacccttctcctttatctcgttgtgatttaaaaggtgttcaaagaatttgaaacagatgtgaaaaataatagatcaaaatataaaggcctaatgttatcaaaaaacagacaaaatttccatatacatacgtatataaataattttttccctacaaacctctgcaattgaggcagctactgcagctgcagcctgggttgtgtgcgaaagttcacgaagatagcgtccaaacttcttcacagcaacagaaataattggtacaacgaccaaagccaacactaaaggggaggaaaacaaaatgaattgcaatgagtatgatttctccctaacaaaaggagtcttattatgggagaaaaaagtcagctcaaaatgaaataaacttacatgttaacttccaagaagacgagaacatgaagaaaacaccaataattgcagttgttacattacgaagtgcctcagaaagattggtagttgcagcattttttatgatctgtgtgtcttcagatagcctgctaagaagttcccctgtccgagtcacatcatagaacgctatctcctgttgaatattgtagcatcaaacatgagaaacttatccagattattcttgaataccaaagtgaaatgataagcaatggagttgattatatagagctagtctttaaaagatgttacctgatcaataaggtgactaaataagctttttcttaaacgagcaactaccctttcactagcagaagaaaacaaccatgctcgaagtgctgtgcatacagaacttcaaacaaggacaataggaaacactatagacaagttaaaaatcaaatcactgacataaaaattgagaaagagaaaaatactgcaactattataacttattaaaagatatatactggtagaatcatctatgtaggtaacatattaaaagacagtgcaatgcaaaattataacttacccaactgcaactattataattatttctaaaatggtatttttaacagcgttcaaagcttcagtttgctcttcaggagttcttatttcttgtgatacaatgtcaattatcattccaccatattttggctgcaaggaaaaaaggaaatcaaagcttgaaatttcacattttaattgacaacggttaaagaaaatgtaatcttgaggtgagtcctgaggccaaaaacacattgattcagatgttatttgtctaatagattctccagaatctccaatacgtaccaagatagataagaaaatgaa

SEQ ID NO: 266656 - DNA, 2641 bp, Cannabis indica
cttttggtagaagcagaagttcttctgttgattgatatgttttctcactgttaactgttaagggattttatactttggttttagcttgatggttattatcattgtactaaaaatgcatcaggagttaaatttatgaacattttcacagagggaagatatccgaacaaagggaagagaccttgttgacccaagtcttgagattcttaaggagcaactacttcccttaaaagattgggtatgttaaaacctataaactcttgattgcttttcttaaggtcccttgaagctttttttcttgcaaatcaatccaagcttctaatttcaggctgctaacatgtcgaagaaatggcatttggaaaggacagaagatgtaaaggagaagcctcttataaagcaacttactaaaattttgggtgctaatccaacagattgatttcagtgtacactagtagtaactattttcagtgtttgaattaaaggtgtaaatagctatgagtgcttatattgatggctatgggtccaagaaaagtaaagcattattctatgtctgttgcctgcacatgttttgatgtactataataagaagtaatacttgcttgttgatttgctactttaactaatctaagtttattgattgtgttgtgaaattaatcatctcatgatcacaaaaatcttgttatgatgatgaaaccttgaaacgttgacttgatccctaattcattaaactttaaggccacacattgtttctcactttaatgattagcaatgcaattttatggaggtcgactacacaccaaaaaagaaagtggattggtgtcaataaataatacaacatgtaaatggttgaatttctttatatatttatatatataaatataacttttttctctagccatgtcagtacttagttataagaagctataaatgaaagcccaacattcaattggatgtcatccttaaatatccttcatagctcgtagtctaaaccagccccatatttccaagcctcaagacgtcgtatccactgatatctcaactggggtgaaaatgcacttaaaaatggccttgtaaaatatgcaacgagtgaggatacatttataatgaattgcaaagtaatacacttagaacttagaaggatcatttagataattttaattacatgtaaattcaaaacatgaggcggacaaagaaattacctaattacaggctcagcaaaggttgatagaaaagtataaaaacctagcatagcaaaatgaccagaccaatcaagaagtacaggaaagccaacctggaacacaaaagtgaaaatttattaaataacatgattattaatccacttatagaaataataattagaccaattatttcttttttggttgaagcaatagagtacatgagaacgtgcatcttattaaatgcggacagttttagctgctgcatctattcaaagggggttttttttacccatgacatacactcatgtcataaggcatatatatatatatttatcagttgtaaacaggcaaggaagattgtggtaaactttattgttagcttgtgcttccatagatcattccaatgaaaaaaatgcttttaatatttataatttttgtctatgtaaacatattaaaccaagtaaagttacctttatcttagatttaggacaattcaacataatgctactgtcatttcatttattcatgaatcatgcataacaaagtaaaataattacagacttgtattacctgtgcgaatatggagggtagaatttgaggtttggatatcataactaggcctagtgttttggcaagaggcccgaactgtacaacatcctgcaaacattacaaatttttattgaaactcaatttttaacaaaaataactgttcaacttactacttataattcaaccaattgattgattgggattgttggatctatcatggttaaattaacctgaagaaatggtcgtaacaccggatcgcccagcctctgaagaataaaaatagtcaggcaacagcaatggatacactagcatgccattggtaaagaaatctagcaaattctaagctaacctgcatactctgaaaattggcatgtaagagctcatttataaaatctggtggaacattagacagttgctttgctgacatcgctttttgaaacaaccacgaagtacttaaattaggctgtaagtttcacattgtcattcaagttgttatacaccccttctggagtaaaaacacagaaataaaagaaaaagtatttgtactaggacagaaaacagcacatcaccatgtatggattcagtagggacaagttgtacgaatcaagaaaatttccgctgactgcttcatgtataccttttgttaagtaaaacagaatttcctattagtgttcttctggtaactgtaacatttgtatcaataatcaatacatgctgaagcttgcacaataaaaagcttgttttttttgttcaaaaaaaaaagcttgttttctaattttctcattaaattaatgtaaaggtgcatttcctatgcccagaatttagcattactagttaaaagaagaagaggaaaacaaaatgaagataataataatattcttctatatcgagattacaactaatggaaaactttccca

SEQ ID NO: 266657 - DNA, 2575 bp, Cannabis indica
agttcatcaactgacaattccattaaagtaagatttttattaatgattcagtgtgcctagtcaattcttttacagatctatttatggaactttttttttcattttataaactccaagttataagcaatagtgagatatctactgggtacttagcccattatgattaaacagttacatctgttcattaatctgaaaattttaccttaacttgatgagttgaattgttcttgtgacaatgcaattgatatactgatcacttttttttttctttcttctgcagatgtggattttcgacacaagtgatggagatcctcgtcttctacgttttagaagtggccacagtgctcctccaaaatgcataaagtaataccacttttcattttatttggtgtttatattgtttaggttctgtttgtttgtttttacatttttcctttttttaactaaataaaattccacatacatttttctctcatttctcaggtgcctttctaccttgagttgcactctcttccattgtctcttctaatcattttttcctcacaatttatgctatgaacttttgttagtctagttgcattccacttggcatccttttgttagtatataaatgttctcttcgtctattataggttctattccaatggaagacacattttatctgccggacaggatcgcgcctttcgccttttctctgtgatccaggtttgtcattatacatgatatgccaacaaaactactatttcttgaaagtgttacaaaactacataattggacgtaacttcttaatcaaatgtaaaattgggacactaaaagaattatatgataaaaataaaatgttatatttattatgtattgtagctatgctgtcctaggaaatgtatcttatcaagaaaatattgtagtaattttttgttttctgccaaaagttgcctggactttttgtgtattttggctataaataaaagatcagccacctcgaaaaatagttgattgaaaatttacataatgaaatttttcattatttggaactttggttctataaactcaaatcttttcttagcttattaataaaattatgtgttttacgttttggtaaatcttatatatttggaatttatgatacatacaggatcaacaaagtagagagctctcccaacgccatgtggcgaaacgggccaagaaattgaagatgaaggtatgaatgtagcaacagcagcatatgtttatggtttcgtttttttccctttccaatgttaaagattaccgattgatttcttcggctaataaaagacatttctatgttttatttacttactttcaggtagaagagattaaactgaagcctgttatcgggtttgactgtggtaggcttcttatcttactttcttattgtcttttatgaactaaagaaaggaaaaagaaaaagtatttggggttcggtccatgaattttaattgtgtctcttcccctgtatttgatgaaaaccatatagctgaaattagagagcgagattggtgtaatgtggttacatgtcacatggatactccacaggcctatgtgtggagacttcaaaactttgttctcggtgagcatattctaaaacctagcgccgaaagtccaacaccggttaaggttagaatttcgatctatatttcaatgcccatttgattttgaaatagatgaggaacttttcttctgattagcagcaaacccgaaaaaaagtttcttccttttagattcgatttagtttcaaatattttcttattacaagtcctttcgccaaaccaccatggtttattattttggcgatcgttaccttatggcgaagtttatttgtttgattagaatgtggaaagtttgtcaacttatttttaatcatttatgtgcatatttctcttgcaacaggcctgtgccattagtgcatgtggaaattttgcggtactaggaactgcaggtggttggattgaacgatttaaccttcagtcaggaatcagccgaggcagttaccgtgatacttcagagaaaagaagctgtgcccacgatggggaagtggttggaatcgcttgtgattcaacaaatactttaatgataagtgctggatatcaaggagacataaaggttcgaatttccaacttagaagttgtattcatttgtttacttttacctttggatgacacatgataattttgcaggctacattgagctcaaagtttcatttttctaacaatgcttttgtatgcaggtctgggatttcaaacgatatgaactaaaatcccgatgggaagttggctgttctgttgttaaaatagttttcaatcgtctcaatggtaagttgtgtttcaatttattctaatagttatttgatattacttttaggacattgttgttcattcaaataaatttcaggtcttttggcgaccgtgtctgatgatctagtcattcgattatttgatgttgtggcattgagattggttcgtaagtttgaaggccatacagaccgtatcaccgatatgtgtttcagtgaggatgggaaatggcttttatcgtcaagtatggatggaactcttcgaat

SEQ ID NO: 266658 - DNA, 2756 bp, Cannabis indica
tgaaaattttcaaatttgaactaattgacgacggttaaaaatagtagcctataacactataaatgacggttttaaacgtggcctatagtataggctacaatttaaaattgttatctatagtataggccacagtttaaaactgttgccaatagtacatgccacagtttttaaccgtaggtaattctcttttaaaaaatcgtaatttttaagacacacttaaagaccatcggaaataacactagaggcgacggttttaaaccgtgaatagttctcctttaaaatgaatttgtaaattagctcacttcattatgtattcattatataatactaattttttagttattaatacatataattaactcaaagaagttataattgattttggaatcacccatcaaataaaaaagaaaacaatattaatatttgaacaaatcaataaagtgcatgaacgattaatagtataacattcacaattgaaaaaaaaagtacattttcacacaaaacttcaagccttttgtattcaattattagaagtattaaacatacatatattaagtttttgtttgatgattaaatggagcttaataatattggattgtacatatctatagtactcttaacaaattagaaataataatcattatccaaattaacaatgtagtgagtcaataaagaatagtattggaagaaaagatgatgatcactatcatccatgggcagcattcagctccaaaaaatggtctaaaatattcttagcttcatgtgtgattggagtctccattgatccattgttcctctacattccaattgtaagagatgaaggaaagtgccttgacacagacaacaatatgaagatcatagctcttgttttacgatctcttaccgatttcgcctatgttttacacatcatatttcggcttaaggatgccctaaccatctctatgcaacttggtcaatccattttccatggccttccttggccttatcttctaatcgatgttttagccattcttccaattccacaggtacctattatatatatttatataatgtacatatcacacttactaatttttgaatatttttaaataaaatgctcacatgccaattttttttatgagtgcaaatgtgctatattttaaattttattttcaacaatgcaaatacttttccaataataggtgaaatggttagcatatatatttatacatatagctaattaatttattatatttattcatctataggtggtagttttgatacacttctcaaagattaccggattagattatttggatgcaagaaagttcatcaatttaatacttcttcttcaatatgtgcctcgaattcttcgtgtctacttatcagcaaaagagttgggatcgagtttcgactcacttgctagacgtgtatgggtcagaggcaccttcttatttttcctctatattatttctggtcatgtgagtaataatccatatgcatatttaattttaccaataaaatattatcattttaaactttataactagtaaattaattaaatatgtgtgtgtttatagatatttggagcgttttggtacttttattcgattgtacgtgagacatcttgttggcacaaagcatgtcataaacttcgaaaagatcctacaaatgaacacgaatgtgatcccggtccatttgtgtgtggtgaagaacatcccatgaaaaattggagaaagatgaatgagtattgcccagttaatccaccaaatgcaactgtcttcgatttcggaatattttctcaagccattgaatcgcgtatagtttgcaatgcaactgattttcccaaaaaattctttcgtagtttctggtggggtttgaaaaatttaaggtttgcgaaactatatacacatataatcttaaattagtagctagggttttgctcgataagattgtttcgagttgttttgtcttatataagttattttttttttttttagtaacccatattttgactttatatactgtttggattaacaaaaagcttgttggctaaatatctccttttatttaattctgtctttttttttttttgttgcagttcttttggtcaaaaccttgacacaagtagcagtgtacaagaaaatatcttttcaattatcatttgtatcttgggtttacttttgtttttatatcttattggaaatttgcaggtatgttttaactacaaactcaatattatataacttcctaatataattaaatttaacatgtattttatgtatatatatttgtatagacatgcatgcagttggaaaccacagagtcagaaaaggcaaggagaaagataggtagcatacaaccacaaatagaatcttatttatcaagcattaatgagattaaaccttataagaaaaaggtcatcaagaaatacctaagtcaaacaattagacaaggcaaagattttgatgctcgacatcttttttctcatattcaagatgagcgtgctaatcctaatgaggtgagtatttatatatctattatctattatatataaagtgtgcctatataactaaaattcttgatttatgagaaatttatgggtgattttttatttttatttaataaaataataaaatattatttatatataataaaataataataaaacaaatcctattaatatttgaactgatatttagcaattccaactctatataaaatcacaactataactctagaaattaaaaatcatcaatatcaatcaatatcaatat

SEQ ID NO: 266659 - DNA, 3357 bp, Cannabis indica
atactgcaatatgaaacttataaaaaacacagtaaaaaagtaaaaaatagagcaaaagttagcataccatgtaaatttccctttacttttttgtttaatatctgatatcgggccgggttgggcccgatcgaaataatatgtaccgagttgggccgtgagctcgataaaaacccaaatcattcgggccaaagtcatcccatcgggtcgggccccacctgcgaaaatggcccaaattgccattcctaatcatctccaatatttaatttgtatcaataaaactagaatagggtgcaactttttagcatttttcttaatcaagatatgtagatctgactttgactaaacgtgatagagttatcaaaaagtcaatatatatatatgtcaacgtacattgccgaattggacaacctttgattattgatttgtaaaaagtcataaaagaaactccccccaaacaaatattatatgatcaatcaatcgaaacacaaaatatcatttgtattcatcgcagttcattttatataaaccaaaaaatttagttctagccatatggttctacggggttgattggttaggacccttgaagaacgcgatacagccatgtgatgactcaaagttatcattttaagtaggactgcaacattgttcctatataattaaactggttctgtataggcaataatccccttccccttacataaaccaaaatatacataaacagaaaccttttaaaaaaataataacatacgtaaatgtatatacggtcatcaataatggaatacatggacataactgctaacacataatcaaacatctaaacaagaacataaatgtttatatatagatcaataacatgcaagacatacgtacacaacgaaattgccactatatacatacaatttaatcatcatcatatatagtgatcaatcaatagtgcaagacataaacattgtactccacaattgcgtcaaaagtagtggcgttagccacataagtcttggctagagcaaagcctcttgcgaacctaaaaactccacttccaccaacgataggcatctctcttacgcctgaaaggacggcgttgcgtcccaaaatgctaagagtgctacccttatattttccttccgtgaaaacgtagtttagagccattaaaagacttaactctgtctgtgatgtcgaggcatatattccttgtgcgctcccaattttcttggaggttggctcaggtcccacagtcagtggatcgtcacatacaaccacgaacccgaaactcacagccgaggtgttggttgtcttggcttcggcaactcggatggccgtagggtttggaccgctgaccacgtcgtgaaagtagaagtgaagatgagttagtttctcttgctttttattaaggcctagagttttttggggatttaagtttcttgagtaagtgtagtcatcgtgtgcggtggtgaggctcaagattgatgagtgaatagttagaaagagaatgagtatgattagggttgtgttgtgatgagtttcgtccatggtggagatgagatggagcttaattaggtgccttaggaagagacttgtatatgttaattatgcgtaatgcttatgaattgaggttaaacaaattggttttttactttataacttatgtttaatgtttatatatagcaagtgtataattttttatttggtaagatgagatatatgaattgttaaagtttgttcatataattttatatataaaaagttgttcatattatatttataaaagttgttcatatatatagtttataggaaactatacagaaagagaattaattaggcaccatgactatattatgaatgctctattctacaagaaaattagaggccacaatactagcaatatataaattgactctctaaagaaataaaattcatacatatatttattatatatgtggcactgtaagaaatttaattttttttgggacaactaattcataatggatctggtcatcatgctcgattgagcaggaatggctacttttggaagtttcttgttctagccactcaatactttctaaaatagcgggaacttttgataaagtacggtggttagaactatttgagttcaatgagccattctgagtaccagatgaactgactctagagctcagattagcattaaaaaggttttcttccgaagtaggctaaataaaggcattcaatgccatagctaattctaaatcctcaattggtggtgagaatgcttgttgatgaactgcgacttgatcaatatgcaaaaaatgtaggatgtccctagttgataaattttaatcactacaagaaaataaccttttgccgacaaattttctcccctgatgcaaaactaggcataggccgtcgatagagttttgtcggcgaacttatgcattgacgacaaaggctacccgagataattggtccacataagtagttttgtcggtggaacacataactttgccgaaaaaagagtttatgtcggtgacttccttagcggacataagttccagtgtcggaattcagttatcggctgaggggtgcctaacgaggttttgccagaataatcagtcgccggcaaaacttttacgccaatttttttaaaattacaattaaattaaaactaaaaccaattttttaaataataatatataaatataatctgaattatattataaaattaaaatttatattataatacaaaactataaataaattgtcgaaaactaaataaagtattgttagtttataaatattagtaatatttacacagaatattgtaaactaaaaataaaactacaagtcaataacatcgtcatcatcatcgttgtcctgagagggaggggaagcctttgaagaagacccaaccccaggaggccaaaatagtggaactagtgaaatcgaaattatcgggggcatgttgaagctaggagtgatgttggctagatgcctgaactgctcctgaaacgtgttcaggaattgattctaagtctgcatgatttgttgttgccactcattccgtactttttgatcttccacactttgcttcagggcctcatttcctcctggttaacagtaggttcactactacaaaaactagattttgcgtcggttctgacgtcggcaaaatttaaaaaccgatgctattaaagaacccataaattttacgtcggttatgaactgacgcaagaatagcgtcagttgtaagactatttgcgtccgttctacactgatgctaaccttgcgtcagttcacaactgacgcaaaaaatcctacgtaaaaaattaaatcaacagatgggccaaggccatttcaaaaaccctaaatatatataacctt

SEQ ID NO: 266660 - DNA, 2877 bp, Cannabis indica
  modified_base (29)..(29): a, c, t, g, unknown or other
tatgtctagatactatacaactgtatatnaagggttcaagcctccaagctatttggtgcataggctaattcatatataaaattatttgaaaaatatactcaccaagagtacgtatatgcatggaaaaataggcatacaaaaagcctagctaaaaaggagcgattatataaatatactattatagtatacaaatatcatagtctttctcttttctaagaatctatatataaatatatatatatatataaatatatatagataatttaagagtttttgaggtcgatctactaattaatgattacatgatcaaatgctttcaaacataaaggctagaagccgcaaatttctttttcttgcgatacttaaatgattgtgggatgcagttctaatgtacctcatatatatgtttttatttatcaaatgataattttgtgagattaattatttatcagatgagaattaattaatattccattggtgataggaagtaaaaattatatactgtaatgtagctaaatttctatgctgaaattaaattgtgaaaatatgttatgtatttgtgcaatagaaattttttaggtagctggtaaatgaaattgtaaatatagaggtcttgccattataatacaatatgcagtctaccatgactgtttatgaatatataagatgaatgatgatatgctttatcgatcaatacactccttaatttttttaactttaggtgtgctacttaaattattttatttatatttaataattctgtgattataaattaattttctttgggatttgtggtttaattgtacttatgaatatttcttaaaagtagcatggtgaaaacggtagaaaagtacaagaagtatagttatggaggactggacgctactcaacctttaattgactctcatgaggtaaactcaactggtgccccttggccagcacatatatgtcctatatatttttcttatattagaggtttaaatgtaaatatatttaaaggaaattatgtatgtttgaggtaagaaagctcatttaagcattgttaactgtgatcattttgggtccaagtagaacagctatcaggaatatttgaagctaaaagcaagagtagaggttctacagaaatctcagaggtacacaattacatatatatatactcaagtatataaatatatatttatttatttatgtgtttgtaacgattatagtgaatgctgcagaaaccttcttggggaagatctcggaccgttgaatacaaaggagctcgagcagctagagaatcagctggagatatctttgaggcatattaggtcaacaaaggtaacattaaattgtaactgtttttggtttttatttttagtgggatttggcagctggcggacccacatctaataaatatacttatcataattcatattagatattccgcattgctagcactataacaaacccagtattttttataagtgacggtagctttattttttaaaccaacaacagtatcaccaagaaaattgctaatcatcatcataccttttagcatttctcttaaatattaatttgaattataaattaattccaaaagattctatatttctcttgtatgtttgggacttaatagattatttagatttttgtctttaaattaaaataaatgcccctaattttagttccctaaaaattgtccagaatccattcatagtggtgtgaactaatagttgtgtcaaattttatcagacatggcaaatagaataataatttggttgtttaaatattaattgtcatgttaaagccacctcaaagctgtgtcaactcaacatctgttattaatttcataaaaaaaataaattttttaatttacatttacataatttttcaaaaaaatttcattgattgacttttattttaatgatctttaaaaaatactcatatgcatttgtttttttaattattttaatgttaaattatacatgtggtactgacgtagtaattggctaaacaactatgtcattattttatttgctgcatgtgaacaatttgatagatcgactaatttacaacaatgtgagtagactaatttacaacaatgtgagtagttcatcaactatattttaatggactaaaaatttaaacatttttgtttttcaagtattaaaatttaaagccctatttggctttttaattttacaaaagaaaacttttatgaaacttgttttaatattttctattttttcaaatttaacatattttttaagttttacttttttaccaaaataaaaaatactgatacaacacattgcatatataataagaaaatggaaccttgggattttttttttcatttcctcaaaatttaagatccaaacaaagtatatatgctgtataatttgatgaatttaaaaaatttacggtatgtgaaaaaagtatatagatattaaaaaataataaataaatccgttatcaaatttgtcgaaaatatattcctttatactttttccccactatatgttttctctcataaaagttttccttcaaaaattcaaggtctaaataaggcctggatcacggtttggtgtcaccatgaaatatgtacttagagaatactgaactatttttaatgatgtagatcaactctactaatcactaaattttatatataaccaatgatttttaatgattcaaattatatttatttattaaaaaaaaatcacccaatagacatatgtttactttttagaaaattttatttatagttcaaaaaattctaaagaaaaaccatattttaataatttttattatatataaaatttgtatctttaattatactaaatattttaaaaaaaattacttctaatttatattttttaaaatattatc

SEQ ID NO: 266661 - DNA, 3857 bp, Cannabis indica
attgagaaggaaagtctcccaaaagtactaaaatataagtataatgaagaactttaatataaattagagaaaatgggattatagtgatgtgtttacaaaaaaaaatagagtaaatgcttaattacaatctcttattacaattttttaatcaacttttactctcgaaatcacatgtcggaatattttttcaaatttttttcacactaatactccttataaatttttaaaattttttgaataatactttacaacatcagaaacagagctcgtgatatttaagtttactatgcgtgttcaaataattttaaatttattttcgacactgtaaattattcgaaaattttcaaaaatttacagggataatgttgtaactataagaataccgccatgaaagaaaatttgaaaaaaaaaaaaaatcggcatgtgtttttacaaaaattgactaagaggttagcacacctcatagaggaaatgtgttgcatgatgtacatacctgaacaaaagcacctctggtgtctgcaatgtagcgatagagttcaccatttcgagcacggttcatctgagcagatatccatctgaattgacctttcagcttgtattcttcaatcagactatgcatcttttcaatctcctccacttcttctctatctctagacttgttcacatccatgtaccctccaaccacaacaagattcaccagctctcttagcttggtactcttaccataacactctacaagtccagttaagttcttcactctgtcaagtctcgccatagaaaagatgattggctttgtcttgtcactcaagaaaccactacatcaaagttaatattagttaattataagatcaattattttccaactaaggaaaaagtgtatgtatgtgtacatatgcttacatatgttcatcgttctgttcaacaccatatacaagttgttcaatggaaccatgtaaggaagtgagtctcttctccttctctgagtaaggaaagtatatcgccatgtctgcgccgggagagacgatattgaacttgggatcgaaaacatcaatgccatgaacaactctgtaaaggccaggaagtgtgaaagctgtatggctttcatattgtccaacattgttgtggcttttaagacaaaatcacaaccaaaattagtatatgatgagtacaatttttcaacattgtctttaaaaattaagtcttaccttcctgcaatctcttggtatgtactggtaatgataaaatcagcattgttcatagcaataagatcagcagtaaactgacttgaaaaatggtacttgtcctcatactttttccaatagatatctgagtcagggtactttgtcttctctaatgcatgagcaatattacactaaatgaataaaaaaaatcagttagtgaattgaaaccagtactatatctgctataataatttgattgaattaattcaaacctgggtaattcctagtttataagataacaaagttgcaacaagatttccatcactataatttcctatgacaagatctggaacaccttgtagttcagctgaaatttcatttgatacatcctgatataaatgatataaacaaggattaattttaaagaaaaaaaatgttgtattaataaaacatatatatatataatattatttgattacctctgcaaaagtttccaagtaaggccaaacatcaaaccttgaaatccatttcttcaaaatcccatcctcagtcctaaaaggcacccttagaatgaaagtatgttctgttccactgattttttccaatctttgattgcatgttgtgccttttgcatcaggtatgagccgagtgacctttataaccaaccaatgaataaagtgtaatgttgcataagcttaaggattttattataaagattcagaatttgacatatacaaatatatatatatatatatatatcttacaatgagaatttttggaacaatatctagtccttgcttttgtattcttagaagcatctcactttccatagcacgaacttgatcaagtatgtaaacgatctgcattagtaataaagagaaattcaacttattattataggaaagaggaattatttttatatgaatatttaatcatttcataagatatgaaaaacagggtaaaaaattctgttcatgcatgcctgatgttttacttctaattttggcactaaaaattatcctattctttttttggtaaaattcttcctatattaagtatatttagaattattcttacaaaaaaatatatatttagaattataattgtcctaattataaaacacatgagagagtccacctaaaccacttcagactagttcaagtggctataagaaagtgcgtgtgtgttggagatcttgagttcgagtctcatgttatacattattatataagaaattgagagagtgcacctatgctacattgttatgcacaaaccaacaaaaagggcttgaattattccaaactattttgcatttaaacagagaattttaatgggaaacataagtttaaggtaataaagtaattaagtactacctgtccaccagtgtctggcaaaccaagtacatttgcttggccaaagtagccatgaggagacacaatgacaacattaaaaaccataggaattctcccaagaaatgtttctaaagtagaaggatcaggtgcttgaagaatctccaacagcaaatgaaccatttctgacacactctgagctgtgtcaccccaacccctctcaaatcccattccttgtaaactgtattcattcaaacaaaaccataattaaattttggaaggtcttataataattcatcttaagaagaagattaatataataattgcttactcaaattcaaactcagaatatggtgttgctagtgggagcttagaaagatgttcctctacccttacaagagcagattgaagcttggatatgttttgaattcgatcatttaacatcattgcctatacataattaattaattaatctttatgaaacaaattaagcattttcaatttgaaatataatatatatataaaagcttacacggccatcatgtttatgtgcacgaagaaaatcaagcaaaggtgttaaactttctttattacgaaacataattgaagaaaggtgacgattgaggaactgaactccattcccaattgatgaggaccgagttggtcttggaaatgtagcattaaatggctccaaatcaagttccagcaaataatttccatttttcctataaaaaattataacatatatatagatttaattagttagagttttttattttaattaaacatttgattatgattaattaattaagaagaaggcttactgtccttcgactagttcttctctgaatttaaggtactctgccacactcaaatgatccacactgagttcatatacattaacacgtacgtattcccaaactccaggtcttggacgaattgctatgcacacaaaaggtggcagaacaatagcttcctgttatatataacataataatagttagataaaaaaaattgaacttaagtagtcaaatatttttttcagccgtgaaaatcagcaaacagaatcattgaactctgttttacacatctaaattatttagattttttttttttgaaaaattagataaattgcttactatgtaactattgttaaaaacaccacatttagtcacaactttttaattacaataaaaaatttatgataaaagagttacttgcgagtaaacatagtatttagatagatgttattactaataaaattttaatcacaataaatattatgactaaaaattcatttagtcataacaaattctaatttttgggt

SEQ ID NO: 266662 - DNA, 1375 bp, Cannabis indica
atatatacatatatatatatcaacatgcacaatatcttattagttatcaaatcaataagtatgcatctgtaccaagaatatatgctaatatatatacatatacatagtttggaagaatgaaattttgtgatgtaattgacatgctgaaaataaaaactgctcaataattgaactgcttgaccatggttatttttttttttctttagaataattagttacaattcgtagtgaacatggagtttatgtgatgatcattttaccattttgtgtatataattaaatctgattggctaattaaaaactaatcgtacgttaaacgatatctactttagaagaattggaccgaataagaaattgaattctattaattagttattagatggtataatgataaatgatttcttaatgccaatataattaatttgattactcttttgactttgtacatcaaggggatttattgttttgtctatataatgtattagttcaaattaccatcatcacatttcatttgttattctcataggaataaatatgattagtaaatctactcaacaatatattatatacatgtacttaattatatacatcaggttgttaaagtcgtgatgacttttgactttatggttatatatactatatatatttcaatttcttagatagtacgtactaaattgtgtttcaatcgtaagcatataggcataacaatataataactaaaagcttaattacttgcattggtttagaagtataacaaattaagcagtcatgacagtatctataattaactgaaccattcaatatatatatatatatactacttaaatgtaagtgttctgagtatatacggacaagagttaacatagatattacttcgactattaggtcaattatccgagcgtaatatactgagaataatactagtttcattttgttaactttgagttgaaagttttaacttcgagtagtcaattttcagggatttatatttgatcaaatatttattaggtacttgttcagcgacatatatatatataatatatgtatatttttatatagtatatatacagtacagtcgtttgtcatcgctttttgtatcagacatgacagtagtgtgggaagaaatacttgtattattgtttgtttttaaactatatgtgtattgtttttttttttttttttgtattagtttttctatcataataattaatcgagactatttttgtttattcaagcatcaccaagacgcttgagaggtatgacagatgcagctatggagcacaggaaggaaaactaggctggaaacgacacagaggtacgccgtaccattatacttgaagtgatatatcactatcgttaattaataactagttta

SEQ ID NO: 266663 - DNA, 1238 bp, Cannabis indica
atcacaagcaaaaacaaaagccaaggaaagagttttggccaaggaagccgcacagagaatgaattaagactctgagcatttcttgttgtgacatttttcctcaaatatattgtcagtagtttttgatttctttgtgaaaaggaccatggagctgtttgaagtactacttagcgcgggtagttttttttggtattcttcatttgaggaaggaaccttagtggtatttacttttaatataaagtatttacctaatgaattttggttaaatgatttttcttttcttttcatataattgtcattagccacttattgatcattagacttcaagcgttattagtgttgttttatataattcgtacttatcttacaaaagattattgccgagaaagagataatcagcatcatggtacttggagaagcagaggaacaactgataattgttatcataggaagttcttacaaatcttcttgcaaatatttcatttcagcagctcgtgtcatgtgcttaatttaaaaattgcagtgtacctagaaatttgcctgttttgttaccattgattgttttaatgactgaatatggttagatgagaaatgagacatgatcttgttactagaacaagagtgagatgagtccttaacccaccagtgcttttgagtgtgtaatagatttgactattgtgaccttgaatcatactacattacaacaggtgtgcagtttatgtaaaatagactgatgaaatcgatttgagtgactgctttggtgcggctgatcgtgttctcaggagggagggtgtctctccagaattctttgatataatcttaaatgattgccattaataaagaagcttgttactttcaataaaaaaaaagaagaaagaaagaaagaaaaatgtcaacatggatatgatttgtttggtcgtgctgaactagattatgtgattcatcttctgtactactttcaactttgagcgagttactaccttttatttccaaagtagatcgtatattacccaagtcgccatcccaaattcccaatggccaatgtacatcaaatgctttcatagattctgtttgttatggaattggtgagttcttacgtaatattttttaagttataatttcaactctcattgaagatgagtgttcagaacagccatgtttgtcctactatttttggacaacttaatggcatgacatatgaaagtctgaaatcacacatgacatactaaaaagtattt

SEQ ID NO: 266664 - DNA, 2414 bp, Cannabis indica
ctttattcggccgagacacacctaacaacaaaatcttacttttagtcacaacaaaatttgtaattaaaagtaaaagaattgtgactaattataaattaccatttttatgttgtgactaaaaggttcgtggctaaatatattagtcacaaaaattataatttattgtaactaaatgtatttttagtcacaatgagtaaactaaattagtgacaatttgaaactaaatactatattttctagtcacaagtaacattttgttgtgactaaaagtcacatttagttacaaaaaaataatgttatgattaaaaatttgtcattaaaagtagcaaattttttgtagtgacaacaaccccggcctaatccaatcttccacctcttaaaacaagtaccaacatcaacagacagattataattcccgagctcctaacccacatgttcactagaagtaggaaaaaaggaagaggaagtcacatgtgatggcggtgcaagggaagtaagagcttcatggtagcgccaaaggtaactaagaacccaactaatcaccatatcatcaaataaaaagctttttatcttgcacataggtatcacgacgatgctaaatcctccaacaaagaacaaaaaattcttcaactgggaaatgatatccataaccccaattttaagagttgtccaaccgccggacaccagccgaaccgaatagacttaagggatggacaaaaccacaagacatgtatagtagtatacttaattatattatatctataatttgagtgtatatataatataaatgtgggtctaatattacttttggataaaactacatgtaatatactagcaatgatatgtataagcattattgatcaaaacaaacttaaatcataacaagtatttttttttataacaaaactaacaagtatttctttgtacatacatacatgtattatgcaattgatgatgtattaacttaatgtaagatgaatttcaaataagaaaaaaaaaagcctcataaattttttatatttataattatttgaaaaaagagaaactacgtatattgttcattaatagataatccatgcatgcacgaaagaagtacgtagctactatgtgtataaaacacgcccagaaggcgcgtgttcttacactttgacaattactatttacaaattggaaacaattaattttgtcaataaactacgatatgtgatagaatcattaataatactatacctagttagacttctttaattgttattttttacgatcctcattttttaatgtcttccttagataccaactcgaaatgtagaaaaaatgaataatttaaagttagaaatcgttcatctggatctcttaaaatggaagtcttgtgatcaaattacaaatttaatgtgacgccaaaaaaatcactaagaaaagtaacatattgttaagaattgtctacatttataatatttttttgacattatagttaagggtttcaaacttgggactttttttctttgtaaacaaaagtatgataccactaagttatatcaatgacaataatttcaatatatttttagtaactcttttatctatgttactaagaatttgtagcatgtaaaatttaaaaatttaaaacatataaattatataaataatgtaatataatgaaagcattgacatatatattgaaagaaagtatttcattaaataaaaaattaattattataccggcactcaaaaattgtgaacaagaatctgtctaatacactttatattagagctagtacctgaagttgcaagagcacctacaatacaacagctaataaagactaaacatcactaattattgaactaaaaacaatgttgttttgtggacacaaaaccacaggactccattgagacaacaatgttgttaatgatgataccattacataattaatatgaaaaatatggaacattacaaaaattgaaatagagattttatttataagaatatagaatattattgattttatttactaaaatataaattttgtttttataataactgtggtatatagttcctccaaatgaaaaagcctctaatacctagaaagtcgtccctggaaggttaggtgtctcttggaccttgttcctggacagctaacttttctattccggaaggagtcttgtagaatgataatcgagtccagaagagattcctggatgactatcatatcgacttcgggttcagtcttcaagataactagcctttccttggaaaagagttccagttagctaattgtctcctggaatggtaaatttggatagtggactccatcaagctatatcctatctgaaagagtcttcagcgagtgtccttaattggtccgcgagttcgggagctcatatatgttcctagaagctctgatacttaagctgacgtg

SEQ ID NO: 266665 - DNA, 2489 bp, Cannabis indica
cattattcctatttcttaaggaacaaggacgccacatatatgttacaggagcgatcggcttagaaactggtgcattaatatggtggagctgcaacatggggattagtcagacatagccaattccttaatccacctcaatgaaaaagaaaaggacagtaactaaccattgcattatcatagatggcaccataaatgatagaagtggaaacatcaccggaataaccaggttgagaaggcactagcatcgcgtttagaattgacaataaagagccctggatatgaagaacataagaatattgctaatatttattttcgatgaaactttcagtaagttcctgaagcctaaaccaatggctatgattgatcaaaacatcagttagttaaaaaatgtgtgtttaggatggaatgactacctctggaccctccaattggatgggaacataatagcttgcatcatgaattagagctccatttctgaaccacttcaacaaagctctagaaccccttcactgcctcatcatttacaacgattgaaaataaactttaagatataaagaatgaaacattaacaaacactcaaaaacacccaatgccggcatagtttcttttcttttaaaactagcatccccgcctaactctaaaatatttgggaccaagaaactatagcaattgtttgtaggtaccctagggactcgaaaaacccactgaccttctgggagcaaaccacatgtctgaccatttgagctaccctttttggtacccaatatcgacattgttatcaatctaaaacacttggtatagataaagataatgtttttttaaagtaaaaaaagaaagaaatacaaatccaaacactcaaagacacccgaaatcgacattggttttcctttttcgaaactaggatccccgcctaaccctacaatatttagagaccagaaaactatagcaattattatgtaggtactaagagggactcgaaacctcagaccttgtgggagcaaaccacatgcttgactatttgagctacccaatatcgacattgttatcaatctaaaaatacttagtaaagataaagataatgttttttttttctttaaaggaaaaagaaatacatatctaccttccatgaagacccaaaggaagataataaccccagagctttgtcatggtgaatctcttggcataccacacgtgtgtccttagcctctttgttccatcctgtgtaacagaaaacccctcttcagggtttattttcagttcagctcttcgacgaatacgacgacgaggaatgctgctgctgctgctgctggtattggtattggtattttccttcttctcatcatctaagttccttcttctcttagctgctttgctattaaaggaagtggttcgccttctcttactccgtctacacctaaaatccccattcaaacgattccccacaatggagtgaagagactcaagctcagctgttcttgcctcagcaaatttctgaacattgagcttttgaatcgtttgggatgaaagttgcaacctttttgttccaccattggaacccatttcaaattcaatcacactggctcaatcctatcctaacttgaaactgtttctttctattgaagctttcaatcactggttggtatgaacattgagctttagataaagaattaatccttacaaagtgaaattatttgttttgatcaacatgatatgaaagccaatagaaaacaaaacgaatctaaaaatatgtaaataggcatttcatcaaacacatggtgttgttactgaaaccatataatatatgcatatacatatgtttattgtgagagagtgccttacctctgtaacagattagaagatgaagaagaggaagagaagagtgggtctgagagttgtgagagtgggagaataaggttcctttgtttatggagttttccatgggttttagggggagagagagagaggaaaccaaaatcacagggttttaggagagagagctttaaacttgtggctttttataaaaaaaaaacttaaatttaggttagcttttacaaaaatactgtcacacaaaaatcttttcaaaaatattgtatttttataaaataccagtagaacacaaaacagaacaactaaaaacaacagtacaacaactaaaaaacaacagtgaaaacttatcacagtacacagtgtaaaacttacacagtatttttgaaaaaaattccgccccataatataaaagtaaaaaaattaaaaatttcagtatgtagtgtaattatcccaaataatttacggcgtaaatacaattctcggttctagataaataattaattttaattttttacagtaataataatttttttattatttttatgctttaaaacagtttttttttttacgtttttacggaaatctaatagcaattaacggagcaacttaaattcacataataactcacatagaaattactggagcaactcaaaccgtaaatt

SEQ ID NO: 266666 - DNA, 3841 bp, Cannabis indica
ttttttaaaaaaaaaaaccgtttaaaaaacttgacaaatatagtaatgaaaaaaaaatatttttttttctcattcaaatttatgtccctccaataaaaattagatatcaaatcaaattttgtcggaagaaattaatatcatatcttaattattatttttcttttgtttaccaaaatgtgaaaaaaaaaacacatctaatatattatatattttccatataaaaaaaaacacgcgtttaaaaagcgcgtattacagaaaggattttcccattttattttcctttatttatttaaaaatataaaattgtcttaattaggaatttgcattgttgaataaattcaaattaaaatgaggtcggaatgaaattgaaatgcaaatgaaatgaaaatttattttattatttaaattaaattcactttcacgcgtcgttgtgatagtagaagtagtagtagtcatgaaatccgtggcaaaatactaatactaatattaatactaatactaattactaatacagtgattagtgctaatcctcttctctcagaaacccctgaccagaaaaaccaaaaaaaaaaaaaaaaaagactagtttcagatagagtgaatagagagaagagagaagagagagagagatctttggcatttccgccaaaagaaaaaatttatttatattgttacaattattgttattgtataatataattatatataaaaggttaaaagggtcggctttagatttggaggagcttccgccaattatggcagacaaacaacaatagtcagctcttgtgttgcttaaggtaactcctatttctctctctctctccttcgccattgttgtttatagcttatttctttgactgggtattataagatagttgtgttgtgtatgtgtaaatggtgaaatgctgagcttttgttgttcttgggtttattgattttggtgcttgcagagttttggaatttgatctggtttatttgggaaaagagggaagtgggttatgcttgaagtggatattgaagtattttctgaggtgggtttttgttatattgagtatcataataaatatatatatatatacagagatatatttataggagtcggtgatattggttttgtttgagtaagttgaaatgggtgacactgaagaagttcatagtgaaaggattcaaaggcttcaatcttcgtttggaacttcgtcttcatcaattatgaaacaacctttagccgtagaccaactaagcatacctcaattaaacccttcacagtttcgttctcggcattttcctcaaagctttaataatggtggtgatagtggtaagagagtgggtataccaccctcacatcctcaccagatcccacccatgtcaccgtattctcagatcccagtctcccgtccgaccaaccaacaaatgggttctcagaatttcaatccaggaccaactcattctcgatctttgtctcaaccagcctttttctctctcgattcactccctcctttgagtccttcgccgtaccgggactcgccgtcgacttcaatttccgaccaattatcggctgacgtggccagggactctaattcccatgcgctattgccgccttcttcgccctttggcagcaaaggtagttcaccgagggttggggagagtttgcctccccggaaatctcaccggcggtcgaacagcgatatcccatttgggttttcatcacccccttttactcctctgggagtttccagtggctttgagcggtctatgtcgagccgagagagctccgggtttgtaatgaagcagcccccggctcagttggtgaagaaggaaatgagttgggaaagaggtggtgaaagcaatgctgaaggaatgggagagaggaaatctgagggtgaagtggttgatgacttgttttcggcttacatgaacttggaaagtattgatgcattgaattcttctgggaatgatgacaagaatggcgggactgagaatcgcgaagatttggatagtagagcgagcgggactaagactaatggtggtgatagtagcgataatgaagctgaaagcagggaaaatgggagaactggatcaagttcgaataaaaggagtgctggtggagatattgctccaacctcaaggcattacaggagcgtttccatggatagtttcatggataagttgagctttggggaggaatccccgaaagtggaagtttcacaaggaaatcgcagtggacaacattccccaagcgactccatggatggaaactccaatgctttcagcttggagttcgggaatggggagtttagtggcgctgagctaaagaaaataatggctaatgataaactcgctgagattgcattgaccgatccaaagcgtgccaaaaggttatacatttttctacttagttcttcatttcggtattttcaacatgtttgttattgtttgttgatatattaatcacattataggattttggctaatcgacaatcggctgcccgttcaaaagaaaggaagatgaggtacatttcggagttggagcacaaagttcagactctgcaaacagaagctaccacattgtctgcacaacttacactgctgcaggtaccagagagttgtctcaaagagattattgatttgatacatacccctttctcaattcccatatcactaatttttttaattgttgtcttggtcttacttagagagattctgttgggctcactaaccagaataatgagttgaagtttcgtcttcaagctatggaacagcaggcacaactccgagatggtatgttgcatcctcatagatttttctgtctataaattcaattatttttgctcgttataacttgaacttgatcgacgagacagtaatccgttatatgggaaacatgtctacagaaatctctaatttgctctctagttcatggagaagtaatctttttcttttgttacccatatgttgtttggaatcaaaatacattcacatgttgtttttgtgtaaaaaatgctttcttttttatatgctcattaacttttaccttgacattacaaattttagctttattctaaatgatgcttagtgatattaaattaattaagttgatatagcccctaataagtctagcttagtggttagggtggagtgagaaaaagggggaggacacgggttcgaacctaagatttctaagctattagtaaataggttataccgttacgctacactcaaaagaagaaaattaaaggaaaaaaaataataggtaatcatgattttctacatttgcattcgtgtcgatgaagattcttaatagtattctttaagtaaatacctaattttgataaatttttaaaattttcataccaacttttaccaagattttcagttggagaagtattatgtttagagaaagtgtgtaagattatgagagaagttaatattatataagttcttctctggttagtttttcgatcaggtattcgctgagctcttgcttttagccctgattgagaatgaattttctagtactgctaactttttcttacctaaatttgatgtttgtgcttgaatatgacagctctcaacgaagccttaacggccgaagttcaacgattgaaaatcgccacaactgagctcggtgcagattctatcccttctaagtgcatgtcacagctctcaatgaacccccaaatgtaccaaatgcagcagcagcagcagcaggctcattcgaatcaattcaacaaccagcaacatcaacatcaacagcaagcctcgtcgcagtcccagattggtaacggaacctcaaaaaccgagtcaagttaaggatgttcggaaaaaaaaaagataaaaaaaa

SEQ ID NO: 266667 - DNA, 2116 bp, Cannabis indica
tgtcattacttctgttatttactcttataatatccatatataacatatgtatgtatgtatgtgaatgaggatttgaactttgaatgtttcagaagagaatagaggatttgacacacactgactgacagcatttcattgctcagtttgaactttgggagttacacacgtatcttttttatatttgaataacttctgtgtgtttttcaccatttgaaatcttctcaggtaattccattgttgtaacccttttctttgcaaagtttacttctttttcattttcacttccaagatacttctttttcttcttctaaaatgagcccttttccttcatctcatttgtgtgaaataaatttgattagggtcttttttctttttttttttcttcctttttttgggtttgttttattatatggttcttgttttgaggtggggaataaaaagagggatccattattttcatggggtcaagtagtgatctgtgtaaacctgagagaggtcatgaggggtcttttagattaaagggaccacaaagctccatgctttggattgttttacagtttcttgtttgtttgagtgatttacctcatcatgttgcatttattgtgaccttttttgttttgtttttgctcttccaaaaaaagcaaaacccatttgcttatatatgctccttttgacttggctttttgaataaataggactttctctacaccttctgatcatattattggattttttaaaaatgttgtagcatctctttttcctagaaaataataaatgttgttttctttagttgcgaaaattgaagaaaataagagaaaaagcaaccgcttactctcttcaagtgaactatggaagactttctttggggtaggtttgtgggaatgctgtcctattaactactagtggaaattgcttttgattttgacttgcatgaaggttagggaggtgcccccactttcttctctgtgtttttggcattcccactttactaattttcacaataattataaaaccattggtgaagaaaaaccccccttttgataaaatattctttctcttttccttttgaagattcatctttcatcatatcatttcaagggacataattcactgccttttgctctgctctgaatttgatggggcgtgtaatgcatttgagtaaatgtagtgcatttacactactatttttctttttgtatgtatgcttgttcatgcatatactactcagtaactcacctgtcaatttctttttatttttttttcttaattaatgtttttagaattaatgcattggatcttaattggattttttattttttaactgggctcacaaaattgtgttgcccatttggatggttatgttgaaaatgactggtagctgtgcattcatgaatgtctttgtccttactatgaactcacaggcgtcacagtgttttttttaagttctacttctcattatgctgtctttcatttttaggctgagatagctggagacaaaattggttgagattttcaatctttaaagccaaaagagagcaagagttctcttttccttttcgcttcaagttcaggttttatgatgcttgtttgtacatgggcatatcttctagtaccagaatccagggtgtagtgggggtttacatttgtaggctatgctttatgtgataaaagcccaagtctcaagtcccattacaaaggatgtgtgactcactgattctgcaaacttccttgacccagtaaggacttgtttctcaagcatctctcggttattaatggagctctgctctggtgttttcttacacttactgtttctatttgctttcttgttgcccttttcacagaagtgatgccttctgtaagtgccctcattcgggtgtgctttgtaactcacatcttcagtatgctgccggtgataacacatccttagagttagaggtaggtactatttgtgcagatcaatagataatcacagaagcaaaattttatacttgtcaatatcttattgcagaatcaattctaaattgtttttttttcttttatttcaactaatgttggaagagaaaagaaaaacttctcctccccttcccttctgctctggttagtggatatcctgtcc

SEQ ID NO: 266668 - DNA, 2734 bp, Cannabis indica
atactatattgaggtcaaaatgatcagaagaaataaaatagatagaattggaaaagaagtgatataattattagtttaaagaaaataaaaaatttataatatatagttatagatatacagttaaaaaattattgttagcttaaaataattaaattagtttagtttagtttcaaaattttatgaaggcagaacaaataaacaaaagtagtatcccatatgcgtaattttttaattttctttgtattaatattaattcaagaacaaccatcaagatcaaccaaccatacaaattagtgtataaataaatggatgatagaaaaagctagtcctttgttcatgagaatgagccatgtgaacaaaaaaagagaaaacgactacaaataataagctgagtaaattgagctatatacaatcaattatttaataatttttatttattattaaacttgccagtgatttttgtcctctaatttttgccacgttacaataattattttggatctctttcaatcataaatcatattccaatggccataagaatatatatataaatatatttatataaatttggtggaaattctcgtgagctcgaaaaatgtagtagctagtataggggtataacttataatataaataagaccacgtagtcagcttaaattatagtttaatgtcacgtcaggcatcgaatccagtccgtgtgcgatgtgggtgaatatatataacaacactacccatttattatttaattttatatatttttctcaatcacatattcccaacaatatttaattaatttcttcaaaaaaaaaaaacaatatttaattaattaaataataaccacatttccaaggagagttgtaaatacattacaaatacatgaatatgtaaaaaagaataattgccagtttgagttcaaaagaaaaaaaaggggtcccaggcaattatgtcggtttggtctctaatttaaaaagctcactaaaaatatacgtttacaaaatatgatatacatcattatataaaaataattaaattattagcatataaatatatatttactatatcattttaatatatataattaataataaaatattattgatattatcaaatgaaacttttgaatgtattgtacatttggaattgttatgttttgttgtatttaatattttttatttttcgtgacatgtccggtctaaatttatattttttttttgtgtgtctgataaaaaaaactcaatgctatttatagcattattacgaagcaccatgtataccatgcttccaaaagaaaaatacctttatagaaattataatatacccgtgttgcatacttgcatattatattttacaattatactttgctttctccttttttcatggctaaaatatattaagcaataatcttacgtactagtgtacccaggattttattcaagtagggctggagtaaaacactaaaacaatattatatacgtacaattaatgtaactatgtatatgtttatataatattgtttttaggtccgcccttgatattttatgaatattcttttttttcataaataataatttatgatcaatatagaagagttgggaagatcacttgttgatgccttgatggttaattaagcacaccaaatgctctaatctaattcatattcgcaattatataataatgatcaatattgtataagccaatttgaacatagggaggaacccttcaaggaaaaaaaaaactaacatttctagaattagaacccacttgatatataggagccaaattggacccgacttaattatttttaattaaaaagtaggggaaagtaaaataccacaattgtttcataatatatatatcttcaagagtaataatattgttgatatacatcatccctttacttatatacatacatatatatatattaataatagtaaaaaggttcatgatgtgtatacgtacaaactatctgtattgttttaaaggacgtacatatttatatatatacacacaattgcgtcatatgtacgtgttccattttatagataatcatgtgcgtgccgtacgtatgaaagtcattcctatatataatgttattattgttaataaattaagattcattgatgtttaaaataagcaaatatataaaaatgagtagtcgtttaaagataattctaaaacaaactcccggccgtattcgattgagtgatgaattatagaaaatcttttgaaaaatgagggaaaaataatggtctttatccaagtgtgtttacagtttttttttttcatatatattttgtatgttgtatattaatatattgttgtcagattagggactaagaattgaatccaaaatttatacacacttgacactagctagatataggataatatatttacgcgtgatatagcaagagagaaataatattcgtagtacaaaaccctttaatatatgccatgcattggcgccattgatcatatagtactattattaattaatatatatatatgtacaccaaaggaatatgcatgaagaactggtaagattatatatatacattaaagtgtgcatcgcatatatctttatatattaaaagtgtctatctaacgacaattcttggtttaacgatgttattttgtttcctccgttaactttaacagaatattcccaattaatttatattatttttttaacaaaatttattcaaaaaaatacacattccgttaacataacatt

SEQ ID NO: 266669 - DNA, 2145 bp, Cannabis indica
gtcaaaataataaaataaataagatgtcttaataaaatattaggatgttactagtaaattatactctctaaataaatatatgcgacaagtttatactatcttttacagaaaatgtcgtgcaccctgacatattaatattattgttgtttcttcaaattttcataaaattttaactaatttactatgtcaaatgttgtgtttaaacaatttcagacacacaaattatgtgtgcttgaattattctgttactggggtgcggtttgtttttcgggaagcaaatgtagttgctcatgtattagccaagtatgctttgataaacaaagttagtgctatgtggattggggtttctcccccttgtgctcgtcacgagattgaacgtgacttgccatttccttgtattcgtttaattaattatgaatttactttacctcaaaaaaaaaaaaacttattttttaatgcagtaaagtatttaacattttctaacagttatgcaaagtgttgtaaataattacaatgtatacactatgtcaaaaatattataactatccacatattgaatattaaaatatttttatattaagtataaaattatttaattcattttacttatatgaatttttttatatccattaaaattgattctaaatcaattatttaataaatatactaaatttcaagatataaggagggcgtgcatgtttctcctgcttttcccatggcgaagaagaagagggtcatctgaaagcctgtatctacgagcacggtgatcatcagagctgatgaggaacttccttctatccttgaagagagtacaaagcagatcatcggtgaagaattttacgattcaatcgatatactggagaatgaaataaggctagagattgaatctggcaatatattccctaaaatggttagttgggcagaggaggtcgagaaaaaagattatcaatcaaatgcgagtgaattgtggagccaattcaagactagtcaggtacatactccctcaaccagactttcttttattgaaccgatcaaagtagattactagcttgttgctaaactggacttagatgaaatcaaaattgaggcttcatactagaagaatgatactgttttgtattgttttgggtgttataatccaccattcaaggtttttgaaggttttgttaaaaagagtttggggtaacaggggagttgagaaaattgttcgaatgcatttaggcttcaccttagtcaagttgagagatgaggttactagagacatagttttggaagcaggagttatccactttgacaaaaagccagtaattcttcgtcctttgacagcagagatggattcaactcaattggttaactcagttcttgtttggattcgcttaaatagattaggtctccaatattggggaaagaagaatctcagcgcattggttagtactatctgtaaacctatcatgattgataaggtaactcaagaacgctcaatggtgaaattcgctcgagtacttgttgatatggagatctcagaggagccaccaaaaataatttcctttaataatgaaaggaaacaacttgtggaacaacaagtggaatatgagtggatcccctctaaatgctcggcatgtgggaatttgggtcatattgtggccaattgtaataaggagaggcctgtggtttggaagaggaagcaacctagggataataaggctaaacaggaagaaaaaaaggagcaacaaaatcacgatgcagggatagttattgaaaagaattttcctggtgataccgatgcttctactgaagcactggagggaaaactagatcaagaggaggttaattctgccctagaaaaacctgatggtagggattcaggtaattctaacacctggattactctcaaaaggagagggcagaagatgaatttgaattcaaaagtggaagctcctaaaacagttagcaacaatgggtatgtagctcttcaaggagttgtaaatgaggtaaaggttcccaactctaatttgatttttaatggaagtttgtaactgttggaaatattttcccacgatctagatttactaacaagtatgtttcattaacatcataaatggtaaattctactagtgtggccggccatggattgtggattgggcc

SEQ ID NO: 266670 - DNA, 3446 bp, Cannabis indica
tgctctcattctcatccaaccaaaaacttagtttttagtctttgtcaaacaactacaaaattgagagcctccttctatagtgatttcgaattccttcttattgttcttcatcatttcgaagtctttagtgatagagtaccatgcccactcatatcaagtcaagtactcaatcatagtgtggaagactgtggttaaccaaactgaaagagagaagatccaagtataaatctttataatattctactataaaaagtaatcaaggactagagatctgaatgaaatgagtcattattattttgttgtcatcaatgtaaggttttctaaactttatatgtgtttatttcattatttttagaattcatatttagggtattagattatacatttatattttacatacatgttagtaaatatagtaaatctaaatcctagtaaaataatttctaatagctaggtaaagttgtacagtttcaactctggcaagagtgaaaccgagagatagagagagagggtcgaggtctggcttttcgtggtccgtctagaccattggcgccgacaaaggtcgattctagtgttgtgttgtcgttgcataagggaaaacagagagagagtgatatcgggagagggagaagagggggattggggttttctagcttggaaggaacaaacttggagtccgttgggggtgggcgtagtcgaagcacggtgatcccagtctatactccggcatcacacagatttctcatagcccagaactccgtcggagtctttaacctatccgtcggtctcactctcactctccctctttcttttattttttattttttttaaatttatttatgtagtgtaaaaaaataatacaaaaatataaatatagtatttttaatttttttaacaaaaatataacataaaattaccataaaaaagtaacaaaaataaactcctataactccaaatattattcttaaatttgtaatttctaccaaatagtcaatctaggatctacttaaagaatattcttaatgattgattactctctttaaaacaaaaacaactaatatatataataattgattcaacaaaccagatcagtctggagcccaaaacacaggagacaactcaatcaaacataactaactccatggctcttccccagtgtaagctccatattctcatcttagttatctttcatgttattagattcgtcgtttttatattttattttttcatttttcgttatgatgtttcctattctgagcagtgagtttcaaagtatcattgtcatacacacacttttcttcctagttttgtaaatggttgactgaagtacttgattctggtttatgaattcgacaggggttttcccattcgggcttttgatatttctcactgttgggtgctctggaaggcctttctacccgcttcccagcaaagccggccatgaaaataaacaacctcttcaaacctttcgtccgtacaatatcgctcatagaggttccaatggggagatccctgaagaaacagcggctgcatatatggtatacagtgagaatttcgatcatagtttttttatttcattattctgagttgagagtattcatgaagaatttgggaacatttttgtgatttattttcattagttctgaactcacaatgagccaattttgaatgaatgtgaaaataaaagtggacatattttgatgcagagggctattgaagagggtgcagactttattgaatcagatatcttatcttccaaagatggggttctcatatgcttccatgatgtcacacttgatgatacaaccgatgttgctaaacacaagcattttgctaatcgtaaaaggacttatgaagttcaaggggtcaatgttactggctttttcactggtatttgacccttttacatcttttttgtttattgcataattgagcattgtgagtgtaaatgtaatgtacaataaatccacacaaatttgaaatgcatgtcattatagttagctactgtagttaatcacgaataagtgtgttgtcattcaacttaattaactggagattttggatattattgttcttttgtgcagttgatttcacattaaaagagttgaagtcattacgtgtgaatcagaggtacccattccgtgatcaacaatataatggttagttctttagctttgagacagacctccaaataaatttgtaatttactgttagacttaacatgaatttgtatcaactgagtgaaggatcatagactgttatataaaacatgctagacatatgtttgatgacatctaaccaaaattgctcttttgttttatttattgttcaggaaagttctctattattacttttgaagagtttattgatatagcactggatgcatccagagtggttggaatatacccagaaataaaaaacccggttttaatcaatcaacatgtaagtattcttcaagctattatagaaactaccatgacaatgaaaatagtatggagcaatgaaatctgaatgttgtattccttgagaaacagatagtacaatataggggctagtatatagatgagctcataaacaaaagttatcatgtaacagaaaggaaatacacgcgtaggtgaaaagttgtagtaatgctaatgacaattagcatcagattaagcctttaattgtgagttaaaataaaacttttaagtcaagtaggttataagctaggtaacaaacaactagtatcgatttatgaacgaatgatcttttttgaccatttttaaggaaacagatggattcgattagtaaatttgatggtgtattagaacttctgttggtttatttttactatttgtaaacctcaaaacataaatcaattttcacatcatacaggcaaagtttcttttgtttaacctttctgattcctctcattttttgtatttattacaacaggtgaaatggccaggtggtcaaaaatttgaggacaagttcgttgagacgcttaagaagtatggataccagggttcatatttgtccaaacattggatgaaacaacctgtatttatccagtcatttgctccaacttcacttgtatatatatctaatctcacagacttgcctaagatcctgttaattgatgatgttacagttccaactcaagacactaatcaggtctgcaatctttctcttttcgcttcctttttcttccttgaaccaaattagtcaatgcatcagtgattatcattggttccttgcatgggttgcaagggatttgttgacaaatacttcatgtttaaaatgttttcctggtttttcacattctcaagagattcttgaagatacttatattgtgattcaaatgatttcttgattgtcttatgtatactgatgataaattgtggctgcaaacaacttcattatcttctgacgctgctaagtcatagctgtttattagacattta

SEQ ID NO: 266671 - DNA, 2039 bp, Cannabis indica
ggtgtaggtattaattcctacacttacaagttacaagtagcggagagaagggagaaaatgaaacaaaagtagtagaagcacttaaaatcttggaagagcaattaagccttggaaataccaagttctttaggagctagatactataaacatacatggtggacatagcacatggataattaattacctcattggtttgatcaatgtatagaacaacttgtaggactcaaactcttggaccccaaaactttgcctcggctccatacttgggttcaagatttcaagcaacttcccatatatcatcaaggagagcctcattggttaatctatatgaaaagaatcattgtgtatgttgttttattcaatgtcatctcttgcaccttatgtaaggtagtgttttatttgttatgactatgagaagtgtttgataataagaaaataaaaagattaaatgggtggttttaatatgagtgctaccagacaagagtaaacaacaaataagggtggcaatagttaattactttccagtttagtctgcttggcacactctgtggttgcctgtggactttgttttagtctcgccaacattgtgttacgttttcttccagctttgttgtctttatttatttatttattattattattattttttcatttcaagttctcctgctgttgtgtttagtaccaatttagactcttgttgtagtttttttctatgatttctaaactttgtatcaatgtttttcaaatactgtttacagggatcactcgcagcaaataagagaaaaacaagtatgtcattacacaccctaatagatgtagaacaagatatatttttaatctttaataatatttttattgaataatctgaaatttaatatgtgaaactatatctattatagcatctaatttcatatgttaaaagtataaaaaggcactcacacactcacttaaaattctctaattagtttttaattactatgatttcattaccctatattacattattatacatatatatttatataaagaatcaaatcacttttccatttgatctgatatatttcaatttacttctattttaatcaatattctatcattggttattgcgtgaagaatcatcatcaagtactataattaattacaatataagttagtaataattattttattatattatataattaattcacccaaaaaaaataaaaattaaaacgcaccaaaccttatttgtgactcaaccttaggaaaataaataaataaataaaaagtagactaaactactaatgtttcttcatcaccaattgccaaatgtttggtgggtaaaacttattatttattataagatttggctaatctaatctaaaagataataagtagcaaattagggcccattaatttattctaagcatatatagtttttgttaattagtaaaatatattggcatcatatctattgatttcaatgtctctctctactatattaagtctatgattttattacttattagtttaggtagttttgttatatattttcttcatttattaacttttaaatttgagaggaaaaaaaaaagaaaagaaagactttttttttatttattaatatgaggttaggcagctttatttaaaataacaatatcaaataccaataactcaatttttcaatctaacatatgatgaatattttatggcctattttattattagaaaaaaaaaacacatgcataaattaaattgttaatgatcatttaataaatatatagttgtattcttagagttatagtattgttaggggtttacataaatcgatccaatataataacaaccgatcgatctatcatctaattacaaccgaccattaaaaattggatatctagttgtcattggatctgattggatgttatttttaaatatctaattggatcagatcgaatgttggatggggtgttcaaaaatccaatatattcaacatctaatcggactaattagtattttcatttagttttgatgagtaaaagattttataatgttatacgtaa

SEQ ID NO: 266672 - DNA, 7294 bp, Cannabis indica
aaaataaattaaaaaattcttctaaatatcgaaacaaatagagggtgcatcagtgcatcccttttaaggggtgcattgtaaaaatactcaatgttataataccaaagagggtgtatcggtggcctccttttaagaagtacatttttgaagtattcgctttttgaaaaattctataatgtacccatttaaaaggggtccaccgatgtaccttatctgttttggtatttgaaattagttcaagtttttttatagttgtctacattgtaattatttagaatacccaaaattttgaaaaattttaaaaattttaacatatcgaaagtgaggtccaagcagtctgatactcaacaaactatacaaagcactaaactatttattagagaaacatagagaaaataacaaaacgatgcatttattccaatgttatttcaacttgaaaaaaagtgcattatttcatatttgaagtacactacaacatcaacacaaatgataaaagcctagctgcctctctcttctaaaggagcactaattaaatctctccttaactctttttgcttggaaaaggatgaacatgattttagaacatctcctctccaacaataaacatacattaaacttcataacaacaacattaaaaagaagacatcaattaatctgaaaatgatgacacaaattatcataggacctaggcaaatttcttctacttttttaacttgagacacccattttccaagagagtgcaaagtttttccctacaagcaatgacaacccattaacttcaaccatcacactcttgctcttcccttctccattttcatcctcatcttcaccttggacatgaacttgatctgataaagtcatctccacactagaagaaccgggggtaacggccttaccgtcaatctcaaccgccgaagcgccacctcctcctaatcccaacacacttactttcccaacaatccaaccattatccaaagcaaacttaccctcttgaacttctgaccaaattttaacataccctttactcacactagcatagaaatcaacataactagattgaccattcccaagtttcatctcaggaagttcatcatcatcaaggaaaagttttccctcagcttttccatcactttccccagctgggaaagttacaacaagtgtgaaaggtgttttcctagcttcctttgaaatcattccaccttgttgcattggtagaattgtgttttgatacaaatgaacattgacaacatgtaatggtgcatcaagagtaacatattttccacctttagatacaatggtttgtgtcatatcaaataagctgtaccatgaaccaggagggaataaagctttgacctttgacttaccctgttctagaactggtgataccattaaaccacttcctagcaagaactgagtactcaatccataacactctgtgtatgttgggaaagagaaaaaaagtggtcttgcaattggggcaccacttgtatgagcttcatatgtcaatgtgtaaagataaggaagaagcttatatctcatccccaaagcatttcttgctgattgagctacagagtcccattggtaaagttcttgtcttggtgagtagtaattagcatggtctcttgagaaagggtagaaagctccaacctcaatccaacggttgcagagttcttcggttggttgagggtaaaacccgcaaatatcagcaccaaccattggaacaccaaagattccaaagttgagcatggttgatattgagtacctcaaattttcccatgtgccttggttatctccagtccaatgagcagcatatttgcccgaaccgacataggttgagcgtgacaatatgaagggtcttttcccttgaaggccttgaagagctgaatgagtagcaactgattgagagaaaccatagagactgtgagcatcgtattccattactccattgtagtgaactgcactagtggcaatggttttgaatccaatgggaacttgcaaacccgaggcgttgatcttgtaaggtggatcatcccatcttgtgttggttatgttcttgcactccaagcaacatatccagccagggccggtgccagtagggcattggccctttggcattttacattttcccgagcaaaaattcgaggcttcattcatgtcaatccataggccgtccactgggacaagttcatggaaacgacgaatctcatcaccccaccacgagacagttttcgggttgaggaagtcagggaagttgacagcaccgggccaaacttgagctagataaggctcattgtcatacttgatgaatacgtcgttagcaaggcctcgttggtatacaccataactcgagttgacagcgattccaggatcaataatgacaatgtacttcatgccaatgctgtggattttgtctaggaaagccaagagctttggacgaggatagttgttggggttaagggtgaaatctttgtgtccatccatgtgatcatcatcgttccaaatcacatcaagtgggatttgagcctttttgtaactctcaacaacttcttcaactactgatagattgtggtatccccatctgcattggtggaatcctgcaataccaaaatagcagagtttttaactcaaatcagtaaagggaatgcctttaaacactctaaattgacttgtcatagacccttttagggaaagttgataactttggtaggtgtagcaaaattaacatgcaaaaaacacatgtgggctacttaataaaatagtgatcttggaccaaatataacctatttgatcctttctcccaccgacacttaaaatagtaaaattaaacaaaaagacacaacattgacatttgacactgtagagacttcacatgaagcattgccccaaaattgaggaaatgaattgggcaatttccaccgagtattgaaaagatgatatttttagggttaatgatacaacaatttcaagggtccacatgtcattttagaaagtaatatgcaataataggagtcaagatcttagctaataaagtaacaaaaagagtagatcattttgatataaagccataataataataattgtagcttcccaactttacaaatggccttgtctttaatggttacctaacaaaagactcaatttttaaagctattactaatcaaagaaaacaactttgtagacccaaaacaaagatcaatgttaagagattgataaaaaggtgtttttttaataaagtaggtaaaggaaaaggtaatgagccaaaccacccaccaaccaaaattaaaagaaagaacaaaaattaatcataagcttaaacaatatgcccataatcacggattgaccacatgactacctataatcccaaaactcaacccatcaaagctagtcttttcttcttatctaaataccatatctttagtccataaataaaattaatcacattctaaacaaaatcaaaacacatcaatccccaaagcacaatacataattgaatcaaaaattaaatataataattaaccaaatcaagaatttgggaccacaacaacaaaaccaaataataataataataaccattaaatatctaaaatgaagataatgtaagaaaaccataccaagagaccagtaaggcataggagccggacggccgataaatgacgtgtactgatcaacgacgttaagaggagacggcccagaaaagaagtaaaagtcgaaaacacccccaataaccttataagtcaaagaatttcctctgtaaaaaacgtccattccgttactgttaagtaacagaacggcgtgagagtaagcttttccgtcaacgttccggagatccatgtacaccgggtgggagccgtacagatcggtattcagattaatcgccgaggcatcggttgtgtacagagtgtacggatcgttagggtacagcttaataccgtggggctgcgtgttctcgccgagtccgtacaacgacgcatctttgggtaacctagttgaaatctcgagatactgatctttaaacactaaatcgccaaatgggtctgatttttccgagctggtattgaagaggacctgaccgtcggattttcttttgacggcgaaaccaaatgggtcggaaacgaagctgaaaataagctccgagccggaatattccgaaactgtaatggggtttttcagtgaccggccgagggtcattctcgaaaccggaggcttttctctcggcaagagatcgtacggaacttcccatctttgtttatcggcgtcggtgatatgaactctcagacggtcctctgtttcatgcctgagacaaaaaacagagcaaagcttaggaaaatacaaagaaaaattattaaagcgaaaaacgacgtcgttttataagcttacttaacgaagagctgtaaatttgggatatcagaaccgtagacattgtttttagttttgacttgaagatgaccgattaaagcgccgtctggggtttcttgtacggcgagtaaacggtaaccttggcctatcttagttggagcagtagtgggctttttcttggacttggaagaagtgactccatgaatggatagaagtagagatagaaagagtatagagagacataaggaagaagaagaagaagaagaagacatagttgagttgagttcactctcttggaactgagaactattcggtgttggaacttgaggtttataaaatacgcccaacacctttatttttattttgcaataaaaaaattaccacaaattcgattttttattttttagagttttatcccttaagttattatcccttaagttattattatttttttttttgtaaaaatttatttgaactgttaaaattgttgtttatgtttatttggtggttatgagttacaaatacaatataattacaatataaatataagagtttatgatttaggtttattactttgttttttcagtaatttttatgtgggttgttatatgaattttagttgtgatttaagtttatgttagtttctacaagagtttttgtatggacgtacgtaaaaaatacaaaaaaaaatataataaatatttaattacgtgttatttttttattagtatatttaaataaatttttaaatcaaaaataaaaatttaattagttggatcaataaggattcttacggtgtcatttacttaatattcaaaaatataatttatgtattattacggtgagaaattaaacttatttatttatttataatcaagaattatacttatatatttatggtgcaaattattttttattattatttagacttgtatcaaatttaagttaccttaatattaaattaatttttataattcatgatgaacttttataagataaaaaattagcggtgttcctataatacgtattacggtgtatcaatgtatgtactctaaattgttttggttgttttggaattttaaaaaaaaattaattttaatttttttcttatagacatgtgtgttataaataatttacaatataaaaattaatagtgaaacaatctattttttaaactttatttttatgtgttaattttttattttttatgtgttaattttttaaaaaaaaaattaaaaatattttaaataattataaatgaccatcaaaaaaaataaactcaaattttttttttcaaatactaaaatatataaaagttcatagttggaggtcacccctatttagtctgaaaaataaaaaataataattatcgagagagagaaaaagattgggtacgtgtgggggtgcctatgaccgttttgtgcacgtgactatgatggggtgtgtggggttagtgggtcccatctattatacgtaatttttagcgtgggtgggccccacttgtcgggctttgatttacgaaaaaacggtatggttagagcagaggatccttctgtggcgctcatcgaatgggttacggtaaaatcaagatggtgaggtgtgtgattttgattgggtaagaatatggggagtatttaagtagagtaaggtttgagcgtagaggagtaatttgaagtgatttatttaagtacacgtcacgtcgtttgaggttaacgttggatgagaagtgaggagagtggaaaccgtgattggcggtgtctattaacgtttcatgccaatagttcactcacgtgtaagttgctcatcggttgtaattaactagagaattgctaaaatgattacttaatcatattttattagtataattaagtgtcgggtctcatataatttaataaattaaacatatacatgtccgaacgagggtgctatcctcatctctatcctatttaatatccgaggatcaaaaattatctccgttcccgtttcatttctattttcaatttaggtgggaaatctgtgtcctatacaggtactcgtggggcccattatactcatggttaaatttctatccctatatatacgtcacacaataaatggagaatttttttccatttaaaaaaattcattgtctatcttaatgcaggtattcaagaaaaattaaacaataaaatattaatataaaaaaataaaatttttaacttgtgatgttcaatctcactaataaaattcttacaaaataaaaaaaatgattaatattaaatatttaataaatagtgtaactattataatttgaagactttatatcacttaattgtgatcctctctattgctaaaagtgtctctattaattatatttgatattttccaaatattaagtttggaaaagactcctttcaaaattaaattaaagcagtaattttctttttgtttgtagtgtgggataaataattaaatattctcattttttagtacgtaaaaattcagcctaaaattcaattacaacaacaatgccatggcctatttcatttgacataattttggcttcttcttcttttttctttttttttttaacaagaaaaaaaatgcaatatattatagttattatgtattaaaatttcaaccacagcaaaaaaaataaaataaataaagtattaaaattttgaaagaatattttgaatcataaaaacttttgcaataatatttcactttttttttttgagaaataatgaaaacagttacttattttttcaatatcatttattaggtttaatagaaaacaatattttctaaactaatcctgacaaaaatatatatataaatttgaaacttttttttttcttttgtccagaataagaaagtagtaaatctaaattatacgatatatatatttacttctctccaatatacaaatatacaaagtagtaaatgtaaattatac

SEQ ID NO: 266673 - DNA, 1844 bp, Cannabis indica
tttaagatgaatttataaatcaattagacaagcaattgataaagtgagccaaaacatacacaaatgaatgaaaaatacttctgtttctttattgatgttgaataaaatagattacattgaaacggagttttatttagggcataaaacctaacaccttcgccattaaaatttatttgatgaaggcttatgacatgttgagttggtagttcattagacatgtgctccagtgctatgataccctagtgcagttctgtaactgggtggatcagtgtattactaccactaccctaaatgtgtgccttaatgggggtcaagttggaaagattaaacccctttgtggtctgcgccagggtgaccctctttctccttatctattcatttgcgcggctgaaatgctctcttatgtgttgaatgaggctttggagaagtgggttattaaaggtatcagactaagcaataaaggtccgactctcactcatatctttttacggatgacctcattctggttgggagggctaatgttgatgaagctaggggagtgtggaactgtctggatgagttttgttcgtggtctggccagcgaatcaataggctaaaaacgtccatcttttttagcaaaaacacgtcggattaggttaaaaccgacattaaaacgaacctgggtactagtgaccttgttacgaatactaggtatctggggcttcccctgtttaggtctagacaaaaggatgttgattataattccattttggataacctgactttgaagctgtagggttggaaagttaaatctctctcgaaagctggtcagacaactcttatcaaatcagtgggtttggccatgccttgttatgcgatgcaaaccacgaaactttcaaatcatctcatgcataagattgatggcatggtgcgtgatttctggtggggtttcgagaaaggtaaccagggcatgcatctcaaggcttgggataagttgtgtcttcccaaatcccgtggggggctgggatttcggaaaacaaagaaatgaaccttgctttcttggctaagtggggtggaatcttttaattggttgccagtccctctgttgcaaaatattggaagcaaagtaccttagaggaaaagatttcttatcttgccagtataaagactctgactcctggttttggaaaaacgtggttaagtctaagactattttgcgtaaaggggcctgtaaagtgataggggacgggaagaatacgagaatttgggatgacccctggattccgcatggtagggacttcattcctagggctagagctgatggttagtcgatgcatcgtaaagtctttgatctcctttctgatgatggggattgggatgtccggaaattaaaccttttgtttgaaaaagagacggttgtggctattcttaaagggggtaaaccctcgggtcaggaaccggataggtggatctgggcgaaagagagcaatggtcgattttctagtaaatctgcttacataatccaagcgtttgacagaatgccacgtgttgatgtagctcctaccctctagaataggttgtggaacagtaaaatcttagagcggcacaaaatgctatggtggtgtattctttcaaaggccatccctgttcgtgctattctggctaaacgtctgaccattgaggatgtgtcgtgccctttatgtgggggtagtgaggaaacactggaacacttatttcttacttgtaactgggcttctcacttatggagagctttcccgtggggaatatctcctaatcctaatcctggaaatcgtctctgggactgggtgaaattcatctggagacttgacaaaatgggcattaat

SEQ ID NO: 266674 - DNA, 1516 bp, Cannabis indica
tcctggtaaaacatattcaacacaaacatcacctgctctaaacttttcaccactgatcactactcttgttccatggcagcctccaaacttgggttcttacaaactaaatattgatgtgaccttaaatgctaacaagaatatcattagtgtgggagccattgtacgagatgctgctagttgtgtagttgctactttttcaaaatctattattgggaactttgcatctcatgaaatggaggctaaggcattatttcatagtttgaattggctgctccagatgcaattgtcaattgatcacattgagacggatgctttaatggtttcgaaagctcttcatacgccgactactattctcactgcttttgatgatttaattttagatatatctagtcttttatcctttttccctagagttgttgtcactcatgtcaaacgtagtgccaatatggccgccccacagtttggcaaagtatgctctagagttggatgaagattgtgtttggctagagacttgtcctctatgggtgagcatttaacccgttgggccgaccaaatcggtcgacccaacccgaatctggggcgaaacaaccttgtttttcttgggccgaaattaaatgggtcaaaagtttcttaacccgtattgattgggtttgtaacggactgcattcattgtaacccaaccaacccaactcgggccggcccaataaggtttatagaaaaaaaattaattcaaaccctaaataaacacttttgtctcccctccctaatattcatatgccatacatacataaaaaaaaaaaccctagcacactaccgccccctcttctttcttacaaaaaaaaactagttgtgaatgtgattccactctcaaacgactccaatcctccacccctccgccatctctagtggccttattcgcccacacaaacgaccacatcgtttcttgccttgtcggagataacaacaagtaagttctcttttgtcttctcttttctaatccttttcttttctttctatttttttttttcgtgttgaaggatttggagctcatttttttctgtttcgtaagaatcttcgcaattggccagacattggagttcattgttctcaggtgctcgagttcgttgttctcagcatgtggtatgacacaatctcctcccttccctcatctcagttgcaccgatttcattctgcagatgaaaaggtcaatttgattgtcgttttactttctttcctttttatttttatgttgtcgtttgacaaattcagttgctatttattattatttacaactttacaagacaagatgagtagatataggaacttttctagcacgtgtgaatggtatatacatatattgcctcctcacatgcccagtgtcacacttctaatctcaggttaatacaaactcaggttttaatcttttttttttcttgaccttatttttaatttttgataaataataatatgatttgaatttgattaggtatgtgatgtctttgtttttttttttttt

SEQ ID NO: 266675 - DNA, 1472 bp, Cannabis indica
ctggtaaaaaaatattccaacactaggagctcaggttcctctcggagccatacaagcaactccgacagtagtcttgctggcacctgatcctagacaacctattagacaactcggttttcctcctaggacaaacaagcatatagccatgatatatggaggtccctatatcagaggaacaactcgaggagagcaaaaacggtatgtccaagacttggatcacgatgatgaggtgtaggaattaaatcatttgcctatctgaagacccagactcatggaccaagccatgactttcacaaaagaggatgcaagatctgtacactttcctcaccacatcccttagtcatatagactccaattgtcaacaaaatagtagctcacattattgtagataatggaagttcagtcaacattttgttcaaggttgcattcttggaaattcatcttactgaccaagacctggccccatgtagttcccaactcactgtttcaacggggatactttcatctccataggaaaagtgtgtctcccaatcacattctatcgtaatacttctcagagaacctttaagcattgtaattttgtggtcattgactatctgatagcatacaacactacatttggttgtctgacactagtagacttcagagccataacttccattcgacacttgtgctaaaattaccatcccactatgttagggtaggaatagtcagaggagatcaaaaagaaggcagaaggtgctatgatgtagcttcccaacaaccagtcctcatggtctgggaagtaggaggcgtgaacaagcaacatggagaagatgtcttagacccctatgtgggtgtcgagaagatcttgaaatcaatggaagatgtggaagaagtccaagttttcatcaaatgaaattaacccaaatgaaatttaccacatcttaaatgtgaacccagatgtaccgaccgtgcaacagaaaatgaggctcttagacccaataaaggcagaagttctgaagaaagaggtaaaaaaaaattcttgtctaacatatttattagggatgtgtactatcccaagtggctagccaatccggtcatagtgcctaaacctaacagaacctacaggttttgtgttgacttcaccgacctaaacaaggaatgcccaaaagattgtttcccactgctcagaatagaccaaatggttgatgccacatccgagtatgagcttttgtcctttatcgatgcttaatccgaacacaaccagatcaaaatgcatgtcgtggattaagagcacacaagcttccagattgacaagggagtgtattgctacttattgatgacttttggtctaaagaatgatgaggccacttatcagagattcgtgaattgtatgttctaggaccagttagggagaaacatgaaaatgtatgttaatgatatgttggtcaaatcaaaaacctctaggagtcactcaaatgatttatagg

SEQ ID NO: 266676 - DNA, 3330 bp, Cannabis indica
ataaaaaaaaaatatcaaaagaagagtgttatgggatttgaacttataaccttgaataatatgtcatccacctcaactaactaaactatgaatatttgttgattacaacacaaataaattttactcaaataaaagcctaataatttttttttttattttgggcccccgaaaagtgtgggccctaatcgcaggcctagcccgcctatgtctaggatcggtcgtggagacacttcattattatattagtcctatacatatattttctttaaataaatatatatataaaaaaaaactgtgaatcacttatgcaatgtaatattattgagtcaattatttccaacttagtcatcattggaaagttgaataaaaaacaaagtaggcgcatgcacaaattgatgaataaactctatgagtgaatgtttacttgtggggaagaagatagaatagatgattgattagtatatatatagaaatatataaatatatacgtgtatatttccttatacaatcaatacgatattattaatacacagaattgatttgggaaaatgctgataatgatgaaattccagcaaaatgggcgactacgtccattatacatgacagttcaattctctataacgtataacatgttggctgctatgaacaatttagctacgtcaccttcccatttcaacatacaattcaattattatacatacatatctcttaatatttggggatcaacatccaattcaattcaattatactgaattaatctaatctaatttaatcataaaagttggatatccatttacaattaaattgaatgtgaattattgaattttaattatattaccctactaaccagctaggcatgttgttgtgttttccttaataattatgctaatcaaagtgtttaatataaatcatatttaaattataataaatataaattttactaaataaacataataaatactcaaagtttaaaaattccaagatcttgaatttacttttatgaaaaaacttgtacaaaaagcagcataactaaagtgtcgtccagcaattagcaaaatggaacccattttgtttcgaagattcgaactctctagatctaaccatctagatatgtacaatcttcattgagctcaaaactcactattattgttcaacttttgtcttgcctttacttacacatagaaaatatatctgtgagatgacaaaactcaatcagaaaggtataaaacataaacatataacatcacttgtaattaggctcccatacacctaattaccacaaatctaaaacctacgtctaatgcgtattctcgaacgttcttgactataatatcattgactataataccacatgcactcaatactctaggtgtactaatgttggtagcatcaatccatactataagtacaactagtcataatacctcaattctgtaattaggtgtgccgatcaaacttgagtggaaaaattgctcgacgatcagagaccctaagtccaattaatgtaaaactagtaagtttctcgctaaaatacttttggggactaaaactcataatttgaagtttctatatcgataaataacgtagtaataccctaaatatcgagaaaacataaaaattgaggtacccaaaaattaccccaaacgggtaatcgtttactgggactctgcttggtgaaatggttcaccatttctgtgcataaatcacaaactcgaatttttcttcttcaattctaacccaaatcgattcctaaaaagaactctaaaaatcatgtgtagtttagttattatgtggttttcttttagttaaaatttaaaatcaagtattgaactgaaatgcaattaaaaaaaactgatctaatttagttattaattgaattagatcatataataattttttaaattgaattactaattggattaaattaaattacagcagaaatgctggattgaataggatagtcacccttatcttttagtatatcattcatcaaacaagaatctcttatctaatttcattgccattatttgtccaaccaataaaatgatgacaaataatttaggacaaaagaaaacatatgcttatttaactagaaaattatatattctctttcataaaaagtgggttgggtttaatttctaaatattaccatttttgttatataattaatattattacacaatttttttggagaattttaaaatactattttttatgttttatttaaaattttgcaacctaaaaccttatttacataaatactataattactaaaatacagttttctcagtaaaaataagaaaacaactaaaaaataacgaaaaattaacctcacgacaatcataaattaactataaataaactataaaacaactaaaaataatcaaaaatatagttttatgacaactataatgcaattataaataaactataaaatagaaaaaatggtttattatttttaaaaaatgtgtttttataaataaaaaaaattgaaaggataaaaataaatttttgtctatattcacgtatttttgtaatttttttttaaattttaatttattttttaaaaacttaattatttttctatgcaattactaacctctataaaattataaattcatacgtaattaccacttgtattatgcaaattacaagattccaaaatcgaaaaagctataaagaaaaatccaaatggaatttgtcacaacactcccctcctctccaaaatcatctcttcttcctcttcaaactaatcccaaaactaacacacaaataaattatttttttctctctcatttcttcagctgtcggcatccctctcctctatttatgaaggaatatatgtatgggtgtacataaattgatccaatccaatgacaaccgaccgatccaatcacaaccgaccgccaaacattggatatccaattgtgatcggatcggattggatgttatttttgaatatccaattagatcggatcggatgttggatggagtatctaaaaatccaatacatccaacatccaattaaactaattagtattttcatttagtttggataagtaattagattttataatgttatacgtaaaatatatatgtatacacaaaaattaacattaaaattttactctttttttcttagattgcatggatccaatctaatccagtacatattggacctaaaatattggatagatccgatccgatccaaaaaatactagtctaaaatattgaataatttctaacatccaataaatatatgaaataatatatatgaaatatatccaatggatagaaccgatccaatccaacatccaatggatgttggat

SEQ ID NO: 266677 - DNA, 3742 bp, Cannabis indica
tatcggattccatataatttaatataatagtttttaggaagtatcgctagctaatcgcaatgtgatatgtcgagatagtgctaggcaccacccaccagtgccttataacaatactctttgtatatttatatatttatatagataccagtagactaggcaatggaggaccccattttcattaaatactatagacaaagatcatcagtttaataatgttgcttatggcttgtgcaatcattttctatctcttggcctgctggagattttttttaagggtaaataagacactatagatgcttttataaatatatatatacaaatataaatgattgacctcaatatatcaggtcttacttagaatctagaactagaacaagaagtaagtttttttttttcttttgttgattaagctttctccaatgtacatatagtttggtgatcttttacacaccttaagtaatttctagattcctaattctccttcaatttattttcatttgtttttaattactatgtatcttattggcatttcaagtaaaatattcagtggtacatagagtactcccaaccgttttttttattctattctttgaaatacatcactaaaattacaagttgaggaatacatcttttttatattcacttaattaaaaataccttcatattattatttttattaaaagagacattcattgaacacaaatcgaaacaacaaacagagtcaaacagcagccataaagggggctgcctccctaaccaccgacaaacggcttcaacgaataactctagcttggaaagccagaaaatcagtcatagagttctccacacgaggaataaatttaaaagagaccaaactgacattaaacagtaatagctaaacatttcttaaaaattagaaatgaccaccaagctaggggaagctcacccaactcaagggcctcaatagcagtcttcgaatccgactcaattaaaactgaagcacacttttcctccctaacatgttccagagccgtgtagatagccaccagttcagcttcaagaacattattgacaaaacagtgagattgaatcgtaacaacattatcgacatctgcagcacaacagaaaactccaatccccgcaaatccattaaggacagaagcatcaacacgaaaatgagcatcgaaactagaatcagacacaagtccccgagtacccgactctccctcctgaacaatcataggttcacctaccaaatgaatagcagaatactcaactactcttttagatatataatcctatgtgacacccaacagagggacagtgccacaaaaaatgcaattatttctgcaggaccaaattccttcgaataaacacgcagcaaacatcatgagattactgtccttgaaatcgcatagccaggtgaagaagtcttcaaaggactcgaagctagactatgagttttaatctccagggactaaggaaccacaagccacaggcaaaagcacaactgcaaaaaatatgtatctcagattctacctcttcaccacaaaaagaacataggcaatcattgtcttaaatggaagacattttgccagaaatttccataggagcataatttggcaagggtgaattttaagtttccaaagcttcttccacacagtcctttccacatgaaacctgggcttttgagccaagtaataggcgtttttaactgagaaacattcactatggcaagtcttccaaaacagagtatccacatcctcctccaaaggccgaatcgatataatagcagctgtaacttcaagagcaaaacaatgagaaaccaattgtttgtcctagattcaagtacctagaacatacaaatcagccacagatgaaaaagcatgagttgttcgatatgaaaaaacttctttgcacctcatctgcactgaaccaaggaacccaaggttttgtccagatatcaatctcccccttcccaattaggaaccccgcactagctacacaaaaatcacgagcctcaaggatacctttccacataaaggaatctccattgcttttttcaacattccaaaaatcaagtttttaacagtattttgcacaaagaatttcaacccacggccgactgctattacttaaaacataccaagctaattttaccaggagtgcaaggttcatatcacgaaaccttctcaaacccagaccaccatgttttttcgactgacaaagatcagcccaacatttcagagccaagtaatggttgctggagttgaaatccctacttcctttccaccagaaacgagccaccactctatccaaatcagagcaaatcgaagcaaggattttatgggtggccatagtatatcaaggaatgctatgtaaaaccgagttgataagggtaagatgatcgacctacgataagtttcttgctttccaaccctctaaatggttgagcactttcgttttgagaaaagagaaatcttcatgctttttcgcagatataaagaatgggttccccaagtatttttcctttctacttagaatgtgcattcccagagtattcaagattaaatcttttgcctcaattttggcttttggggagaacacaatgccactcttggccttactcactttttgcccagaccagcgttcgtatttttcgatacattagagtaaatttttggcctttgaattacttgctttgcaaaaaaagattgcatcatccacataaaacaggtgagagatagccgtggcatttttaccaacctttaatccagtacgtttgcccctattctcagccctgcatatcagttttgaaagaacttcgctacaaaagatgaataagtatggtgataaggggtccccctgccttagatcacgttcagggtagaaagaatttaaaggagctccattgagaaggatcgataatctaactgaggtgacacaatgcatgatgaggttgtatacattgtgactgaacccgttggcattaaggaccctaccaagtaaattctctaacttattaatttctccttgtgtcactatagattcagaattgcactcttaattatatagaatgctctagatacactatgaattatccattgttctattccaaatagtcaaagatcctctatagatgatctacatctaacagggacaaatttaccgttctacccttcaatgtattttatccttaaaatacttagctacatataaatgatatttcaataaactaatataattactaaaatgagatctcaatcatttatctttattaagccaagctcgaaagaaattatcgtttcacttctaaatacttatagaaactatagattccatatctatgattagcgctccactcaattatactatcatgtccttaatttgtatgtcatgagaatatctaattggtcgactttaacgaacaaattgaagaacataaataatacaattaagatcgaatctaaccatcttaggattaagatctatagacctaagatcaaccagtgatattgacttagaaagatataacggtaagtttatgttatcttatctaagtttaatatcagtctaatctgatatgtaaagcccgcttagttaatttggaaattagcagttggttatgtttaatcatgaaattatttatagccatttaaataatttattattgatatttatggaattcagatatgcatgtgtatgttatcagtagcttttatgtttcgcatttccggtgtccggtattttggaacgcggcgtt

SEQ ID NO: 266678 - DNA, 1389 bp, Cannabis indica
aaaatggtggaacgatcaaagaatgtggttaataagggggctctctagttttctattcggtttagttgaacatatgttaaaatcattaggtttttcttcgatgaactttagcgtaacgagcaaaataatcgatactgaacagagtaagagatacgaaaaaggtgtctttgagtttggacaccattcacctatgttcgtgacattaattatggctgcaataattaattttgtcgctctagtttggggaatcaagcttgctcttttagggggcaaaattgtgtttgaagagattttcatgcaagtgattattgcagcctttggtgtggtgaattgcaagcctatttatagtgccatgttttttagggctagtaataaaggaggaattcctaccaaaactactttgatttcaacctttttagcctcttgtctctttataataagtttagtcgctttgaaggactaaaaaagtgaccccatttaagctaattgattttgagcttaataactcaaaaatcttgagaagaattgagaatgaatggtgaaaaggtagacatcattttgtgttttaaattcttgttttttttctccttttttttttattgggaaattcttgttgaattacaataaatataagagaatgtgctcatttagtagcttgtgttttcatgaaaaatatatttagcgtcttgtatttgtaataatacttaattagtacctcatattttcaaattgtacatatctgataccttaaaataaaattaaatcaatataatttaattaatttaaacagatttaagttatatataattaaataattaaatttgaattcagaatttataaaattttagacagtttgattgtatggataaaattttattaaaaaaatttgaatttagaatatcaaacatgtatgattttaaaatataatgtaccaaataaatattattgaagatacagagtacttaacttatatttagataaaaaaatacgatactaaatgtatagacaccctaaataattaaacaataaagaactctattgcactcaatatttatttatttttaatataattatagatatatatatattttctaaatcacataattggaaatgaagtgctacaaaaatgaactggattcatcatattcttgttcttgatcatctaataatgtagtaggattatatgacaatatattataataagaatcaccataattagagaagaagccatatgagaaatattagataatgaaaataagaaaaggtgattaagcaacaaaacaagaaaaaagattttgaacgttcaaatgtaattaggatgcaaaattttcttgttttttttgaaaggtaaaatcaaatctttattaaccttcgaaatcagtcaccaaa

SEQ ID NO: 266679 - DNA, 3975 bp, Cannabis indica
tctgttattttcagttataactaatgttggcttttgcctataaataattgtattatctccatgtaattttacaattcacatttcaataaacttttctttacaaacactctgtcatgtcattagtgttctgtttctaatacttataaaaaaccctctattatagtggaagaatataggaattcctattacacatgttgagcctgattctcacgtagtggcttacaaagtcaattctcagtttatggattcatcatctttttcagatttgatccaatgtattagatgctcttatcttttttctcatgtttttcttgtgtttgttaacggggaagccaatgacttggctcgttatattgcaaagagtgcattgggcttagataaagagttggtttggaatagcaatatttcaaccattttattgtaactttatactgaattgttaaatctatgaaaaaaaaaaaaaaaacagtaccagagaggactacttggtcttggctccttgcactttagactagaatataggtcatactctaaagaaaaatacacctttccatgctttcaaaaattcctagcatactagatttgccaaaaagattactcaagaaaactgtaagatagtcagatcttggaatgaatttggacatgtaagtttatagtatcagtagtgctgggaagtccattgagataacaagtttttctacaatcataaattcataatgtgaatgcagagttttcaaccctctcatctcaacaacagtgaattctcaagtttgtttaatttattatagatttttgcttaattaaagagaatcagtgacattctgacacatctattccaatctagcactgtcagtgagaatctagtcaagtaaatgaatttgtttttaaatagagatatctaccaaatctaaagtatcaaagtccaacttgaaaaacaaaaagactatagctgtagcctgtagattgtgagacaaaactctcaacattaattcagaaaatttgttgagtagttaggccatactgatataataatgaagttaatgccaaccctaaattcctattattatatttatgagaaaagaaaaagttttgcaatagtgtgagaacatagtattgaaaatattggaaaaggtagccttcttttacgagatatgtgcatcttttccgtgttgctcggcacatgctttaatgaaaattcatcatcattaattatcatcgtattcgtcttcttctcataatgtctcaacaaacaatacatacaaacaaatcaagtcgtttttatatgtcaaagtttcatacgacaatatggcattttagtaatttcactcacatatattccaaacctgtaaattggtctcacacgacagtacctacttagattttggtcatattattatcctccacaacatcacggattttgcttgcaggtgaataatctctatattttgtagtagacaacaaaaatataatgatggatccaaaaccagaacccgtcttcttgtccttccttgtactttgcttcatctctgtgttgattctcgtcaatgttgaagccgactacgttcgacccccgcctcgtaaagatcttcactttccatggagcctaaagccatcttctcatcctcagcaggtgaatttttttttttttttttttaatcaacttttcttgggaaaaaaaataggatttctctctgattttgatgattccttgttgggttttctcttatgaacattaaattcttataatctgtggtgattctggggtaatcttctttaataattatatgtgctgctttaataattagtagtgataaataataatgtttttgatgaagaaaagctgtagctagttttttgtttatatgtgcttacttgttcctatttgtatggtattcttttggtgtttgtgagttgggcttacttgttaattgaatttcatgtaaagaaagagatttcgtacttggtaccaaaaaaaaacaacattatcctgttaattcaaaccccaacaataaataataattattactaaaaatggaagcatgtctggtttcagaaatgtataatgacatgataagactaaaactttgaacctttgaagcaagaggaagtttataggctttggatcttaaaatgcccctttaacttactagttcccgattatatctgtgacactcatttgtggagctcgaattattgacatcctggctaaccattaagactgcatttgattcaaacgttttttcttggtttattaatggtaaatgtttactatgatatatttttcaatacaaaatgaaaatttcaggtacacatatctttagctggagataaccacatgcgaatcacgtggataactgatgataaatctgctccttctctggttgagtatggaacatccccaggcagatacacatctgtggctcaaggggaaagtacctcttatgattatatgttatatagttctggaacgatacaccacactgttattgggcctttggaacatggcactgtttatttttaccggtgtggaggtgatggtgaggagtttcagctcaagacccctccagctcagtttccgatcactttcgcagtggctggggatttgggtcaaactggctggactaaatcaaccttagaacacattgaccagtgcaagtatgatgtgcatttgcttcctggagatctttcctatgctaattatgtacagagaaggtgggacacttttggtgagcttgtgcagcctcttgcaagtgcaagaccttggatggtaacagaaggcaaccacgaaaaggagtacattccgtttataaaagatggatttcaatcttataatgctagatggaagatgccatacgaggagagtggatcaagttccaatctttattactcttttgaagtttcaggaattcatctcattatgctcggttcatacactgactatgatgaatattctgatcaatacaggtggttgaaggttagtcaatcaatatgatttgctttgttcttcaaagtgtactaatttgaacattggttgattaaattaagggcagttcagttacatgtaatgataagtttctgccattctttgtcaaataggctgatctttcaaaggtggaccggaaaaagaccccatggctcgttgtcctattccatgtaccatggtacaatagtaacaaggctcatcaaggcgagggagaccaaatgatggcagcaatggagccattgctttatgctgcaagtgttgatttagtgtttgctggccatgttcatgcttacgagcgctcggtatgcaattactagtttatttatccatatcagtgtaaatctattgcactcattgtttaacggttaatctttacagaaacgtgtgaataatggaagatcagatcgttgtggtgctgttcacataaccattggtgatggaggaaatggagaaggcttagctcacaagtaagttttgctttgtcaatagttaaaaagcattctgactgtacttaaaataataagaaaaaaaaaaccatcataattttttctttctcaataggaggatagaaatgatggttagattatacattctgatttagacaaagattttgagagctaaaacatgaaaaatttattattacttcatattatgtctagaatgatttagttaggctcaatgtatattttggtaacggataggtacaaaaacccacaacctgagtggtctgaattccgggaagcaagttttggccatggcgagctgaagatggtgaactcaactcatgccttttggagctggcacagaaatgacgatgatgagcctgtaaggtctgatcaaatctggataacgtcgttggtaagttcaggatgtgttgctgagaagggatatgaactgaggaagatgcttttggcaccatagaagttattaagcggagtcagctcgacccagattcgatgatctaagtaaatattagatatgaaagaatgtca

SEQ ID NO: 266680 - DNA, 4147 bp, Cannabis indica
gtaatgggttttatttagggcacaaaactcaacaaacactagtaccaatggtgttggggaaaatagtttgggctctagagtgccgccaaaaagtggagctcaggtgacgattgatgatgacaccgagctgtaaaatttaagggaagcagtggctcaagttaaaagccacactaatacacttcatcacgaccaaggtgatacctgggcagctatagttcaaccaacagacgagaaagtaattgcaagaagatattcttgttgttcgagatcctcttcgtagaaaggaaccgtatgtcctactcgagaataaccacgggctgaaagttctaatgactcacacccaaaaccccttgcgtgccggacagtccaatcctatgccacatgcaaatgtgggccaaacggtagatggtaaggagctgccaggtcaaaataatgggcaaaacagtcataacttctgcccccaagtggaaacacctgatcaaccaaatgtaagattttgggacatttgggaccctatagccatttatgatcgaaatgggcaagtccagtatttccaatatgtcccgtacactgctccatagtagggttaaactacgactgctcgcagtcaattgtattcgagtaacaatgataatggagcaaacagtacaccgctctcaaagacgaagagatcagcatgcacggaggtagattccaccgaccaacactaaaaatgcaagaagacctctaatacaatccatccttgagaggataaggactcaacctgtcgatctcagacacacactgaattaggggagagagcagaggaatggagtagttccccgaaatgcacaacccattaatgtggataactatgtgtcggttgggactcaaggcagtcaaggaggacaacaagtgactcagacagcgcaacatgcaaatcaagttgacccaggggtagaagcctaactggatcatcttaagagcatagttgaaagtttgattggtcccaaactcaccgaagttaaacttgaccgagcatgaggtttgcccttcactgctcaaatatatgcgctccctcttttgcctgaatttaaattgcctacttgaaaggcatactctggaaaagaagacccattgtcccatatatataaagaattttgaactgcaaaaggatttgcaacccgcatatggcgatgtacggtttagaatttttccagcaacattggtagaggcagctcaagaatggtattttaaactaacattgggcaagtttgattcacgggattcattcatatcaaagttccacgcacaattcttgtcttccaggaaactccctgtacaattggagaacttggtcggccggagctaagaaactctcaataaaaaaaaaatatatgcatataatggattatgtccagtttatctacaaatagaaattctatttttcttcaaaaaaaaaaaacaaaaataattttattctccttaaaaagtctaaaatatcattttcttaagttagagaatatttttttttttcatttcatgaattaaatttattttatagattatgggtgtattatgtaatcatttatataaaaaaaattaatctagagatgacatatgttatcaatgttagtaattttgagttttttaatttttgggtacacgctccagcgtgtttcgacatgactagttcgaacatatccctcaaaaattaaaaacataaaaaaccggataccctaaatgagttctcagcagatgataaatttctattactattaccaaataagaattcattagttttcggtttatccaaagctcacatttttttaaatttaatctaaaagtgagatttcagcaattaggcattaaacaataagaccgacccaaaataatcttttatattccaaataatcatttcgaatggatcgtcctactttttgggctccaaactaccctttctttattctaaatagctatgacaaggatatatgatctaatattggaaaagactctaatctacattgacaatatttttcttccttctcctaatgaaaaagcccatcagttattactggctcaatttgcttctatcactgaagcccatagtatcttgttgtctgaaaacaaaatgattattggacaagcataaatagaaatcctttgggatgaaactattcaaaggataatatgaagccaaccacatatagcccaagaactactcagatttttaaatgaaaatctcactaaatttcaggttcaacaattcttgggtatcaccaatcatttgcgagatttttcccttatttctgtactaacaagactactcagcaatatgctttaaaataataatctagaatggtcacatgaccaaattgtagcagttagaaagctgaaggaaattatgcagaattaccacctttagagatttcctttgacgggaaacgtattcttaaaatagacactagtgaacgacattgaagtgttgtgcttatcgagccatatggacagggtgaaagaagaatatgtagatataagagtgaacatttgatagcattttgcaacttctgaatcactccattgttcaaattcacagagagattctaaattatattcatcatccttggagaagattgaatctatttcattttcctcaagagacatccaagccatttgttggatatgtaagagaagcttgatagtttttcctttagggcattattttgcataatgacccttattcccacatacatagcatcgatttgttttttcttgaaagtcacgcttcttcataacatttttattttgcatcatttgtgctttgagaacttgaacatcttgaacttgcttttgctccttggtttttctcaagaacacgaagattcaaaatgacttttgatgagtaaatctcgtctactataaacatttcctaatcttttggattgcttcataaattctgggagaaatttcttctaggagcacattttttcaaggacctttaagactagctagaaaatttttccgattgtagcacccgttagatttttcccaatctagagagtaacctgaaggtttgtttaccaagtggctccagaatagaggaaaagaaggcttgctttaggtttgaataatcgatgccacctatttggtagaatcattacgtcatcctcttataattttttcaagatatcttttgtccattttgcaacatttaagcttgaaaaattctgctcggagtctttcggttacttgtgcatcttaatcacagaattctacatagagaaaacgtttccaatatattttctttttggttttatttatctgttaccgtatgacatttaacactttctcaatattatatgtcttaagaaactttgttactgggagtaatgttaatatttcttaacgtctcattaccataaagtactactcaggtgtgcaattttttttaatacccctgtaacatacctacttctcgtttactatggtatatgtgtcccaagtgataaaataagtgtcttcattggtcacttgccataccaattctattggactttcttgatcatgaatcttgatgagttgttacatgttgagcactcgtccacttgtcacgagattcatgggttggctgtgtttgactcactaagaaataattgaagttacctcaagaccaactgtacaagctttagtcagcacttgagagcatcgtcaggtctgtgagctgtaattgattaataacaatgaattaacaaataaaaaaaatactttgttcattattttattcatcatttattaaatacaattacatagtcattagctaaataaatagaaaaaagcgttcgcatacttgcattttcataagaaatagctgagttgattcccactatattgatgccatattcaactaacagtgtagaggccataacttggcgatggaccccttaacttagagatgacttcgctgcatctggtcggttcaagaggcgatcgattcacttgcttgtggtaaggtgaatctcactgtgaagcgaaattcttgtagttattgactttaggatcttgatcctaagcctataaatagcacgtaccccacttctcttttttcaaaatatcggttcagattgagattgagagagagagagagagagagagagagagaggaggggag

SEQ ID NO: 266681 - DNA, 1127 bp, Cannabis indica
attaaaataatataataatatatattatcttcaagtttacaagtgggtgcgggttcaactcgacctgtgggtgtttaaaagcactaacccatagccacccatttactagttacaggttcaacctaacccgtccgatctatatatgttttctttaataacaggtttcaccgatcgagtttggatgggttgactggctgagtcaaatccaacccaaatattcagccctactaaatttgacacatgctaaaaattataacaattttacatatgctaaaatttatgtcaaatttgttagtgctattttttatttttatttttgtcctttaatcattaattataaggtttaacacacatttttatatacaatactattacttattagttttgaaatatctaatttattgacgattattaatgatatatatatttttattgagcattgttacgagatatcaatagtgcccaacgtcacttaaggtaaaatcttgtaaattgttaacaaaattctataatacttattaaattaaattatgtaagacgcaatatttaatcacacccataaacaatagtgatataatagagccaaaaggagcaactcatttcctttcaggaaaagcacataaaaaagggttggctcgtcaaaaatttagttcctccgtgaacaaagttcaaaattaataagagatgttaggaagggagtgtagaactagggcacaaccccactttttttgttcacaacaagggcaagatagaatggagttcttcacgaagttcgagaaaaaggaagggccaaataaatgtctctacatgttgacaacagtctttcttcgaaattatactttacagttcgatcctcccctcacgtttattttagcaacttaaggtctcctcactaagagctccttaacgaagacagaggaaccaacccatctgttgtggcagggcaactttcttatttcacaataagacctagacgattatcgttacactcggtagcttacgagtttacatccatccctacccagatacaagttcctttagatttttagagtagtgctaggcactttttagtatttctcttatttttttatttgaataaaaacacaccatctcacaccaatattttt

SEQ ID NO: 266682 - DNA, 3351 bp, Cannabis indica
tcagtgatgtcatggtcagtgaaaatcaagatcaataaagagattgtgagtgagatctacctgacttttgtttatagcagtacctggtgatacggcaggttcacttgtgtcatgatttgcatcagtttgagagtgagtttatagttgagcagtgttttgacactgagtgacagtatttttagtggtcggtgactcattttctggtcagaaaacatgtagataagtccaggtgtaaggggtttgaacttcaactgctgactctttttggtgagtgtttaagaaaccaattttgtaggagaactcttcttcattaaagataacatcctttgagatatatagtctccctgttgaacttaggcacttatagcctttgtgacactcactatagccaaggttgacacacttggtagagtgaaagtagaacttatgattcttatatggcctaagacatggaaagcttgctacccaaaacttttaagaatttgtaatctagttttttagaatgaacaatctcaaaaggtgttttaccactcaaaataggtgtaggcagtctattaatgagatagactacagtttgaaaggtatccacctaatacttgagaggtaaacttgcttgagctaagagagttagtcccatttctattatatgtatgtgctttctctcagcacacccattttgttaagatgtgtgaggacagggtgagtgaataagatgccattttcttgaaccagatcactaaaagactagtattcaccaccccagccagtgtgaagcctcttaattttcctattaaactagttttcaactaatgttttgaagtgagcaacggaatttagtgcatcaaattttgctttaaaagggtaaagccatgtgtacctactatagttatcaataaaatgaatatagtatcttaaatttgtgtttgacattatgggtgttggtccccaaatgtcaatgtgactaatatctaacatccatttggctctagagttagataatttgaaaggaagagaatgggattttccaattgacatgcttcacaaaataactattttcattcattgaagtttttacatgtgcattggatatctgatttaagactccagaagaagggtggccaagtttcctgtgccacaaatccttctgactggtacaagattgactaaaagataaattgacattagttatagcagaaaagggactcaagacttgactgaactttggagaatctttactgaattgagagaattttgttgaagcagaataggcagatggattaatctgtgttgaatggagaggtgtcttctcaagctgatacaagccatctctaagcttccattgcaacaccactttcttgttgctaggtccttcacaagacaaaaattagagtagaattcagcatatacttttattatcagatgtgagtctagatacaatgatcaacttctttgtaatttgaggaacatgaagcatatcttttaacaataaatgattattactgttggtatgaggcaaaccagaaccagtatgagaaatgatgagtttattaccatttccaactgtcaatttctctttacctccatagttggttatgtgagtcatattcccaatctttgaagttatgtgattactagcaccactgtgtgcataataaccttcatgacccaccacatctggagtagcaatgaaagctatagggtctttcttctccttattctgatctataccaggtgttgttcccttataattctcatcatacctattataacaataggcagttgtgtgtccatatctcccacaaacttggtaagtgggtttggagtttctacctcctctaccatttccacaaccagattctcctctggaatttgccctatatccatgatttcctcttccatagtctcttcctgagttgtgattactgttgggattttgtttgttggcaaagtgtgcagatggtccaaatcctgaaaaacctaaactggaggcattagcacatttgttgttcccatttgttgtgaccacttgaagtctcccaagtttgctatcaaagctgagaagaacttcttgaagctcctgtcagttgattgattctctgactttaagaatgtaagttatagggagatattctagctcaagacctcaaataacattagaaacaaagtgatgtttaggataaggatcccctgctaaggcaagcatgtctgcccaagatctcttctaacgaagataatctgccattgatgtgctccttttgcaaatagtttgaagattgcctctgagttcatccattctagcttttgaataagctccaaacaacttttccaaggcaaaacataagcctcttgttgagttacaccccattacttctgttgctatggattctgtcagtgatccataaagccaacccatgagaagttggtcacaaatgatccattgtttatactcagggttcacacaaactccaaaacctagtagcccatcaccaaatgcaactccagctagtataaactcttgtggagcatgtttcagtccactaatgtaccatccaatctatagcctctgataatggttgtggccattgttttccagagtgtatagttgttgcgatcgagtttgaatgcaaagggttgtgagagagtattaccaaacggagtatgagcaatacctacttgtccagaatattctttttcatagctattttcaaaatgcctagagagaaaaaggaaattatttttctctcaagttttcttgctcgtgtgttgagaaatcaacaagaacacattatacactttatcctaatagcccacactgtttcttgtgtgtggtggatcgatttggaagacattggtgtgattttaaattgtattatctagattaaggatacaacatacgagaagttttgaggatatcctgatagtcatcaacaggtatatattttaaacttgttattttattgttttgatttaatgtacacacatctggagatctaatgggatatggtacaaagataattaaataatacgaaatctaatttaagtatgggatattggcggcaaaattaccagaactatacgatttgtgacacttaatcccataaattaattttttaacggcaaaactacctaaattgcacttatgttttgttctttagtctttacccttctgtccaaaatgctctattaagtaccatgatggacatgctacaatgtattcctcatgtacacgtgacaaatatttagtggtccgcataagattaataatttaaatattataaaaaatatttaaattttaaaaataaaataaactacaaattacaaattcttcttaatctcttcttcttcttcttc

SEQ ID NO: 266683 - DNA, 3411 bp, Cannabis indica
gtcctacattctatgcttgtataggtagatggggatggcaagtttgagcgagtaagtggaaccaatgttggtggtggcaccttctggggtttgggaaggctcttaacaaagtgcgagaggtaaatgtctctagtttcgtagaacagttattatcatttgaattgctgccattttaaggacactattatatatggttgatcacaaacataatgtctcagttttgacgagttgctggagttaagccatcaaggaaataacagagttatagacatgcttgttggagacatctatggcggaatggaatataataaggtatgcgaattttcgttaaacataaccttatttagacacatatcctagttttctcattttattcctgtagctatgagctgcaatgtaacttttccaattttttgcagattggtctttcatcaacagctattgcttctagctttggtaaggcaatttctgacaataaggagctggcagattacaaacctgaagatgttgctcggtccttactaagaatgatttcaaataatgttggacaggtcattaactgctcaagtttatttttgtgaatatataaaaatatagagcgtgtctaggggggtaatatagcctaatatgtgtttttatttaaaacttcattcagatctcttacttaaatgcactccggtttggactgaagaggatattttttggagggtttttcattcgcggtcatgcttacaccatggacactatttctgttggagttgatttctggtaaaatatacaacttagatttccagcaccattttgatggctcttctttctttttctcttttgcatttattcctaagatgtgtaccatttttgttttaaaatgatcctttcaggtctaaaggtgaggccaaagctttgtttttaagacatgaaggatttcttggagcgttgggtgcatttgcgagctacgaaaaccaacctggctcagatgacccgatagttcgccagttggtgcaacaatcccccattagtgcatctcataccggctacaagatccatggttctcgaaatggagaatgtaatgataacgaaagtatagaatgtagtgtttacgtctcttagaatatataggcatatcttcttttaggtgtggttactaggcgataagaggcggcaatacatggttgctgcctattttgcaccctgtactagtttaatggttgaaaaggggttaacatatcaaaagtgtaacatagctgaaagttactataggcatataaattcctcaaaaaaatcaagtgatgaaactgagatataactcagtcatagttgcaataaacattttctatcattgtttgtaacatctctatgtttgtaatcctattgggtttgaagcatcgccttgtttttcaataataaactcaacttgtttcgttgtggcaattactatgcacatctagtctcaactccaataattttaagaagcaatttcataatttaacatgatttttttggcagatcaaaagcaattatctaataataattattgtagggccttgtaaatgaataaaaaaaatcatttccataacatagtatctgaaaatataaaactgcttaataaatataaactaaatacaaatcaattagccgtcagttgtttccgatgatatagttttgcatttctcctacgcatggcccatcttgtttttatatcatgtacattatcaacttcagaaagtatatcttgagatgatgattcagattctttgttagatttttgaggacccaaatcacctctgattcttgcagcttcagcaagcagatcatttatcaacatctcagtggttttagcagtaatacctcttaaataccaggatatcggtggaggtggaacgatggctggctgaataagctgctccaagctcacctttgaaccaagccttcctttgcctccagtacataagtaatagtcttcccatgtcttcggtttgaacggaaagcatgtcttttcatcaacaaataaaggttctactttccagcagccttcaaattttttcataaaccctgtttttacttgcttgaatttcatctgataaaacagcaattattacaacagacatgataagaatgctttcctaccaaagaatcttgtcaacaatagcttcattaaccaatgtccatttttcaataatgttgtcaaaatcatatgattcaacacattcacaagaataatcatagttcaaaaagttaaagttgcagaccaacaagaaaagaaatattggaagaagtccttaccgagcgatcttttctgttttgatcaactaaaacatgaacagagatggttcctgaccaccaaagaaatttccataaggctgcttgctccacctcaaccacctgtctgtgaccttcatcaactataacttttcttgatatcacttcctgagcagtaaatcatttctcagtaaatcataaaacataggaaatctattacgaaaaaagactaagaaaaaggggcaattttcgtcaaaatgtatacagttctaaaaaagtcaacgttgctaccaaaatgtgatagtggagagaattacatatcttaccttaatgtttttgaaaaccctcttattatcaggatcagttactatgttgtagattgcatcaggaggaagcccaacattgacatttactttaagattgcaaagagagccttctggtacactaacctacaaagagtaactacattttgttaatatcctgattagcatctttccataagacatgcttagctttatgttaacaaaaacaaagctagattacatatgagccataactaagattaaacatgcctgaacctaccatttttattaacaaaactaaacacatttgcaaaccttaatttctgaatgtgggtcagcccatgatggattttctctccatgcttgcatttgtttctccaaatcagcatcagaagaagaaaatgattcctttcccaatttagattcagagctaatcaatgaatgttgttcatcatgtttagcaaatctcttgagctgagactgagaatataaaaaagaaaaaacttctcacagtcactacaatccataattaacagccattgatattgtctaaactgcataacatatcaggaaattacttaccttcaaacaattttgaagcttgttaggtagctgcaccaaaaacttaggaacagctttattgaaatcaatggagtctcgatttctttccctctcctgaatttcaacacttgcttttgccatctctgtcttagccatttaaactggcattgtttgcaaatcttagttcggtgaaaacattgacattaatatatgtatatctgcaaatacttaaactgtacttctatattaagttccatcacagttataaatttgccaaaccaacaatcta

SEQ ID NO: 266684 - DNA, 1634 bp, Cannabis indica
ctctttatcactcttctcgattaatgggatcttgttggacaaaggtaactataactcaaagaatagaaaatggaaatataataatgatttcaaatcagatttttattattatatttcgttgttgttgaaggaggttgattatgatgatgatcatcatcacgaggccgaacttgctagtggaaatgtgcatcttataactacgatggaagaatgggatgttatgctatcagaagctagcaaagatggaaaaattgtaagttattttgtaaatcataataataataatcttcatggttaatgataaatttaaagttatcactaatatataaaaaacaaaacatacttgaatagtgatcttattcaatactacatatatatcattcccttattgtactccacacaatcaaatttaatgtttccttttagcaaaataaatgttatataaatatgaatatgataaccaataatacaatgaaataataactatgattatataggcataatttagtggttcatacttctatttacatacagggagtacctaagtttgaatctccctcccttaatgcttagtacacatctaatatgctatgttggtgttgaaactgttacaggttttggcgaatttcagtgcaccatggtgtaatccatgtagatcaatagcaccaacctacattgaaatggcagataaatatccctcttttctatttctaactgtcaatgtagacgagctcacagtaagcctataccaattctttatttctcagatcagtatatataatatattcataaatattctattaattttattattatgtaatatataatttgcaggaactgagtagttcatggggaataagtgccactccaaccttctttttccttaaagagaaaaaaaccatagacaaacttgtgggtgctaacaaggaggaactccacaagaaattagctttggtgactactcatcatgattctcaaacaaatcccaattaatagctagaaattatatatatttatacaagggcgaagctgtataaagcctagatagcatagcacagcacatgcagtcgccttacctgaaattaaaatcgattctacattatttgggcttatgcttgtttaaaaaaaaaaatgattccttctatatatttcacagtttatgatggtctaattctataatttaaaattttgaagttttttaagcactacaaaatttgtgctttttgacggtgcaaagcaaaaatagccttttgtgccgacaaggccatatacttttgtgttggcacgtctcagtcgtattggcaaaatttatatagtatgttagtgcacaaatcaaataataataccaaataataaaatctaattttatctgaccaactaattttgaatgattcaatgaagaaacaataaaagatgaaaacaacaaaagcaaaatagaaaaaaatcaagattaaaacaaatgttagagtatccattcgctctaatataattctaattttatttattaatgtgcttaatttatttgaatatttttaagaacttatagcaatattgtatctctgtcactgtgtaggttatcaatacttatatctctactagtaaaaaattacgtgcgaggcacgtataataaattt

SEQ ID NO: 266685 - DNA, 896 bp, Cannabis indica
aaaaggtatcaaactcaacaccaaatcaccatatcattctcacttaattagttgtgttatgcagtgttttccaagcctagattagagtgtaatgctcacataattcatgattaatgcacacataatcaaactcactaatcacataattcatgaaatcaaaacattaagaaacccaatccaaactcatgctcaaatttcactagtttaatagcaaatacacaaggctaaattgacttaaaactcaaaatatgcataacccaaaaatcagatttcaagcttagcttaaaattacaacaagcttataacacaaaaccttaattgttcatgcatagaataatcaccttaaaaccaattcaagaacattacacaagttcaaaccctagaataaaattttcaaaaaattaacactagaaaaggatgaaattaatacctcaattgccttcttcaacttaatccaacaatcacacacctgcccataatttagcttcaatcctcctcaatataaaagtgtagaaattttttgtaaagaaagagagaaaggattgatggtgggttgttgaaagaaaaaaattggtgtttattactttaaattcataataaggctttgatataataatttaattaattgtggtcaaacgaccatcttgccttaaggcttaaaatcaacatatttagcatctaagggcatataaattatttcaatcacacatataactccaaataaacacatatatcatacattgttgccataacgcattgttcataattttggaccccaaatctagttcaagttaaaatatctatttgtgattatactgcgcaaacttgtcaaaattcacctgtaactcaacaaagcaaaaatactacataataatgtagtccattagcaccaaata

SEQ ID NO: 266686 - DNA, 1334 bp, Cannabis indica
aaaatttaatgtaagcccaaataaaaagtctaacgaaagggtcaacatgcaagaaagagaagataagaaattatttcactgagaaagactttcaacaatacaacaatttgattactaatacttttaacaggatgtagcagcctcctctaaaatatagaaatattctttaatttgggatagattttgtattcccaaaaatagaataatcatttggcttgcattgaagcaaaaactcccaacaaatggtaaactttttcgatttggagtggtgaataatcaaacttgcctgatttgtgatgggaaagataagtcttcataaccatctttattctcttattgttatagtgagaaagtgttggctgaagttacaagatggattgactggaaagcttacttgaaacattccatgatttcaaagcttaaaaagtaaaagattatgcaaggatggaggaagatttatacaagtattcttactgctactcttttctttatttagaagagtaaaaatagtgttattttggactacacccaattttcatggtcaaagtgattataaagtacattgcaatttgggaaattttcacatgtgtacaaaaacggtaaaaatttaacacatatacggctacacggaaaaaaaaaaagaacttatatacggtaataacaaattaaattacataaaatatgctgtcatcatcttagacaccttcgatactctcttcccaagaaaaaaaattcaaagaagccattattcttgaatgaagctctcagaaataaaaattcaacaacaactcaatgaaaaatcgtaaaaaaaaaacttgcctattcgattagtcaagttgaaaaaaaaaataatcaacaaacatcaaacgatcaacaataaatctcatagaacaaatctgcttaaaaacaagtatgaaacattcgaaacacaaatctcgaaatgaactgggttagatctacacaacataatctaaaattatcatttgaatgttgcagatcatataataaagagttgaaaaattattgatcggagctccctactaaatctaaatttatattgaaaacaggtatgaaacatcagaggcacaaaactcaaaatgaacaaacaaagatctatactacataacatatgattgttgtttaaatgttgcggatcatactaaaatgagttgaaaaaatattgattggagctccctatcaaatccaaaaaaaaaaaaaaataacaatgtattggattactatttaatatagattaatttgataattactaactggataatatgttgaggatatgattgaaaaatttgattacaaaaaattaaagaaaaatatat

SEQ ID NO: 266687 - DNA, 2679 bp, Cannabis indica
cttagaatacacatccctaatacctccccgcaaactcataattggaaggacttgcaattgtgagtttggttcgaaaaatgggaaagctgatactggaaattgactttgtaagaccatcagccagttggtctgtggcagggacatgctttacttgaacttgtttacgaagaactttttcccgaacaaagtacagatcaagctcgatgtgtttggtgcgagcatggagaaccggattggcagcgagtaagacagtactaaggttgtcacaccaaacagtagggggctgagattgaggtatctgaagctcagtaaagagagagtgcagccaagtgagttcagatacaacattagctaagctgcggtattcggcttctgtacttgatcgacttatagtttgctgctttttacattgccaagtgatgagattgcctccaagaaaaatggcaaagcctgaagttgagcgtctgtcatccggatcggaagcccaatcagcgtcacaaaaggcaacaagatcagtggacatggaccaatgaatatggagaccatagtctatggttccactaagatatcgaagaattcgtttgacggcttgccaatgtggttgtaatggggttttcatgaactgacaaactttatttacactgtaggcaagctctggccgagtaatgagaagatattgtaaggcacccacaatcgacctatatagttgaggattgtcaaacggttcatagccatgagctgagagttttaaaccattgaccatgggggttgaaagaggtttggcatcctccatttgcgacttgattagaagatctcgaatgtatttggattgagataggtgcagcccttgtggagtggattgtacctcaatgccaagaaaataattcaagtctcctagatccttgagagcaaattgagaatttaatgactgcacaagtttggtaatgagttctgagtcactccccgtgacaataatgtcatctacatacactaatatgagagtagtggatgtagatgtatgtagagtgaaaagagacctgtccgatttagatgaagtgaacccaagaccaagtagacttgtatgcaacttatcaaaccaagcccgaggagcttgtttgagaccatacaaggctttgtgtagtttacaaaccaaatgtggagcagaagggagttcaaatcccggaggttgttgcatgtatacttcctcatgcaaatcgccattgaggaaggcattgttaacatctaattgtttgatgatccaaccccgtgagacagctagagagagtacaacccgaatggtaactggtttgactactggactaaaggtttcagtaaagtcaaacccgggctgttgatggaatccttttgccacaagccgagctttaaactttgaagtgcttccatcaggattttctttctttctgtaaacccatttacaaccaaatgcctctcttccttccggtagaacaacatatgtccatgttttatttttctttaaagcgaccatttcatccgacattgcacgattccaatgagcactttgaagagcttgcttcaaagtaactggttcctgaaaaaccagatatgcttttaatttccggatgcctgactttgcacgagtttgcatcttgtgggaattgactgggatagtagcagcaggtacattgctggtatgagaagtaccagtgccagtgtgaatagcagtagacaactctgggacagtaggcacggtaggaatgtcagcttcattggaatggctaataacagcaggaggcacagcagtaggagtgtcagtgtcattgttgttgctgttatttgtaacaccagtagcatttataccatgttgcagacttggagtagcaattgttggtgggatcgggtcaggttgtgtatcaagcacaataccttgttcctgcatagaatgagatgaactaccaggagtatggttatatgatgagtgatacttatgtgtttgcacagtaggtatgatagcagatggataaaaagatgctattatatcagtagtgataggaggatgattgtgtgatgcataggggaatgtgtgctcatcaaaaatgacatcacgtgaaatatagacacgaccagaggaatccatgcacttgtatcctttatgatttagactatacccaatgaaagtacaaggggaagatcgaaactgaagtttatgcttattgtaaggtcgtatgttaggatagcaagcacaaccaaacgttttaaatgaggtgtaatctggtgctatgtgaaaaagagtgtcaattggggattttcctttaagcacgggtgtaggcagcctattgtggatatacactgctgtccgaaaagcctcatcccaaagctttaaaggcatagaggcctgagcaagcaaggtaaggccattttcaagtatatgtctatgtttgcgctcagctaggccattttgttcatgtgtggtgggacatggatgtctatgaatgattcctgcttctctaagagtgttggtaaatgacctatactccccaccccaatcagtttgaagggctttcattttggtgccaagttgtaactctgcttctgccttaaagtggtgaaaggtttttagtgcctcatctttggttttaagcatgtagatctaggtaaacctagaataagcatctacaaaatgaatataatatctatatc

SEQ ID NO: 266688 - DNA, 2215 bp, Cannabis indica
ttttgaagtttttaaaacataagtcgtgtttggtttatgttttcttaaaatatttttatttttattatctttttaaaaaaaaacagttcaatactttgagagcttgttatgaacaagaccccaaccgtacctcagtctcagacctggactcaaacctagactcgagccctggtcttggacctgaagcccgtccacggacctggacctcagtacctaacccgaactaggacctcgacccctggagccaaacccagaccctggcatcagactcagacacgaaccatttctggccccggaccatttattagttaaactttaaatacaaaatagtttaactaataaatataatttatgtaatatattctatacacttttattaaaaaataaataaatcagtttaattcggtttattcgggttaattgggcggtttagaataagttataaaccacccaatgtattcattaggcggtttgaatttttattatattatttcgggttgtaattttttgtcgatttattcggtttagtttgggcggtttattcggattgggcagtttgtaaattttgttgaacacccctagtagatagcatctggtgtactacgtgagtaaacgcctgttagacgctgaaactcattatccgcaaatggagcggttagaattcgcacttgtggttgcttctcgaaagttacgaccatattttcaagcacacagtattgaagtactaacaaactatcctctgcaacaagtattagcgaagtcagaagcatcgggaaggttacttaaatggtcagttgagctaagccaattgacattaagtacaagccacgatcagtaatcaagggacatgccttcactgattttgttctcgaatttccaaatgacgaagtagcgattattacagaagaacgagttgaccctaaagtgccatccggggaagggcggacgttgtatgttgatgggggcatcaaacaatgaaggatcaagtggtggaataatactgataagccctaataaattcaaagtacacgcggccctaagatttgaattccctaccttaaataatgaagccaagtacgaagcattaatcacgagattaaagcttgctcttaaaatgaacgtcaaatacctcgaggcatttattgatttgtaaattgtggtttgtcaggtcaacggggaatatctggccagaggaggacgcttagcaaagtacatttcctatacttgtgagttgctacataaatttaaaaaaatttattgtcagtagaatacctcgtgcttataattctcatgcagatgctttggcccatttggcctcaacaagagaagcagaattactcaatgtaagtcttgtcgatgtgttagcccatccgactattgatcgcgaggaggttatgcaagtcgatgcaactaagcaaatcacttggatgattccaatcattacatatttaacaactggtaaactccttgaagacaaagttgagtctaaaaaattgtgatatcgagctgcttgatacgtcatttatgacgaaagctgtatcgcaggagttttagccaaccattgcttaaatgcattgatggggatgagtgcgagtatatactccgagaagtgcatggtggtatttgtagaaatcacaccggaggtaattcccttgccttgaagatcatgcgacaaggatattattggcctaccttgcgagcagacgcaaccagtttcactaaaaaatgtgataagtgccaatgaattgcgacctatgttaacatgccaccgagccaattaaactctatcactagtccttgaccatttacggtctggggtatagatttaattggtgaattaccaaagggaaaaggagggtaaaatatgtcatggtcggtgtggactatatcacaaagtgggccgaagctcaggctctcgcaacaataacaactgcaaaattacgcgagttcgtctattgtgctatcatttgcaagtttggcattccttacaagttaatctctgataatggaaaacaattcgattgtaaaaaattgtgtaaactctgcgatgatctggggattcaaaaaactttttcaacgatcgcatatcctcaagtaatggacaaacagaagtattcaataagatcatcaagcatactataaaaggtaagcttgaagaaaggaaaggcgtgtggccagaagagcttctgcaagttctatggtcatacaacatgac

SEQ ID NO: 266689 - DNA, 1524 bp, Cannabis indica
aaaaaaagaaaaaaaaacaaatgtttgaaattaacatcttaaaattcttaaaattcttttgaaaacaaaaaatgaagttcttgaaattgtgtttttcattctaattctaaaatataaacacaaccaaaaaataaactaagcgtacgtgttgcaaccatttttttgtttggaatgaataacttcattattaaactatcaaaatatcatataccttaaatgtatatatatagtcagcttcttaatgctaagtggaggtgttttcctgtttagagaaattatatttcagtttttatcattatttataaaattaatttatatttaataaattaaaattataaaatatcatcaaaataatcaaatacgtactaaaatataaggagtaacaataataaaaagattctctattttaatcttttagctattgaatcttaaaaaaaaataaaagcgtcgcatcattagacatgctctaactaccaaactacaaagatggaagttgcccaagtaattaattatagaaagaaggtatgtgtcagctataattaattgggtggcaataactcccatttactccacacctacattttccaaatcatgtgttaaataaggtagctattaggcaccggtgcctagcaccttctcgatatattgacacataggaaggtgatagacaccactagtgtcctttagcatttctccttaatattatatggggtttttttatttttacattacaaaacagttctttttttttatatatatttttacgaaattctacatagaaatctctattgcaactagcgctacaatctatattgcaaccaaaaaatcatctagaaatctatattgcaactaacgctgcaaccggccactttaaaaactcaaaccgtaaatttaaaaaaaaaaattaaaaaaatagtatatgagataatttcccatattattttataactgattagtagttttaaatattacctattaaattaatttgtgtgaaactcaatattaaaatatatcaataataatatatgttatttttgaaaacttctacacctaaaaatactccttaatatttctcaacaaagaaatataaaaactacgtccatgtaaaaagatatgacaaagttcaacatagtacttctcaccatatatattaaataacaattattaataaatttgtgggttttttttattattttgtagtataattatctaataatttttttatataaatttatttaatttgtgggatttttttgttattattttacactataattatcctattgaattaatttttttaatgtaactttttttttactggaggctactggccccatataatatagtgtaagtcccttcccgtattacttgtgaattgtgataatagtgtatttggtattttttttttgttaataaaaatagaataattttcggtataaatacttaagtttaattctagttgtaaataaatatttaaatttgatttttgtcagtaataatacttaagttataattctagaactt

SEQ ID NO: 266690 - DNA, 3843 bp, Cannabis indica
agcatatgtagggtagaataacgaactctcctgcttttctacctacagaaactaatcaaagtccttctattactcccatattacagatttttttggcaattcatgctcttcacatttcctccattttttctggtttctatgatatcccatcttgctcatgtgatattaatagttcaaggtcctctactattttattgagttcaacaacttcatactctatttctaatctcccaccttttcctcccaagtccattccttcttcttcaactattatgggtaatcccattacccctagttcttcttctcccctcaaggttttgatttctaacattgagttgatcgcagcttctatttttatcctttctctttctttatcctctcaagtacctattacattagagccttctagtattactccagctctagagcctagtttttctattcagagtcaacccaaagctgctaatgagaaatggtttcatctttgaaaagatgaaaaacacagtcttttggatttttatgatcatagtttggccgctactttgaagttattttatcctacttcaagttgttctctagattatggagctcactgtgaagaacttgattacaagattgtgaaacttactattgagcttgataagcctcaaaaagaagcttcactgtctgttgttttctaatgggagctcgatgttgcttacaatacttgtgaggattctcaaactaaaactacagtacttgaggaagacttgtaaaagacggatgaagttttgcattattgacagaggttgctagtgctcaagagaaggtgaactcaaaaagagcagccatccgtgacttgtctgacaaacttcttataattcaagatgaggctcatcttctccataataatgaaggtgatctaaaggtaaaatttgaggaattggagaaggtgaatttttatccctgtattcagctctcttatttgagtttttgcagtgtttcttttccctttatccctccttatactattttatttctcgtgcctttcttaatcataggaaatgttagcttttgcattcaattgcacccatttgagacttgaagataggcacaaacttaaaagaattcttactcatactgatgagatcgtctctactctcagctagtgctttggctaagacaacctctgattatggttccttagaggagagaactgctgcttttgcatgttttgtgagtcattggagatcaggtttaaagattatgatcccaccaattacttatcttcaatggatgatacttcattttcttatcctcttacacacttgagcaaattgagaaaatgtggagaccctttggctagtaagtataatttacgggttgaactagttcaagatgataaagatctaaatgaggtgtctaatcattgtgaagaactatcccattcttctgattttgatgacaacgaacccatctccacaatgttaagaggttgtgaaatttctgggtctgagctccaatcttcttcagtcacagtgcaccaaattaatacttttgttgcgagtgaactagtgattgagcttgacatgacctcatattcttctgatgaggttaccttgattatctcgagcttgatcttcataacgttgcttgcatggatgagctttagactcttaagggtacttagtcatgcatatagtctcttctgtcttcttgctatatttttaggtttctttttatgcattcttgtaagttctgcttcttatacctatattttagattaccaagcttttaagctactaaactcacattaaccctttttagttcctactacttctcctctgaagactatctaaatggacctttattttttatggattaggctctgtgtttgctcctgttgtaacttgttcaactttttgcccattccatcaatcttcttatagatggtgggaatgtcatgcatatatatttctattaatctactcattttcaatttgttaacctaaactgctctctattttctttcttctatcagtagtttagacttacactaagacttggagctaaatattgcgctttgaagcctcgaaaaataagaatgaatttttgtatccgtcatacatgtctaggaacatgttcaatgaagatgtttaggggatggaggatcctgatgctcaaccttggaattcctataatgggcttggttttcataagaggggtccttttagatataattatctagaagaaattacttttataaaatcctctggagttggaggttgtatattttttattctcaagtaaattagatgaactctttatatgtacttgtttcagataatattctagcatttatcaagtagattcttttacattcctcagaacaggacgtttgacctttccctatgtaaaaatattttcttcattctttcggtatttaaattttattttctccaaactctttaaactttaatttttaactttttagcttggcctttgagttccacaagctcgtactgagctagatttctaattttggagtcccgacctctactaaaacttctaatgcaaagattagtactaaaaaattggaatttcttgactgtttttaacagtcatgtataatattctcatcggcctctaataagaccaacccttattcgaccatctcaaaattggggtagaataggtgtcagtgggaaaacataattctaattattctccaaataatcttttaacccttgactaatgtgaccttaaaactccaatatacattgcattatttacttatcaaaaataataactggaagagacaaacgtataaaacttggtattctcaataaaacctttgagatgatcatcttttcttatatgattcaagtccaaaattgtcaaatgtaatgtcctataattcctcataatattagaactcctaaaatagccttagatgttaatccttattcaatcacaacattcatgaggctatttagaataaaacgatatgttgcgatagactcatcgtatattttctctttatgaaaacacctaacatagttgtgaatatggaattatgtttgtgattagattagtctatagaagattctaatatctctcccacttggacaaatataatcaacaaatactatagtaatctccatcatgcaataggcattcaaataaattatgcataatatcatatctataagatatgtatactacacataatttgggatgagaaacattcaaatataataacaactattaaatcatgatgcatgcagtatattgattaagactatacatcggtcttgttctgtccttgtcacttcgagaaataatacacataagaagtgactgcatattagggccggcaaaacgggccagacacgatgacacgactcgaaacccgcacgagagttagcgggtttgggtttgccttaaatgggttcgggtcatgttcgggttgactcgtctaacccgtttaataaatggatcgtgttcgggttgacacggctaacacgaaattgacctgttaatgacttatttaaagttattttagtactttaacgtgtcataaatgggttacaaacgtgttgaacacttcataaacgtgttattgattgacatgtttaaacaaaatatacttataaacgggttacacgggtcgtgtcgtgttaacccgtttataaacagatcgtgttcgggttttctttttttgacacgattgttaaacaggtcgtgttcgggtcgagcatgtacctgttatacatgggtctcgacacgacacgaactcgacctgccaacacgaattgccacccctactgcatatcattatgtagggctgatcatgggttgggt

SEQ ID NO: 266691 - DNA, 5135 bp, Cannabis indica
catgtttctttctagtatcgttgcaatgtgggactatttctaaaaatattatattcacaggaatcatccataaacttctcatgacaaaaccaaacaaaattatacaagtttccacataagaatactttccctttctacattctcattaatcagaaccttaactcttgtaacaaatggccccaaggatattttaaactaatgtggaaatcatacaaaccatcaaactaaactactagcatatagtgctatgagtgataatttatttgagaaaaagtagggcgaacataaaaatcctctcctcacacaaccaatccaaatcttaaggcgtcataaggtttaagagtggtgcgcataagaaacaactagtgacggacccaaaaattttggtctatggggcttaattattataaaaacaatgtctattttaaacaaaagttaaaattatttttagtggaacttgattattataaaaatacagtatgggatttttttgttttttattattataaattattctcagggctccaatattatatcaagaagaaagctaccatttctacatacaaagaaaattcttacaagagtgccctgagaagagagaacattatcaccagcaggctgctcaatatatttttcaaggtcatcctgaatagattcggagtgagcaacctgtgcttttgcttcatctgaagaaaatgctaaaaaagctttccttgcttccctgcgggcatctgcatgtaaattataaagaaaagagagtgagaccaatttggtttaattttacagtaaacgtaatacaaggaaaacatttaatttatatggtaggaccttaattctatgcattatttggaaactaatcaaagtacgagcatttacaaagcacacaattttcgaactctctcttatttgttgaagtttatccttcatttacaaaagtatagcacaagttcttttgattacacaattttttttttgtaaaaagagaagagatcctcttgtcttagacaggatccttctcgttttatattaaaagcctcgcttgtggtggaggaaaaccatggttgcaattaataacaaaacagaaattctaaggcaagagtactcccctgctttgcctcagaagaggaaaaaactaaacaaaaccacctgctgcccctatacaattgttttccattctctacataaatctaaaaaggatagatcctcaaaatgtttggttctaaagacccaagttcttttgattacacaatgaactcctctgattcttattcaattttaagttatatcaccataaacaaaataaggtgtgtaaacaaaagttctgtctagacacaaaagttctgtctagacacattattttgcttatgcggacgcactacttactagttataacatcaatattgattcaccatgtcactgcaataaaagtttagagcaagtttatcctatgaatatcaattctaatcatatccctacaagtacctagagtcactcccaaggaaacactagtccagactaagcccaaagatcattcttgctttgggcatcttacataacgtaaaagccatgcaattgcgagcgagatatcctttcacatgcagtgttccctagtattgcagatagacaaatatatacatcatatttattgtatgtgttggaatcagaatatgaagaaaagcaatccaagcactcttgacaagaataaacatacaatgaaagaaatgccaattattttttggcgaaacaattacagcacacttgaccatttaaaatctgcagttaaatgtatactaactcgcagagagagaaaattagaagcagcaattattttcttggtaagacatattggagttgaattgattgtgcaacataccgtaaacagaattagcatgggaatccttgattgaacgtccacgcctccaccccatcttcagcaacaactttacacctgattgaaagagaaaggagcaaaacaaatcacaatttgtactcattattatgcataaccattaacaataagtacatgaaataaacctatggactctgtggctggaagaacaagttcatctggcacaggtccaggaatagctgacggcctgcaaaagataagcaaaccagaaaatttatcatgatggtaaatctatacaggataataatatcaagaaaagagtaaagttacatatgaatatttttaaacaggtaaatgaaaaatcaagtaaaaaagcaagcatccatttacagacttggggtttgggtttgatattaaattacaataatatcaaaccccattgtacatagacatgaacaaacacaacaagatcaagtgaaaaagaaaaaaaaaactacaataaaattacttacaaagtttttgtttttttttcctttttggtaaaaaaattacatacaaagttacttacataatacatacacctaaaagatatgaatatttctatgaggcatgataattgatggaatttgagagaatcccacatgctctaatttaaatttgaatatgtggaacctgatattcaattgcaccaatcgccttttttttgtatcatatagtgttggtcaccttaaggtatcatatagcaacacttaaatgacactactcaaatgtaccatgttcaccaaaaggtaaataataataatacaaagacaatacccaaatgattctcaaccagcctaactagtaactagagttcgaaaaaagttgttatctagcgaaaatgtggaggggagaaatatctacatggtcccctttcattaacaatgcatttcagaatatgacaattcaaaaccaaaaaaaaaagaagatatcaaattaaaatagcatgaaatactgaccaactaagtagcatggacccaagtgcagtaaatagagtacttttcaccaagtgaataaagatgtgttatagaattataaatacaaaattaccactgataagcagcctgtccataagtagtagttaggctgtttcggttagttgttgtttcagttgttggctttagttacaactggttgattgtacaagtagttgaggggcagagaagtagaggtttttagcagaaaaaaggaaggaaacttagttgttttcttcaaagaggacaacctatcatatcaacttacccttgaattttgttggtctcaagatcaacattttctcaatgtaattcagatatgtttgtgtggttttccttgctgggttcttaccacccaccaagtgagtttaaaagcaagacccttaatctttgacagtttctaagttagcattataattaaaaaaaagttgtaaagtgattaagctactaacatgataatcagctatcagatgaccccatatataaataacgactaacctttgttgttgctctttctcagcttgttggcgagcaagttctgcagctgtaaatccaaatgtatcgaactgtgaggatgttcccaatgattgaccttccaattcctagattgaaatatgatggacaattatcaggcatacttgatttcaaatatcaaatattaaaagcaaacgtagagatctacatttccactataatatgcttttataaaatttcattctcctttaagaaagagataacaccttcagattgttttggctaaatttatgttgaatagacaacaataataataaagtgcaaaagacatgtgaaggcaagaggtacaactaactcttatcctatcaatgcatttcacaataacttattagaaagtcatttacaggattcaaacctgatcacttacacactcgcccacataccacttgagctagcatcaagtggcatgcacaacagtgaaattaaacaatatcactcacataccacttgagctagcatcaagtggcaagcattttcacaatagtgaattattaaacaagaccataactgtagagacagaaaagtcactgatttcaatttctttctttcctcttttgggcaaggaaattaagtagtacacacaagcacagcatggaagtatttgattgttgattattgtcatagtggactaatccttttttattcttctattcaatgaagcatttaaacagataagtatataagttaccttctactattatcagcctccacatctctagatcaaatcaaaatttagtgggattccacacattaaaattactaactcaaatgacacctttactcagtgtgtctccattcacacataattaccgcatgagttcttaagtgttggcaacacattattctgtgtggtttttctctctttcctttttcttatttaaaaaaaaaaacaaaaaaaaaaaaaaaacattaagaataaatgtcattaataaaccaaaaggtacccaaattttggccttattcataaaagttagaaaaacaagaaagaggattgtccattctctaaaataattacactgcacttgcattgaatgcataaatatatttgtaaacagttcaaaaccaagtgccatgtttactaaatttaaagatataaattgaaacagtattgatcaaagtgtaataatctaaatacatgaacaaacatacagatctctcgtcttcatctaaaaaattgaaaatgctctgttgtttgacttcagccctgctcttccgtgaagatacaaatgtctggggtgtccatcctacatgaactcattaattagcaacacatttctcaggacaaaaacagcacattcttattcaaattcaaagtacggtcaagatgtaccctcttttgatcccactgtgttgtaataacctgcagaatacccccctgtaaatgctccatgaaatcttcttcttccttcttcatctctgacctgaccacaataaaatgtaagaataagtaaactatcagtactcttttaaacagagcagtattgacacaatatcagctttctctcatgaaaataatgggatattttgcaacatctgacgctaaggatcaatcacattcttcctacacaaactgagtgtcccctatacttgtcatacgctgctatgttccatagaaaaaaattgttacacataaaccccattgttatcaatagttaaatcctattcatctagcctctccaatatatttccatttcacattcattgttctactatgaccatttcattctataatttgccca

SEQ ID NO: 266692 - DNA, 1724 bp, Cannabis indica
agtatttttgaaaaaaaattcgtgtgacagtatttttgtaaaagttaacccaaattccagtatttttgtaaatttcccattaatttatttataggagaaaaacatttcaactatctcatcaactggtttcgtttcagaataaagtaaaattcattagtagtgattactaacaaaccaactgatatatatattcctttttatctgtttgaaaagaattaaatggtcaaaagccaatattctagtactgattatgctacaaagaatgtgtgtgcacatggtctgagttcaaattttgtggctgtcgactggcatgctagctatgtgggtgttctagaataagggcaccaagttctaatacttgttagattaataagtttctacggttgaaaacagcctcttctaccttttgtttttcaaattcgaagcactactaatcaaatgagaatggattcggtaaaaagacattgattcttctattcagttattatagtcaacacgaattaattgaattagtaatagccaaagattattgctcttttgttgaggttgattgaaacacaaacaaactaactcaaaccataacttaataagttgctagcttccccacccaagctagtgatcatttcaagattatgcaatatttgacaaaatagatggataatagggacagggagtgtggccaaactagatgtacttaccttttgggttggaggggaaggaatataataaaagattgtattttgaaggcaaggatgatatgtagccatcgatcacactcatctcttataaatttgaatatatctattgtaattaatttagtggattaaaatttgaagcttatgtgatatattatatatagacacatataaacatattaatatatggggacactatgaaaatagtgtaagtgaccataaaaatttatgattaaagataggtgtatcaatgacaacactataacatttcttcactgaacatttgataaaaaaaaatttaagttttagtgacgactattttgacatgataacaactaatcatttttaggaaataatcagtggaaataggcaggatttttccctaaaagatcgtcagcgacgaattaaacacgacaacaatatcatctctgatagtgcgttaaatataactaaaaaaatctcatcttctattttatttgtatcgctttctctctcccacaatctctcgatttcagaccttctctctctctaaacttcccactcccacatctccctctcaatccctccctctcgatactctctttaatctcgaaggttgtcttgagcactggcgatggcagagcttcaacggcaacaacaaaattttgttgggttttgtgccttaaaaaaaactaatttcaatataatcagatttactaattaataaaagatcaaaaatcactttatattgcatgattcacatgatttatttcatgattatatgattaatgtataaattctattaaatccaaaacatatagttattcatgattatagtgttgtcaacacagtggaatataatcatgattatatgttcaaaagtttaagtcccatgatatgtccctacactggatttagattgacatgataatcagcggtaaagtatacttacaccttggataagtgttatgtccttttcagggcattgacaaagtatatgctagtatcagatgtatggagtatacatcgaattggaccgatattgaactt

SEQ ID NO: 266693 - DNA, 2917 bp, Cannabis indica
tatgtaattattcctattaaataccttaagttaacaatacttgacaccataaaatatttaatatatactgatgtaacgtctcataattaattaattatttttatatatattatataataaattaaaattcatcactaatatttccctataaaccaactgttttgtcataattaaaaataaaaacaaatcccaatagaaacaagcaatgtatatttatatatatatgttgtcaaataaatatgtcacgataatcacgtaaccaaaaactttagcttcttttttgttaaaactcaaaaataaatatctttggcttcttccattctctctttcaccttttcagtttcactctgactgtgtatatatatatacatatacacatatatatagagagaagatattgattagcattgattatggagaatacgagtggtaataacactccgtcgccgacggtactggacgaatgcaacagaagagagccacttctcacaccatcaccgcctgtggacgtcgccggtttttcgccggaaaatagttcttggagactcgatctcagcgacttccaattgccgtcagaccatggcggttccaaccatgccaacgacggacgttgctccttcgctttacgtcgtttactttgccaaccaggtaattcatatatttcttctttatttcataaattaatcattttagttttagtcgcgatatcgtacatttttgttcagattttctcttttttggacttttttagggttagaaattgaacacagattgcaaacataggaaaaatcatccaccaaatattttcttgtagtgacagattgttattattattatttactacttttgtaattttgtgtattatatataatatatatatttttgttagttctggatttgatggtgtgatttggagtctgatcctaattagtacctttttctgggcatttggatattctttgtttttattttgttacattaattgtatttttcttttctttgtggtgtcttagtgtgtccactaaaatttgttctgtcttttctgttcggcttcatctttaaaataatttgtgttgtgttaggtaagactttacgatgtagcttttaattatcgatggcttaatcacttcgtatattcataaattcatatatatcttattaattgatttgatgatttagtggctgatcataatggtatggagaattttgaataattaatatgatgcaagttgagtggtttagtcatatccatacgtacagattacttcatctccatcatcatattaattcatgagtttcctttttagtgtttttcttgctcaattattattctaacaatttggaaagtaggcacacatttaatctggttgatgacatggctttcacgatctataccaatgtggattttcattcatttttcaaattaatatatggggttgtctattcatttataatacatatttctacattgtgaaattatatttaaatgtatcagtcagctgctaataatagtaaactttgcactgttaatttttttttactataaatacatatatatatatatatatatattgaacatatatttataaccctttttagaaaatatatatatatgtcaaaaagtaacttactgtagacatttcactataaatagatacacagaaatttgtgatatatgatttcatcttttgacataataagatttatgtcatcaccttaagaaaatcaacttgtgcctaaaatactcaaatctcaaatgaagggctgtttttatttaaattcatttatatatgtaaacaataaagtacctcttatagcattaatctgatttccaagaattattaaagaaatttgtacatattttgcatttatttttagggaaacaatacaaagttgcagagtactataaacagcaagaaagacttcttgaaggctacaatgagatggagaccatgactgaaaatggctgcttccctgagagcctaactgaggtttgttatatcaacagtaaactaaacatatagttaggaataaagatgatcaagtcattaggaatggacacaagtactacacatatagttacataatcatatgatgagtcttttttttaaataaatactgttactgaaacaatgtcatgttttttatttatggttggtttcaggatgaagtaaagcaattagcaaagagtgagaggttggcagtcaatgcatcaaacatagctaacttagttctttttgcagcaaaagtttatgcttcaatagagagcaaatcactagctgtgattgcctcaactctggattcattattggatctcttatcaggctttatactgtggttcactgcctattccatgaaaaacccaaatcattataactatcccattggaaagaatcgtatgcaaccagtggtatagtctccacttcttcttctaactttgttttattcacaactctgttctaattcaactcatcaaatatgcagggcatcattgtttttgcatctgtaatggcaactcttggcttacaaatattgcttgagtccattaggcatctggtcacaaaagtatgtcaaattagtgcatagtttaattagacaaaattgtgaactttattgtttttgttaatgtactaattaatacccttttttgagcacagtctgcaactcaaatgaatattgtggaagagaaatggatgattgggatcatggtttcagtgacaatagtgaagtttttcttaatgctttactgtagaagatttaaaaatgaaataattcaagcctatgcacaagatcatttcttcgatgttgttactaattcagttggtttagcagcagctgtcctagccgtccgatatgcctggtggattgatcctaccggtgctctcattgtgagaaaactttttcctctgttttgtgt

SEQ ID NO: 266694 - DNA, 2830 bp, Cannabis indica
atatatatatatatatgaatctatacatttctcaagctacaatatgttatcaaattcaaatgtgtatatgcatgtatgtacgtgtttggttagttttgtgtactagttaatcaatcatcttaaaacctagctagctttatataatttttcaacattttagatatatgtaaatattgtttatattacatataatataagaaaaaataaagtaataatattacaaagttttcaactaataataataagtttctttgacaaatggggaattattattaatgtggctttacacagactacagcatgtagtgtttataaatatataattaatataaagtttcatatttatttttagaaaaatgaaatttatcatatatatataaatcgagtaacagtactaatacattgaactctactatactctttttcgtgatacgctttaaatgtagtatatatatagtcactctcctctgacctaaaattatataaaattatttattatatatattaattacataattctgaccatcatttttctgccatttttgtttttaaaatatttattatacttctgatcatactctcagaaaattcatcatataataataaacacataataaatgatcatctttttctttgaaactcatcaattttatttatttatttttttacataatcaaatggtccatatatataataataatttacttttattttaacttaaattattattttattttttattttaggtggtcggctatagcaactcatttggcaaaaagaacagataatgaaataaagaattattggaacacacatctaaagaaacgtttagccaaaatgggaattgacccaattacccataaaccaaagaacgacaatcttctctctcaacaagacggtggtcaatccaagaacgccgccaacttaagccacatggctcagtgggaaagcgctcggcttgaagccgaagctcggctcgttagagagtccaagcttcgtaccactaccaacaacaatatcattcatcatcataatcatttcttccttcatcataatctcatcaacaacaacactaccatcggctcggcttcagcttcatcagcttcggcttcaactcaccttattgacaaaacgacgtcgtcttcccataataacgtgtttattgagtctgccacgtggaacaatactagtggtggtggtggggtccgcagtgaccttgagtcacccacatctacattaacattttctgagaacgcgccgccgtccgtggctgccggagatactactaccgccaccgcctcggagagtaatggtgagatctttaaagaagaatatttgggagaacaaaattggaaaggtaataataataataaaaattgtgaagaagaggaagatgaagatgggttagatgataataataattcattaatgttgtcatttaatattaatggagatcatcaaggctttactagtcttttgcttaataataatatctccgaggagcctagctgttccggtggcggtggcggcgaaaatggtggtggtggtggtggtggaagtggaagtagtgaacataataattatggagataatgagaattattggaatagtattctcaatttggtgaattcttctccttcagattctcctatgttctaattaagtatgtataatgtagtagctatattataagaaccctagttaaattaaagaacattttttctttgtttaattttaatgttaattattatattgtgattaatttgttataaaagttagattaattaattaataggtgtgcatataattattaatgataatgccaatcaaaattaatttttatcagctaattggatggtacgttttgaaagtaagtgtgtaattacattcttatttttatgtttgacaaattataagttaattattattatttgagcattgttatttgacactaatagtgtttaacaccttctaaaaatgacgtctagcgattgattagaaatattcactaaaaattattttcttaaattatatatgacccgatacttaattatacttatagaataatgacaccaaaaaattatgtaaagcaccaataatactttttagcaattattttattattttacaattaacatttaaagaatttaattaaatccttttaactacttctaattacgtagttattggataattatctattcaaataaacactttaaattttataattatttcaaattacactcgatacacattctaattattaattaagtaggtacgtacttttgtgaatatatatagtttgtgaaagcagtttagaagtattattattatttgagacatgttgattgttctcttgtttgaaaataactatatataattctgatttagattgtgtgaagtgagtgaaccttttacaagttttttttttccttttcctttttctttttctttctttataataaaataattacttcctttatttgtttcctcatttaaatttgataatgttatatgaaatggtcctataagagatgtactcatttattatagactttattgcttttagtttcatgtcactatctttttattaatgcaaagatatttatcttcatttctttttaaaatataaattgatttctgctttggattttcagtcgtacataaaggccaccataaatgaaaaatacaaaaaaaaaaataataaataaaataaacttttgaatagatcgtcattgaacattttaagggattattttagtaatacataaaaatatttttctaattttatttataaaaaatataatcttgatgtatttttatattgtatt

SEQ ID NO: 266695 - DNA, 2654 bp, Cannabis indica
aaaaaaaaaaaatcactatatatgtatatattagagctacattaattaattgtatatttttctttgcaaataagatgaattaatggcaatggattggacattatatcaatcaaaatatccatcattacatcatatatcataataatatatatgaacctaatttaaaaaagtctacactaaaaattatcatcaccatctctctctttttctttctctatatatataataaaatactatagtactaattgataatgatttatgtaaattaatctaattttgttacaaattgggatgaccatatttgatgatcataatctaattgagcttctattatgtcatgatgatgatattgatgaaaaatatcatcaacttcttgtcgtacatcttgatttgtgtcgttttctcctccaacctctaaaccaagctcattctccaagtatctaaaccacttcttggtatcattaatctcataatcatgattatgatgagttaataattgatcatcaccaatattattaatatccactattgcagcctcatgagagccttgaactaattgcaccacttcattattaatattattattagtgtcattattgttaataatatgattttgattaggctgcaaagttgtgcctatattatctaacatgttccaaaaatcaaggtcagtctccaatggaataggttgattaatattatcactataataataatctacctcaggtttattcacttcttcttgtaatagcccactaaatagcaaatccatgtcatcttgatcttcttcttgatgatcatcaagttttgatgaagtcttaataacttgatcattatttgacacatttgatgaatcataagatgaagtagaagaagtagttgtacttgtcatcatgaccagtactttttcattttttgcctcatttttgtcttgggtttccttttgatcaataatactagtacccttattgacttcttcaattcgaggcctcttagggagtgattcgaggttgattatttgctgctgaacactactggtaccagtattacttctcttgtcaccgctagacaaagtagtagtactacatgaagacgaggaagaagatgttatggaggagtattcttccttttgttgatcatgatcgtcatcatctccgttattattattagggttaggttgattatcaccatcttttgatgatgaggacaatctctttttcaagtgagtgttccacacattcttgatctcattgtccgttcttcccggaaaatgggatgcaattttcgaccacctatacgaaaaaaaacattaattaatatcgagaataaaaaaatatcaaacaagtcaattgtcctaaaattggcataacacattataattggtctataatatcacgtaactcgtattgctgtttattattatataaaaaaaaatctatttaaaaacgactttattaattaagtaaataaacttttaatttttaattacttaaaaaaaattaagtttcaacaattttaaataaaaattaattgatctctaaattataattaattacacattatataaatctcatattaaaaaaagtataccgctatataaaaataattatatcttaataaaaatatatatattttataaatttattatttttttttttagtataatgaacttttataaatttatttatataataattttattctacatgtataaatattacatttattcaacaataattttattatgatatatattaaaaattatttattgttattattgttatactttatactttttagttgtttaaatttttcttttttaacgtatctctatttagttataatttttcaattagaatataataattttaagtatgctcttactgtataagtagtccgtaatgatatatatatatatatatatgcacttaaaatgggtcctatttatactagttaagtacatatatattaaatttgtgtgtgatttatgtatgcatataaataatatatataattaataataagattgtatatgtttaagagaagttaattacttgtttcctaaggtttcatgtaacttgataatggcttcctcttcttcattagagaaattccctcgtttaacatcaggccttagataattaatccatctcaaacgacaactttttccacatctaagtaaccctgccaaaaaaaataaaaaataaataaaaattattattatcatagtatgattgatatttaaggaaccaataattcaaaatcacgtgaaagaaaattgacatgttttaattattcttgaagatacataatttgttacttattgaaaaaaacaaataataataataataatcaaattattttgacaatttgttaattaataatatgtttacattaaatgtaaattattgttgcatacatatataaaagtgatataatataaaagtgtaaattatcgtacaaattaatatatttaacagtgcctgtacataaatcgatctattgtgtataacatttgttactttactttcttattatagggaattttgcaaataataataattattataatcaaataattaaaatatagagtggccagtatgcatatatatatttttatttttatatatacatatatatatgtacgcatatat

SEQ ID NO: 266696 - DNA, 6742 bp, Cannabis indica
acggtactacgatgtctctgctgcctctaggtgatttttacgaatgagaaaaaaaccctaagtaaaaggacaattttttaatttgaatgagggtaattgggtcaactaaaaaattcattaaactcaaatttcaacttcccgtaaaagctaaaatctaaaagttggtgtgggccaactttagctaaaagctataattttaacttaaattattaaaaaagctattttttttattttgccaaacactttttaagcaatagctttttcaaaaagcacttttaacttttctaaaagctaccccaaacggggccttaatcccaattttgtggactcactatatatagttcaaacaacaacaaaaatgagttttagcgccaacaacgtacaaatgctaacattaatagcattagtagtgttgctaacgttaaaatcgtcattaatcgtaatactgatgttaaaactaatgatacatttggatcttattttaacatcaataatgcatgctaagtaggtatatatatttttttaaattgaactcaaaaaatacctaacttaaacatcttacaataccattacaaagctacatcaaagtatcaaaccaataaacaatttaaaatttaccaatatacactaacaaacataaatatatagaaaggcaaaaccacacgagttgccaatactaagccctgacctcgagtgtccacaaatccgctaccaccaccacacaccaattgcctcctccactacaaaccaaccaccactgcgtgcaacagtaaagcaaaaaccaagatctcactagaaaaatactgcaagagagaggcttacctagttcgttgatcgtcgcatgcccatcaaacccatatcatataaaacagaaagaaagaataatgagaatgggtgtgaaaaataaagttagagaaaaataattattggctggaaatttagccaacaacgctaagtctaaataaacgataataataaatgagaaagagtttagaaattgataaatgacatcataatttatagaggtttaagcccaagtcttgggatataacctaatccttttgagcttgaatgcaaagagaataaaagtaaaatgacagagtctctacttacaaattgtgtgtgacttttttagaggtaaaagtctggtatttaatagaatttacatgggccttgacctaccaatcctacacgtgtaaaacaaccatatgttaggttaacatttcaaatactcaaacacctaacaaaaattcaaatgttaagctatgttcatgggctcggttgaggactggatcaaatacaagtgttcacgcagtgtacaaagagttgacctatttcctaggactacttgtgccgaccaactaacactcgctcgatgcccctgctccaagccgaccatttctaagtttcaataaacagccaatcaatcatatcgactgaaatattccatacgctttatcgactaggctcttgatgttgctccttatttaccttttcaacacttggagatcaaccgatcataggattttgatcaacctctaaagaaggttgacctatcatgccacttgtaaattttagtgtccacatcatcaatgttaaaaattgggataaacaacaataaagagcccttacgtagccccatgcatcatgtgtcatagctcagttagttgtcgatggagatgaggtgactaaatgagagatagtagcgatcatgtttggggcatattggtgttggatttggctcaaaagtcaaactatctcgaagttgcaaatatatggttcaacttttaagagatttgagacttgttatttgccacatttgtcaatgaagcaatgcaataacttctgatttatgctctctcatttattacacatagttggaagatgagctacctctcattaattagatatggttgggaggtgagcacctcattgattacatatggttggaggattagctacctctcattattacatttggttgtgagttgaggtttttttttctataaatatggagctcttagaagagcatttgtaattcagtacataacaaattcagtacatagcaattcggtgtgtacgaagttggggtgaataatttaggtacaactttgtacaattaggttcactgagaaatctgtgagagagagaatctgtatagtcaaacttgggaaatactttggtgagtttgggaaacacttgagagatattactactagaaaatttgtatatgcattatgtatattttctactcgaattaataatatcagttgcttcccgcagagtaggcaaattgctaaaccacgtaattttgcatgttttttttatttaccaatttgatatatatatatatatatatttatcgctttcttttgctatttattgcttttgcacacaacaaattgctatcagagcaaaatataatgacattatatatctaattaaagctcttgatgagacaaatctaaccccgcaagaatggtttcaatcggaggtccgacgcactggtcagtgtgttgcagccaacaaccaagttaacttagtgaaatagtgtttcttttagactgagtcaggccatttttcacccgtttttaaccgagtcggacctattcctagttatttagacagttccgaattcaaccgcgacatgcatatttcaaaataaggtagtattaaaattttggaaaactttgttataagttagaagctaaaaagttctgttaatagtttacacttatggctgacaactgagattttgaaaaagatgtacaagttgacgtaaaaagttctggcgagtcaagaggttctatgaggagaaccatgttatcaagtgcaaagtttgaggtggagaaatttaacgataccaataactttggcatgtggcaatgtgaagtattaaatttattattttgagaagatctaatattaccttggagtccaggccaaaagattattctgacgaagaatgaaattttgtcaatcgtcaagcttgtggcacaatctgactgtgtctggaaaaagatcaaaagtactttgtgatgaaacaaagcgtagctacagttcgttgaaaaaaactagaggacaggtacataacaaaaagtgtagagaatcgaatctacttgaagaataaacttttccatttccagttcaagaaaggtacccatacaattgaatatttagataattttaacaaaagtttagcaaatttgcaaaatttagatgttgaaattagtgatgaagataaagttttgtttttgctaaatttattacctgaaagctatgaatatttaaccaaaattctgttatatggtaaagttgcggttaagtttatagatgtttctaatgctttgttaaacaatgtgtatcataagaagaattaacttgatcatagagacccaacgccataagtattggttgcaacaaaaggtagattgaacaaaaagaaaataggtggatcaaataataggaataatccagatcaaagtctataagggaatcatcaagaagaaatcttatgaaagatgagtgtgtctattttcatcagaaagggcactggaagaaagattgtctaaacaaggacaagtcaaatgcaaatgttgcaccaaaagccgacatcgaagaagattcaaccttttctatttcatcagatatgtatttagatagatggatccttgattctggatgttcctattacatgtgtccaaacatacattagttctcaaattttgaaaaacttgatggaggagttgtccttatgggaaacgacaatgcctgtcagacaaaagggattggaataatattattgaagatgcacgatggtataatcaaaagacttacgaatgtgaggtacattcctgatctaaataaaaatattatttctctaggtgttcttgattttgatggttataagataacactggaagatggaaacttgaaagttgtacgaggtacatttgttgcaatgaaaggtgctcagaaggcaaatttatacttcctagatgggagtactgttacaggaagagcaactgtctctagcggttctgaagaaaagacatctaattcttcctgcctttggcacatgcacttagggcatgccgaagagaaggctttgcaaggcttagtgaagcaaggtccacttaaaggtgccaagacccaaaagtttgatttttgcgaccattgtgtattgggaaagcagacaagggtcaagttcaacactgttgttcatcgcaccaagggaactctagattatatccacataaacgttttgggaccttccaagaatgcttcacttggaagtaaaagatggtttatgataattattgatgatttttctagatatgtttgggtatacaccatgcaataaaaagatgaagttctggatgtcttccttaaatggaagaaaatgattgagactcaaactgacaggaagatcaaaaggctcagatctgacaatggtggtgaaagacaaattaaagtcctctcttagaaagtgtgttaagaagaagggataattagacatttttcattacccggtacgctgacaacaaaatggcgtggcagaacgaatgaaccatactttggttgagaaagttcgatgtatgctatctcaatccaaattgaacaaagaattttgggctgaggctttgtcatatgcaacccatatcgtcaacataatctgtacgattgcactagatggaaaaatacctaaagaggtatggtttgaaaaacctatttgtgattttgattccttacatatatttggatgtcctgcatatttccatgtcaaagattccaaactagatcctagagaaaagaaagctaatttcttaggctctaatgaaggagtcaaggtttttgactttggtttggtgaatcgaagaaatttttttatgagatggcacacttgacgagtctgttatgctaagacagactaccttagtgaaagagaatgaaagcccaaatactccttttaaggtggagcttgagatacgagaagatccagaaaatattattgacgatcatggtgaagatgaaagtgatgatcaagaagagatctcagttgaggtggaggttccctcagcttcaccaccagtcaatcagcaatcataatctattaccgctactcgaccaagaaggaagattaaaaggcatgctagatacacatatttggtagcattcacttccagtaattgatgatgacgtcccatgcacttacagagaagctgtgcagagtgttgacgtcaagaaatgcaagttggcaatggatgaagagatgaagtctctacaccagaattagacatgggtgttagtttgacctcctaaagaaaagatggttattggcttcaaatgggtttgtgccaagaaggaaggagttcttggtaaagacaacattcgataaaaagccagactggtagcaaaaggttatgcccaaaaagaaggagtagattacaatgaggtattctcaccttttatcaagcattcttctattcaaattttgtcaactttggtagcacatttcgatctcaagttagctcaggtcgatgtcaaaacaacttttttccatgttactttagatgaagagatttacatgtctcaactggatggttacaaagttctaggatgtgagaattggatttgcaagctaagtaagtcactgtatggtttgaagtagtcactgcgatagtggtacacgcattttgacaactttatcagagagtagaagtatacccacagccaatacgaccacaatgtatacttctaaaaactccaagatggtgcttttcattttattatttgctcttatatgttgatgatatgtaattgcatgtaagagcaaggtggagattgccaggttaaagactcagttaagtttaaaatttgaaatgaaagatcttggagaagctaagaagattcttaggatggagatcacatgaaatagagttgcaagcacagtctgtttgacacagactcagtatctgaagaaagtactggaacagtgatacatacgataaaactaaacctgttagtacaccacttgcatctcattttaagttaagtgcaaagatgtcacctagcaccaccgatgagaagaagaaaatggagcgtattctatatgaaaatattgtgggtgctctgatgtatgtaatggtatgcaccaaatttgatattttgcatgctgttagtatggtgagtcattacatgcacaattccggtaaaggtcactggcaagcagtaaagtggattctacgatatatctatggtactgtgaatattggtttgaagtttgagagagacaagattgatggtaaacatctagtcagctatgttaatctgactgcgctggtgatttggataagtgtcgatcaactactggttatatgttcacaatggcaaggggaccaatttgccagagatcgacagtgtagtcaactgtagctttgtctactacaaaggcagaatatatggttgtaacagaagcattcaaagaagctatctgacttcttgggttgaccaggatttgggtattgttcagaagaacgtggaggttttatgcaatagtcagagtgccatttgtttagcaaagaaccaagtccatcatggtcgcactaagcacatctatattgatttcattttgttcgtgacatcattgatgagggaatgttatattctccaaaaagtcagactgtagacaagtctacagatatgcttacaaaagtagttacagggatcaagtttcaacact

SEQ ID NO: 266697 - DNA, 2064 bp, Cannabis indica
tggaaaaaacaaaagctgcagttttggtttaaaaattccaacaataatatatagtaaggaaggcaaagtgttcttcacatcatgatttgttaagatatggtaagatggtatggcaggaagactattaaatctacttgtacgtttaaaattgattttcataagatttatgatacctttgagtgggatttcctcaaagagatgctaggagcgttaaagtttcctaagaaatttgtggatatgatctgcctaactaccccaggttctcctcatggcttacatggatatcttcaatctcaaaatctcaaaagacgacctttgataaggtgatccaatgtctcccttatgtttgtcattgttatggaatatttatccaagattatggcaagaattaaaaagctttctgatttcaagtttcacttgagatgccaaagcttgagtctcacacattatgttttgctaataacttgcttctttttggcaaaggagattttaagtcaactactcttctactaagaagcttaatgttttttttttcatttatattctgttggtcttaaagctaaccttgggaaatcagctgtgtatggagcaggtatggattccttttctctcgatggaatagtatatatgcctggttttttaaagagaaacctccctttaaagttccttgggattaaattttttacaaatagattctcaaaataaataattgtaagaatttagttgaaaagatgacaagctggattcctacttggaactctagacaactttcttatgcaggaaaaattgttcttatcaattcagtgttgttatcaataaacttttattggtcccaaattattattgtgccaaaagttgtgattcaaaaaattattcaggtgtgccgagcttatctgtgaaaaggaactaacttatccaatggccttggtaatgtttcttatggggatacttggaaggatggtagttaagggttcaaggatattgtgctttggattcttagtgcaattggggaacatgtttgggctatcactacaaaaaatgaaagataagctatgctttaaatgggttaatatagtatatctcaattaggaccaggaccaagactgatgggactacaaagttctcacatatgatagctgatattggaataaagtggttcaaattaaagagaagttgatacttgcctcgttttagattgaattccacccgtataatttaactattgctgatctttgctttaaattgaagcaaggtacttcaaaaatttggatatttgctgatatttaggataggttttatgtcccttaacacagtcataagttggttagtgctgaatcatagactttctactagagacaagttgtatcattgtggagttcttaattaactccatggactgcctggtttgtggagacaggtttgaaagccattgccacctgttttttgattgctgcagaaagtgtgtgaatggacagggattaagcaccagaaaatcgagctgcaacaagtgatgaagtggatccaaaatttgtaagcttcaaaaggaaaaagaaaggtttttttgattggcattaattctttgataaatgggatcactcactttgaaaggaagattatgcattttgtttgtgtaggttggattatatgaatctatagaaaataaatgagtaaaaaggatagagagtggctggaagctttacacaaatctttgtaaggaacatacatggtattatatagtgtttttgaaagtgattaataacaacattccgatttaccaagaaaaaaaaagacaaaagatactcaattataacaatcacataaatttatcttaatcaaataaaagaagggacaaagtaaacaagttcaatttttttagaagaaaacttgtatttatccaaaataatataaataaaagaaaaatgtcaataactttaaaagaaatttgtggcacttgactattaggaggaggaggagggtgtgtgttggagattctaatttcgaatcctaaattatatattgtttaatatataaatccttaaataaaaaaaaatataaaagaagttt

SEQ ID NO: 266698 - DNA, 2303 bp, Cannabis indica
tacttttagccacggatctttaatcataacatagaatgatattatattagtcatactttttacttgttcaccatttgttgtgactaaaagtaagatttttgtagtgacttttttgccataaacaagagctgcatcagttggaatctcagcagcaacaagtagtgtccatatccactacaggagtcagaattcatggctaccactgatacttttaaagaggcagtttggttgcagggtatcttataagagttgaagttgcttaaaaaagggactattttattcaaacaatttgtcatctattcacttgtgcaagactctgattcaccatgagaagagtaaacacattgacataaggttgtattggataagagagaggatagaagacaagatgttggaattggagaaagttcacacaagtggcaaccctactaatatgggaactaaggttctcactttcagtaagctaaaacattgtcttagcttgctgaacattcgtgcttgttgagacctttgagagtttaccatcgtcattgatcgagatttgggactgttattcttttgaggatgaaggtggaatttgtggaagttaatcctccaaaacaataaccaacataactaactttcagttaagttaattggaaccgagttgcttagcacctttagttttcagttataacagtttgttatcttgtatgagctatagctataaatagttcttatcccacttcattttagatgtaacttatactgtaaatgttagagagagagtttgagagagagagagagttctttgaaattaagaactcaaaaggagtgtactttgggttgaaaaaaatttctagtgttcttcggtgtgagtacagagaggtcttgagatctctacaattagagtttatacaagttcaacattgttcatattagattaatgatgatggttctcaattggagtatggccaggaacaaatttgatctctaaaactagaaccaagataaattattgtcttttttactattttcaatttctattttatgcttgattcatttaatttgtgttgctttgattgtgttgcatctggttaggtgttggatgaatttagttgttgtatgtgaatttccaacaataataaataactaaatatatatacataatgatttaggatattattatttagctttgtgtaattttttgatagtatacacgtacgattatgttataattatatagaattaataatacactattgtctaataaaatgttaagtacgtagtatatactctgctcaggccagccttcatatgtattaattattaattaatattaaaaaataataagtatagttatgttaataccgtaatattctccatctgaatctgattaaccattgacattgagcatattgcaccttctttattattcgtcacactgtgctgctcaatattgctcccgctcccagttccactttcacttcctagttccacattttgttgctatataataataagatattattttaatgttatttaaaaaaaattgtattctaattacaaaataacattttcaataggtgtaagtatgttaaaaataatagtttataactattaaaataataataaaaaaattagggacgtacacttagtaactacacgtatacggaaaaatagttacgtgtacaacaaaatgtaatttgaatttattcttggcactataaacttttagatattttttaaaatttacataacaaaaaaaaaaatggactataaatttctcttttaaaatagataaagagtatacgaaaatacctttcttactataaagttctaatattttacccaaatattggaaaaaaaaagaaaaaaacaattcaaagcttttcaattctctataagcaatatgtaatactatctttccctcttttttccaatggtgtgtggtttgcctctttgatttggtctcattatagcatcccaaagcataggtttattgcttgggttgcttgttctaaatgcttgtgtatatttgatgagaagtgttaccgtcaacctcttgttacaacctcttaatcaactttcatgcccgaaaacacaagctggaatattttttttcaatttttttttcacaggggttgttcgttatgcgtacaacatcattcatgtaaatttttgaaaaatttcgaatagtttacagtgccgaaaatacatttgaagatttttgaacgcgtgtagtaaattagaatatcaggaactctgttttcggtactgtaaactattcgtaattttttaaaaatttacagggatgatactgt

SEQ ID NO: 266699 - DNA, 5948 bp, Cannabis indica
aacggatatagcatcccgccccttctttcaatactggatctcccgtttacaatgactaattcgttttttaaaattgtctgtatactcacgcccccacgcttgaagagattccccacaatacgagattttcttcataacgtgctgacctgcacacagctcccaactacccttaacaacctggcgacacagcggttcatgcaaccaggcattttcaaactggaactaacgaaacgacaccgtaacagaacgcaccgtcggttcaagaagcagcgggcaatgatcagagacagaaacttccaaattatgaagttgagccatacgaaacctttggaaccagctggaacaaacaagggctcgatcaagacgaacttcaacccatgaatcagtgcctctcccacgctcccaagtataaggatacccgattaactccatatcaacaagatcacagtcagacaaagcttggttgaaaccatccaccagcatctgtggatatctattacctcctcttttatctgcatgactagtagtattatttaagtcgccaataatacaccaaggaaggaagattctgactttaacaatctcaataaatcccatgttttataccggacagctctattaggttctccataaatacccgttaaacgccaaggagaagaagctacttccgaaatctgaagatcaatgtgatgaaaagagtatccaaacagctgcacatcatcattattacgccaaagcatggccaccccaccactatgtcctctcgcatcaaccgaatacaatccatcaaaccccaccgcaacccgtagcctttccaacctgtccttccgacaaagagtttcacacaaaaacaaataattgggtttcttctggataataagatccacaaggaattgataagcccatgggttcctaagcccacgacaattccagctaagaatactcataatggacggtgggcctggatcccagcacccaccagaggcccatttttttagcccaattcttgattaccttcatctacatgaacatccaaactactattacccttctcaactagatccttacacaacccaatagcatgttggcctgatggcactccattccttgtgtaccttttttagaatccaacaacatgatatcatcattcgaatcatcaatatcaacgtcattatcatgtatgtcattcccactattttcatatttaatacttagaagctataacaataataatttatgtgttattaccgttaaaaattaaacttaagtatttatttataattgaaaattaaattttaatatttataacgcaaattattcgtgcacaacttgatgatggcaaaaatattaattatttttttagaagaaaataaaaattatattttgaaactctctaatctctataatcctagtctctcgtattctctctccatctgctccattccttctgtggcacttcctcatttcctcatctcactcgtacaatacgagattctttctagggcagggccttctattccaggttcgtaattccttcttctccttaatttttactttcttccctgtattcgatttctagggttagggtttgtttttcctgtgaattaagttttgtttggattttttttttattaacctcaatttgttgtaatctagggattacaagatttaaacttgtatatatatgctgtaaatgattttaatttcgggttacagagctttgatttgggtggtggtttactttttgaattattctaaaaggggtcaaaatagccctgagtttatcaaagcctttatggatttgaagtttgaaattttctgttttggtatgtattattgtcttcatgagttattacgttgattggaattgtcttgtttggtatctaattgaacaatttatattgttgttaagaacgatttccttagtatagaacatgggaacgtgtttttcctgtaagagatcgatttaactgggcaaagtatagaagagataagattgcggaaaatggaaggggccggtttaatgcttaatggatgaaatggtaaggagtagtttgacagaggggttgttgataatgtgggaagatccaggcagaggggggaagtaataagatgctcaatcatgtcatgtccatttttatcatagtttatatgcttttttatgtttgctattgcggtaacccttcatattaaactaagccaatggtcctgctcattgaaagaccattcaaatttagggatttttacttggaagtgtcatttttggcataattttaacatttgtatggtcgaaataagttcttttacatttttacaattttacggtttaattacaacatgaaaacaacgaaacaatgtgaaacaatagtccatatcggtaaaaatgtttaaaattttgtataaccgtatctttgtatttttatcttttttggttaattatgacaataaccctaaaatttaatgtgctctcagcactgaattataacatttaccttatttatacattaaatttatatctatgcttattattcttaaagttatacgagctccatattattgttggctatggccttaccttacatattacagcagaattatactatagtattatgaaaacaatatggaggtttttgatggctacagttttttacaagaatatagactagtcttgtctccttatattttctctctcgaacccacagttttttcaaaccctacctttaagtcccatgaattttgtttttaattttcctatatttgtgagaagcgtttactcctcatgggtctgcaccaactcacggcttcaaaatctcccatgtgaaattgagatttagatcaagttcgctccgttttcccacctttttattactgatataggctgcgtcttgatgatcacagcttacgtaacatattaagaattgggagtttgactagtgtcgctgtctaatagtatatactcatgtaagcttgagttttatgtgacatggcgattgtttgtgggagatgcttgatgttctaatgaaggatgtggtttgaagaattgataatatctgggtgctgagcacagtgggtattctttgttatcagatggattacatgctaatttttttttattctttgctggatttggtgttttatgttatgaaggtgtttcctgttgggaagggaaagtaaggggtttggtttactcatggatgtgatcttgggtgtgctgttgtaatgtggatgtagttgtaatttgggcagggaggagactgctgcagtgcggggttgttggtggtggtggtggtgtttttgcttatcactggtggtaggtattgataagggttaatttgaccatgagttcagacagcagaagccgaagcaggagcaggagcaggagccctatggatcgtaaaatccgttctgatcgcttttcatatcgtaattccccttacagaagagattcacgtcggggtttcaggttttctgacttttgattattcatttctatcatttatttatttatgttccatttggtttttaaagaggactaacatactttgatattacgggttatcaaaatggaagtctacatactttgatcttccaaagtttgtcattttctaaacttggaacattcacagtgtggaatgtgctatgtttgaatatattatttgaggatcctctcaagcccctttttcatttatgttgtgctctgtagtaaaaaaggatgttacataaacctttaaaagtcattttcaatctcctctggagtgtttagttactcagttcaatagtatttatttggcagtatcatttctgaaaggaaattcattgtatttttgagcctcctttaaattgtgctcttacccgtagatgcttagcattgacaacaaaatttccagcttctcagagacactgaatgtaaaatcaattcactcactatctatgcagtataaattaacatttccttacctttctttttggtcagccgagacaatctgtgcaagaactgcaagcgaccaggccattttgccagggaatgcccaaatgttgctgtttgtcacaactgtgatcttcctgggtaaggttacaacacacaatacatacatatgtgtgttttaactcgtttaagtatccgtactcatacatactacttattagttcattggatttccacatggctcttgttataccgaggttcaaatttctttatgctattttttgctaggaaattattgaacagttttatgtaaaacatcatatgctttagtgattgtttccaaagtgtattttgatttatcaacaggttttcgtgcgctgtacttttatggtatatttatgaaaaaaatcccagttttggctgtttgcattgttgctttcatgagaaacagttatacctcgagattcactagctgcataaagatattttttgttttccatatttttgtagatgtgactgatgctattgctcttgtttaattatgtatttatgtttcgtctagttgcggtttttgttactttctcagacaaacaaatggggtttttaactgctgcactgatggtactaattgtgatgctaaaatgttttgcaggcacattgccacagaatgcaccacaaagtcactgtgttggaactgccgagaacccggccacatggctaacaactgccccaatgagggcatttgccacacctgtgggaaggcaggacatcgtgctagagagtgtacagctccagctctgccccctggtgacttaaggctgtgtaacaattgctataagcagggtcacattgcagttgactgtacaaacgataaggcatgtaacaattgtaggaagaccggtcacctggcacgtgattgtccaaatgatcccatctgcaatctgtgcaacgtatctggacacgtcgccagacagtgccccaaagccaacattctcggagagcgtggaggaggaggaggtggtggtggtggtggtggtggaggtggtggtcgtagcagtggctacagagatattgtgtgcaggaactgccaacaactgggtcatatgagcagggactgcatggggcccttgacgatttgccacaattgcgggggacggggtcacctcgcatacgagtgcccatcgggcaggtttatggaccatcggtactcaaggaggtactgatgaaatgtctcattgtgtggtgcaggagaatttgttgaatattcattttctagatcaatcaagttgacaaaacataaggaaccatactttggacctgtttttggcgtgaattggcccgtatgtttatttggaataggatattagaatttgttatttgctgtgtttatgcttggattgaaatcttagttaccccaaataaagaactgtgttagttagttatagtcaactttttcttttgctttttgtctctttgatgtttatattttcagttctgttttagttatatacatatttaaaatgttattttattttatcacaaagtcactgtgttgcttgatgtcttgttatgtcgaacaaatattttgttatatttggtgtgtgtatggttttgaatgggaaatttgattttctatccttacatttaaggggaaacttttcctttaaacctaaaataccctatattgataaaataagataatatttacttaattttcacattacccccctcattcaaatctgattcccctctctttcccgtctgatctacataggcattgggccccctcagacccaccattagaaccatcgaacccaacacaattttttttttgaaaaatcactcaacaccatcgggtctcatcggatccagcatcgtgtgccatcggacccaatgagaaaatccaacacaagcatcggaccccatcgggtcttcgtcttccccaacccattcgcatgagcatcgaaccttcatcgggcctgcatttgactgcattgggcacggtggtttggtcgagatgggt

SEQ ID NO: 266700 - DNA, 3055 bp, Cannabis indica
ttttttttttaatattactagaatattaatatatattatatattataaatttttaaaaatatatataattaaatgcggattggattgaatcggttatttttgaggtcaaacaacatccaatccgcacaagtgcggattttagatttttcaatctaatccaatccgtgcaagtgcggatatccacattttgcgaattgaattggattagatcgtgcggattgaattggatcggatacttagtacaccctagaagaatcacccaaaaaatttatttgtctatataaaacaaacctttattacaattaattcagaaaaaaaaaatagaaaataatagaaaacaaatattattatgaaaacagtaaaggacaggattgccaattcaccaacatggtataaaattgtgcacagctccacctgtacattgtcacgcaaaatcgcagctattcctctcttcttctctctaaatttcatggtcttctcatcttctcagacctcttcctactgtgaatgtgaaacccttcttcctgcattgtcatgggtttgaagggagtcgcccagaaaggcaagggcgtcgccgataagggcaaggccgttgccgataaagcttctccagtcggaaagcggaagcgcagcgacgacgggaagaagtccggtcgtcttaggagtaacccggaagtcttaaggttttttgaagattccgctgacgcctccgatgatagtgattcgagcgatatcagtgactacttcaaaggtgagagcagaaaccccttgtgtcttaagattttggttctttttcttttcccccccttttttttctttttgatttttaaaggattcgaggttgattttgacattttgaagattgaaatggtcacaccctactttcgtcgcatttcattgtttaaattgtctagggttttggttttcattttcggttttgatcgtacaggcgactttttgcatgaaattgtatggtgttttgtatccgttatatgtgcttgttctgcgaagctgtgtaaattttacttgatgattgaaacatttgaaagctagatagggagtgtttgatcgtgagtcgtgtccgttgggttttgtagacaatgtgggtgtgtgtgtgtgttcacctggattgtttgaaatgtttaaatttcaatcatttgtgagatactattcgaaaacatattttttaatccgaaaattgataaatatgttgttgtgttaacgatcagcttgacagtatgagctaattgttctcactagtgaaactatgtaaaagctgatgctgaaatttaaaccaatggttgcagattttatggaagaggattttggactgggagaaaatgttgatactgaagcaggaaaatcctcaagtattccatttattcctaaagaagaggagatggatgaagaagaatttggtagaatgatgggagatggatataacgatgtctctcaatctgcttcctatgctgaaggtgatcatgagaacaaaagatcaacagacagaagttcgcgtatgccttttgatgatgatgcagttatctggaaagtcaaatgttcggtatgatttttggtttatggatcacagttttgttatgaattatattcacctctctctttctctctcatactaattttcacttttcttgtaggttggacgtgagaggtttttatctttctgtttgatgcagaagtttgttgacttgaaagcattaggaaagaaaatgcagataatatctgcatttgctcttgatcatgtgaaaggatttttgtttatagaatctgacaagcaaaataatgttaatgaggtactcttgtcctctcttttacgctctattttagttaaggtggctgttattttcagctgacttgggcttcccgcccgtcttggtttaattctaggcatgttatggtctaactggtatatatgcttcgagagcaatgccagttcctaagaatgaaatttctcgcctgttctctattcggcctccaaagaatgagatttcaacgggcatgtgggtccgtttaaagaatggaaaatataagggtgacctggctcaggtatgattgactctagacttagcagtcattgattgtgatactttttcctccctctacatttttattttttctaaaagctaatattggcgttgcaggttgtgcatgtgagtaatccgcctagaaaagcagtggtgaagctgataccaagaatagatctacaagcgatggctgaaaaatatgtactccaatgatctaaattgcttcttcccttctcgtgtgtgtgtgtgtggtttgtttttattttaattctgttgtagatgtgcgtgttttgttgtctcttagtaagaaattttctgtggaatttctgtttaatactctagctgcaatctgtttctttagttaggagaaccagggttggtggaacctttgagtagatctagcgaatggttttataatatatattaggctgcttagttcaagcctggctccagtgttttttagattttagatgcgcttgggttccctatttagtgatgtagagtagatattttgtgttagtaggaaatgtgtttttcttcttacgagaaaatgctttttattgcttgtcgaatggggatttatgacttcatagcctttttgctcgtgttttgcaagacttttcttttccttttatttttggtctgtgtatctgttggttgcatttctcaatttagataatagctttttttttttttcaaattagttcttagcttcaagagttcggaaaatgaacagagctagtgtactatttacttgtagttcttatataatgtaccttctcagtgccactactacaaatttaagattcagtttaactatcgtgtctgtggttgaagtttaaaaattatttatgttagtatttatggatgttcccaatcaagctacttcataaaatgtgactaagaaagttaatcgagttgccagcatattttttagtgaagggtgccattgggattgtaatggtgcataggtggaaggatgaaagttaaagagccctaagcccaatttcttagga

SEQ ID NO: 266701 - DNA, 3311 bp, Cannabis indica
accatttgctgcacaatatgagacacatcattaaataatcaatgcatagccaagacaagacctaccttaatcttgtacatgattaacaagtttttttttattattatttgtaaaagaattagacaaccaagcaagaaaatatatccccacatatgttggttacaagtacaccctcaaaagctcttttaacactaatgatttcttttccattacatacactaacaattgaatcatatgaatcatgtcccaacacagttacaactaacatcttaacactgaaaggtaaaaggcagaagaaaaatgaaggtgatgaactagaagaaataatcacagctttctcgtaattagtgtgtgcatacaattgaaaataagcaatgccatatagaaaaaaacaaaattaagtctcctgtgaacaaattttcagtgcacaatatatacaaactaataataagtaaaacataaaattgcacataaaacttaatttctaagagaaaatgtccactccaatagtcagtatagacttcaaaacaagctcagcaatgtccaatcttaaccaaacagacaccaaattcaactgatgaaaaccaaaataagtttccaatcaagtgaatgtcatcactcatcagtccctattgactaatcactcttgaaattaagaacaaattgaatggaaaaacaaaacctcaaggatgaacccatataaattccaactcaatagagaaagtgaagcaacttacatgtaaggccctgcatgaaatttcaatccaagagtcaattcaaactcacataatcgaaaaaaggaatctttgtaacagagatgaaaagaaagtaagtatagttaccaggaagacccttaagagcattgaagcagagacaagtatcttcaaccagcactggcccattcaccttttcaaacaataaatccaccaaaaacacttcctttatatacacaactatataaatatatatacagagagagagaaaagagaggaacctgaagggcagccaaacgagctttttctttggagatatcttcaggctcgccttgcaattcgggtactgcaaaaatcaaaaaacaaagtcgatcagattgagaaagagagagatatgataatggtaatgggtagggcattacgatcgagcttgaaggactgaaagggaatggagttgcccaaaatggcgcgaacttcttcgagcttcttggcgtttccggtgacaaaggtcaccggccgtgagagtaacaaaccaccacccaatccgctgccggccaccgccatttatacttgaaaagtcctcaaattttaacggtgataaaaacactaaatttcttaacaaaattaggtgaaaatctttatataaacaaaaaaaaaattatctttttttttttaattaagaaaagcttactttataataacgtagttagatctcgtcgttattacaaaataggtgttccttccgggatagagaaaattggtataaaaccgaacctctgggtaaatgcccacttaaccacattatccgcaataaaattacagttgctactaatattagaaaaatacaactaacaaaataaagagtggatctaatacaaaataagacataattctcaatctcccatcgggtaacctcctctataaagagcattgatcactaccctcgaatcactcacgacaataataaacttaaaatcatgatgcttcgcgacatccagagcaagacagcaagctgccgcttctccacataaagcatcaacaaattccagtttagaagtatgcacccagatcgcacttttaaaaaaatttatactttgatatgaaattcttaaaatgttttgggtaagttacactctgccttttagtgtttaggtagattttttatctgttttactatataaaagagacattttatgattatatatgttatacctctttaaaattatttgtaaatttttagaaaattgtgaataatttacaaagtttaaaacaaaatttacatattttgttgcacgcgcgatgacttaaaattttcaaaaaattccataaaatcatatttttataaacttttttatcatttttatgtatttgtgaaataatccgcaaaaaaatctatacaaacacatgaagtagaaactggtgttggaaatgcttcgatcacagaaataatttactactcaaattgaatcacaatgacatattatttttattattcttcaaaacatatgaatttataaacttatatttgaaaaaatcattaatatgagaaaaccatactttttaaaataaattattagaatatcattcatattcacaaattaaattggaaatattacataaacaaactgttatttttagtaaaaaaattatacttttacgttaaaagtttttttttttttacggttattctataaaaacacaagaagataataaaaaatacatacaaataataggaaaaataacatcaaaacaacaataaaacaacataaaaaataatatacaaataacaaaataacaagagtacaacataaaaattcatcaaaagactacattttatgtaaataaaatattaaaaactgtaaaaaatatttaaaatttggtaaaatcgtatttttatatatatatatatatatatttttttttgttatttttttaaaattatcccaattaaatttgggttaagaaactgtaaagttcgtaatatacttgtagaaatcccaagtgaattgggcccaaaacactcatcacaaccaggtccacttcacttccaacgagaaggtaagttggccactggctgggcctcaagatgacgtgtggcccaatagtggcccatcatatgctctcctaaaccgggacaggtaattaggttttgtttggcagaaaagaaaagaaaaagtgtagaaagtgaagcattttcaaatttgaaaaacgaaatattttgtagaacaagaaaaaataattttgaaaaataaaaatcgagtacaaatacttaatttgtattctcaaaaaaaaaaaaacttaatttttatttttatttatttttttggtaccaaacataaatttgttagtaaagttttaaaaacaaaacacaagtcatcattttattatatatatttgtaatttaaagataatataataatttgacaaattaagatttttgacctccgaacttgatatatatcaaattatgttttcaaactttttatcacactattgagattgttgaatttcaaaaaattttctttcaattttattcacgaacgcctgtcacgaatggatgttcggaagcataatttgatactttttaaagtttggagg

SEQ ID NO: 266702 - DNA, 2225 bp, Cannabis indica
ctctctctctctctctatttctccattaccatataccctttttctgttttcgttttttcttttcttttatccatatggggtggctttgcttctctttgatttgatcaagcttggtgagcttttacttgatttgtttatttggtctacatttgtttttgctgccgtttgttgactttctcatctttggtacttatacatgatcttttgcatttttaactgactggttctgggatcccaaaagttataagacgggtgctctttgcttagtgattgtagattaaatcgttgataaatataagcattgatatttctttgttgggttttatttatttgtttttcatgtcttgatttttataccaatttaggtgtgtaaatcatggatttgaacagaattgtgcttgaactcttgaaattttactcgtaattgaccaattgctctcttccttcttttttatctaatagcagttatggttcgtcttgtaaagttttgaactttggtgtgaaaaggggtttgacttgaatatgctgaagagtggatcgtatgtactgtgtgaagagtttaaattggattagatcttggacttaaactaagactgttaaggaagaactaaagagttggattaaatggggaatacttgtgttggtcctaccatcaacaagaatggattctttcaatccgtttcagctgcaatgtggcggagcagatcgccagatgactctgtttcagaacatactaatggagaaagtgttcatgatgtggcatccaaggagcctgaatcacctttgccagtccaaagcaaaccaccagaacctgtgataattccaaaacctgaacctgtgaaggatccacaatccccgaaaaccgacaagtccccacatatgaagagggtgtccagtgctggacttcgagctggttcggtgttgcaaacaaaaactggtaaattaaaagagttctacacttttgggaagaaactaggccaagggcaattcgggacaacatttctgtgtgtggagaaggcaacagggaaagagtatgcttgcaaatccattgcgaaaaggaagttagtcacagatgatgatgtggaagatgtaaggagggagattcagataatgcaccatttggctgggcaccccaatgtgatatctattaaaggtgcatatgaggatgctgtggcagtccatgttgtgatggagttatgcgctggtggcgagttgttcgacaggattatccaacgcgggcattacacagagaggaaagctgctgaccttactaggactattgttggagttctggaagcctgccattcattgggggttatgcatcgcgaccttaagcctgagaattttctttttgtcaaccagcaggaggatgcacttctcaaaactattgactttggtttatctgttttcttcaagccaggtatattattctagtacctatgtgatgttcaagacaagagtatacgtttctaagatgatattttacactttactttgcaggctgtgtgatagtatagagctagatctgttgcatacatttttatgagagttttaatgaaaagaaatctgttcttattttcaatttcccatttgcaggagagaggtttagtgatgtggttggcagcccatattacgttgcaccagaagtcttgcgcaagcggtatggtccagaagcagatgtttggagtgctggagtgattctttacattctgttaagtggagtgcctccattctgggctggtaggatattcacagttgatttttcttgttagtcatttatgtatttagtattgatgtttcatttatgtgtctttatatgaccttgtttctttcaccttgtttttgcatagaaagtgagcaagggatatttgaagaagtgttgcatggtgacctcgatttttcaacagaaccgtggcctagtatttctgaaggtgccaaagacttagtaaggaaaatgcttattcgagaccctaggaggcggatatctgcacatgatgttttgtgtgagtttctttcattggcttgttttcataattacaggttttattggttatccgatcttggcgcatagattcctacgtgttgtacattttgctactgaaatttaagggtttgtaatctttttgaagagtgccagttgttcacttcagctgctttatcaataattcttgtcatcattttcggtgtatatagtagtttatattaaggtgtttttaggtcacaac

SEQ ID NO: 266703 - DNA, 3307 bp, Cannabis indica
ttacaaatataaaactttaggtacttatactactactatttaccgtaataacaataataaaaacattgatatacatataatattttaagatttatttggtaagcatctaatattatgttttatatagacatatattttcaataaactcaactccaacaccgagtcaagtctaggtccaaatttatgtttgagattggaattgacttagatctttcataaattttataatacaaattaatataaattatttgttatgtattaaatattacaacttacattatattaaaataatacaatttttatataacccttatacgacgtaccaaacgagcacttatacggcaaaccaacaacccctaatgaaaatcatacaacatataacaaatctaatacaaataataatataaactagtcagtctcagtccccccaacacatttcactttcactttctcatctaaaatatttcaactcatttcataatattcccaccaaaatcccaaataccattcacattaccaatagctactctcaaattacacattcagcttaatctgtaattaatctcaaccgataaaatcaaatacattatatttatatatatagcaccataaaagactaattaaaaattgtaatgaccaatttgggaggtgggtgtttaaaattaataatagttaatttctccaacaaagtaatcaaacacatatgcaatgcagtaacaacaaaagcaaccaaaataaacttatcaatttctaatctattatgtaaaaaaaactatgaactcaaaatcaccaaccattttccatttatgaactcaaaaatttatggcaacaaattcaacaattagatgaagaaactcaattttggaatacaaatttactacaacattgcaagtattaataataggcttcatcaaatagctcaatcattttatgtttgttttttaacctacaaaggaaataagtagaaagtgggtggatcgaatcagtcaatggtaagcaagaagcatcggtgtaaacgaaaattaaaacacttagtaagcattatgcgctcataattgccaagagttaaatgtagaaaaactgttatgaagccattttgaaccacagaaaggaagcataacgtaaccactctcgagaatcaccaaagaccatgcatatgccatcaaccaaaagccaccctttaagtcgatgcaacaaaatctcaatataaaagatcaaacaaatttacacatcagagtgagaatacggggatggggcttgcatgaacaagagcaattgtcacaaagcaaaaactatcatggctttcgaagtctatgctacctaaaggtttcatagcatctcatcagttcattacaatgccaaaagtagaaaatgatttaagaaatgtgacacatgacaattctttcaacccatcctcaaactggatggatacaaaatgtattggagttcacaaccaaattgcatgcttcaaattaaacccaaatgtcactaaatcatatagaagagcactaactcagcaactaaatcatatatatatattgttattcaatcattgctaaatcacttgcacaatcaagatatccaaggtcaccatcacgacagaacagcgctcccaagctaccattttccatcaagctgtcaattatattaattttgaagtccaatgcaagattcgacagagtaactaaaatatccagcatagatactcaacgtgtttgaaattggtatgggataaagcaaatgctcaaaaagaaaagccagcccacaatgaaatatatattatatatacttacactagtattttcttctaaattttattcacttataggtttgaagacattgaaagatgtaactataaaactgcaatcattaatttcactacaaataactcaatagttttattgaaggccacaacatatcattgtttagaaagaggaaaaaataagtatgcacagggaaaaacaagacattcatcgaaaaaagattaaatattatcagaacttgtatttctaaactatgttattattaaaaatgcctgatggcacacatagattccaaaagtacataaacaaaacttcggtaattttttctactacactcagagatgaaccacacactaaaggtgcggaagaaagggaagtaagctttaaaaccatagatcatacaatcatcaaaccagagaacatagtctgcaatcaccagaaccataaaaagcatctgcggcccaacaagcggttacaaacctgaattaaacatccatcaaaaactcaatttatcattccatagaatcttaaaacagactaacaacactctcatgcaaaaggataccaatgcaacattcacactcaaatcaaaaagcgaggcatgaaaaaaataaaatcagcacacctcaactcaaacaactctcccaagattatgtaaaaattaatagataacatttatacgtactgatcaatattcatggaagcaccaaggcatgaaaatagaaatcagcacacaaacaacagcaacagaatacatcatatgaagtggagaaaaacagagagaaaggaaacacacaacagcacaacagataatcaatatcatgaatcataatctagataaaagtactcataaacaatccttgagcatagaacttggtaaaacaaaaacagcaaacatggggaactatataagcaatgcaaatgaataaataaccaacaacttccatttaatagtatttatttacacctgcagaaaaaaaaaattgtacctcaacagagattttcaaaacactgaaaaccaaacaacaataacacacaattttgttgagataacaataagcatcaaagagaagagagtgcaaacacataatcattggtaggtagctagcttcgcctccatcattcttctattcaaaataagtgatagaaaagcaagattacagtgtcatatcaggattaaaaaaaataacaaaagccaaggagaacacgagattttcttgagaaacaattgattgagaatacaaagaaaccaaagaacactcagacataataatacaaccgagcaaaatgccatttttatgtctttcttatcattccttcatacacactaaataaaaaaataaaagggctaaccacatttggataagaaaagcagctgtgattgcatagagccaacttaagagactagaacccccaaaatcaagtaatgaaaaataaataacatatcaaaccaaacttgatcaattataacatatccatagaacaagacagtgcataaagttgagcatccatatatacaacacatactagtacatcattaataa

SEQ ID NO: 266704 - DNA, 2852 bp, Cannabis indica
ctctagtaaatgaaatactctaacatgcatgtcatacttatcctaattcgtttttttttttatttcttaaattttttcaatttcactagtaagatgtagcggatagagtttatgagatgttgatctctgaatgtgtccaagtataaaatagtacttaaaattcatattatattattaaaattttaagttcttattaatataatcattgaagtttttcgaatttatacgcatacaatcactaggtgacataagtcagtagagttaatccttttaaacaaagttagcatcttcttttgtccttatttacgtaatatatgatttggtttcgtttatttctaatataaaaagtggggtaatttgtattataaatatttaagtcaaatttgtagttataaataaatatttaaatttaattttgtgacaataataataattaagttataattttgaaactctacgagtaatttggaccaattaaaaattattacgtgacaatttacttaacatttataccgtaaattacccttcatatattttacaaattgcaatatagtattttagtgtgtgtttcttatacttgaactgtgaaaaaattatgttttgtactaaaaataataataataattatgttaaatttaatgcataaaagttttgatagaaatggtgtatacctctccaaaaccaagttttgataccttatagtcttttcaataatagtcacttgataatttgtattttgaaaaattatactatcctaaatttaaatttaataaataattaaaagtttattaaattgacaaataattaaatttaaatttagaattcataaattttaaaatataaaatactatataatattattgaaaatataatgtacggtatttagataataaaagattttggataaaaaaaactactataaaatattaatttatttgtaatagattagtaggttctttaaaaatagaattattataggttctttaatacctcagtcttttcaataatttactattagaattatgtaataggtgttttttttgaacaaatatattagggtatatatataaaaaccagaaactatttaaaagggagaattaacaagggagaaaataaaagctaaaataataaatacaactgagagaaatgatcaattcaatcaccctgtcttccatcgaataatcacacacaataataatgcaatacagggcaaaacattaacatggtagagtaggaagaaagatcaaaatgatcatgattttgttgagataataaaaagatcaacggtggagattaaacacaaattgaaaatgaaaaaaaaaaaccctcgaaaccaaataaatacaccaagccgtgaaactaaagcatcgttttaaatggcttagtaatcagtggttgggagctgttcgtggccggtgtgggagatgaagacgaactcatatacgagcccagcaataccaccaccgatcaaaggcccggcccagtagatccagtggttctcccagctccagctcaccaaagcaggcccaaaagacactgctgggttcatcgaggccccatcgaaggccccaccagccaagatgttagcaccaacgatgaaaccaatagcgatgggagcaataatgcccaaattacccttcttgggatcaacggctgtggcgtaaactgtgtaaaccaatccaaaggtcatcacgatctcgaagaccaatccttgccatactccaactccagcagataagttgaatgttggaacagcctgcgaaacaccgaatcaaaacccacattaaaaataaagctcgtgactacttcataactaactaactaaatcgtaacaaacttataataatattaataaataatcagtaaaaaagttattctcaccaaaccaccggtgacgaacttgaggagcaaggcggcgacggtggagccgaggagctgagcgatccagtaaaggatgccacgtaggagtgtgatgttaccgccgacgaaggcgccgaaggtgacggcagggttgacgtgtccgccggagatgttggctccgactgcgacggcgacgaatagtgcgaaagcgtgagctatggcggcagagatgagaccggcgggagtggtgacaccattgtcggtgagcttgttgaaggcgatacctgaacctgaaccggcgaagacgaagatcagagttgagatgaactcagccaaggccgccctcaaagcgtctggttgagttgcctcctcgggtctaccgacggcgatgtctctgatcggcatagtgatattgtgatgatgatcaagattgttgatcggacggtgtgtgttacacgagtggagagtgagagagagaggggcttatagtacttgtttgttttccacatctcacctctctgagcttacttatactgaagcacatgaggcttgttaaactggatatagacggttcccggttttatttttatttttaattaatttaataattacaacgtgaacagctgattggttgacaggctgtgaattttttaaaaaaaatgtttaacttctaaaaaagtgaagcaatcagccgctagaaagctgtgtgattgacacgtgtacattggagataagtgccacgtaacatacttacattagtggatatatattgtctattttgtttggtctccatctagaaagatcgaataaatcaattatttttcgtatattgagcagaaaaaaatggacaaccttatatctatcataaatacttggagaaaaaaacaattacgaaaaataattttcataatctttctttttttgaaacaataattctcataatattaataaatagaaaaaaaatatttccaagcttttgtcttcttttttcg

SEQ ID NO: 266705 - DNA, 2824 bp, Cannabis indica
tgtacagttgtatctggttaattagttaaaattaaaagtttgtttgtgattcttttagctacttgagtactatgctgcaattcctatattagctatagccaatcaatctaatggaagtaacagtactgttttattgattgtttgattgatatcacaccatcttctcgcctaaacaaacaagaaagtaaaatcatcctcatgggttaggtctagtgtcaaggtccagttttctcttaaggtctgtggttctcttctccatgggacctacttacctagttctagagtttctgcattggttgtggggttcagcagagaaatctattggatgtaatgattcataagagtttgaacaagcagaaacaatgactgtttgatcagagctccataacttggaatggccttgtgttattctctctgttttgtagggtttgagtagagtcctttaaagatgaaaaatgacccaagttgtggttgttgctaggtattgccggcgtgccaagcgtatattaggcgagctacatcaacaaccttttgttgttgagcttgatcttcgaggtatgtgaatgtccatccactgctgtttgattatctacagattctaattctatgaaaattgttttcactgagctaccctacatgtggcatatgttggcagatgatggaacacaaattcaggatgtccttctagatcttgtaggacgacataccgtaccgcaaatatttgtgaatggccagcatattggtggctctgatggttagatctctacctctttgtttgattacaatgtttctctccttgtaagaaaatttatgggtattgcctttctttgtcattcagatctcaaaaatgctgttttgaatggtcaattgcaaaagcttctcagtacaagttgagatgctggtgaaactgagagattgggtttaattgtaaaaagaaaaaaaaaaagaagaggaaatcctattatgtcttattaacatgtatggaagtacattttgactgaattatccttccttgatgtgtctaatatagtcactcacagttaataataagtgttgaaagtatgagatatttttaggattatcttcattatgtgtaaccatggggtggggtggggtggggtgagtaaagaggactgagttaagtgaaatatgagctttgagctcttgtaatgagttttatcaaatgaccttacagataagtttttagtatagttgttactttctttgagataaaatattagcttataaagcatacgatacataatttgggcataaattatgtcttagagatgatataaagaatttaatgaatgtgtataaattttaggataaaaatatctataaaatttgaatgaacgaatttcatcaacaattgattcttagtcaatgaggaaaaacatcttaaagaccgacttgttattgttaacttgataattacaaacttacaaaccacaaaaaaattctctatcaatttcccatccaataaaatgttcttaaataatgaatacataaatatttttctcttaatttacccgccaaaaggaaatcaaaaaaaaaaaaaagaaaaaaggcaagcaaactagtaaataagaatttcaaaggggaggtcctgctctcataccatgatacttcctatgcattgcgggagtcatacaagcgaagatggatggtctcttcttctgctgcttgattccgaagataaaagatctcaatggaatccgagcccgagtcgcttgcctcagctgaggagtagtactgttatcattttcgctctgctttttagatgcagccaaggaaaagtccaccttcaaagtggtcagtgtcttctccacatcaatctgcattgttgtcacatggtccatccccgcctgcaactcgtcagcaaccttgttgttctcttgcttcatgttcagaacctcaccttggaactttgctgcttggtagcttgtgaatttgaaaaagtcatcgtctgcctcggcacttgctttcagcgccgtagttatctcctcttgaatttcacacaatgatgagaatcgtccctggagttcctccttcagctgaccgctcttctctaaccagactatgagttcggtctggatctctctgaggtgtttgtacaatggccgagcatcagatttgagtaggttttgaagagtgttagtatcattagagtcttccttcatttttttctcatccaatttggatatctctgattttaaatctttgatttcagtgtcaaatttctggatttgatggaagcagctgctgaatctgagccaaaattcaaggttttgctctagcaattcgtcaatctttgttcggaatttctcttcagttgctgacaatgtacaggtttgatcggttaggattgccttgatgtcttcattttctgccaaggatttaggattttcgtcagtgaggatgagatcagacaatgagccagaggtttcagggttttctaactgtttgagatttctttccctgttttcgtcattcaaagtctcttgtagaagtcctaatttcaaacgcaatgatctgatctcttcatcttttttcgaattgtcaccctttagttcttttaaaagaagggatgtttcaaattgcctgtccaaggttttcttctctacatcagtcagcctcttcttgatgtccttgtagtttcgaagagttgtagtgtactcagttaagagagttttttctctgtttccgattccatttaaaaacagcttctgccaatctggttcatcttcttcccttgtttcctttgattctgctttgagaagatcatccttcgtctctgaaggagtttgtttatcatctacag

SEQ ID NO: 266706 - DNA, 1423 bp, Cannabis indica
atttactctctctgtttgtaataataaactattttctgacgttctcttttaacttttaagatcaccgtaatacattaattagggagctctgaaaaatataagatactcaaataaaaaagatagttttttacaacgcaacgcaaggaaacatcatattccatccatatatcacagctaaagaataagatacttattcgtttaattacccttctcgttaacaaagacatgaccgtcaaaaaattcagcaaactctaaaacatcttcagctctggtgaaatctatgtatgctcgagaatatctctgatgctttaggctgcaatatcaattcaatacataaacactgtaaatgaaaagaacatataaaaaccctaactgacgatcaataatttaaatttaaccaaaaaaaaaagattaagcacctaatctttccgtacaacttaaaaaaaaaaaaaccaactttactcaaataattagtgattttgagcttaattaacaatcagtatatcattcgttgcgattctttttatgctaaagaaggtgttacagaaattaaaaacccctaatgtccgacaaaaaaatctagctaaaattttccagcattcaactttcttatatttaaaaaaaaatgaaagaaaaggggcaaagcaaacctaatctttccgggacggaagcaagaccatttgtagcggccagagaatcgatcatcaatttgttgaaagagatcggactgcgagagagaaggaggcaagtgcctgataacgaccttggtcctcgaagaaagacccttcatctcaaactctctctaatgtctcttcaaaatcctaaaaaagctttcatttatcaaacatcgcatacatacacacacacacacacagtagagagtagtactagtagtaatatggaaaattactcaccaaccttttacgttctcttttccttttcctttttcttttctttatctagaaaattcagcgagaaaatatgaatggaatcgagtcgagtgggaattccttcgtttctgggattgggttggtaagtcacgtattgaattcaatgacgtgaagcaaagaatcaaaaacgagggtcggcactactacagttacgactttataatgggcctggcctttccaaaatctttgggctttttcaatagctagttcggcctttacccaaaatctagagaattttacagaaaagtgccaaatttggaacattggtcttaaaaatatcaacattaggaatgtgaggacggggctcgcgagggtggaggtgtcatctgagtctggcacgagaagaaacaagagagagagagagagagaaagagagagaggttgtcggcatggtgagatcagaatattagagggagagagagatatagagtagggttgtacataaatttttgtaaaccgctcaattcgaacaa

SEQ ID NO: 266707 - DNA, 7358 bp, Cannabis indica
aaaatctcggtcaacaatacacttaaatactatatctttttttgcggatttaaaaccaaacgttatattctagctctctctgttactactactctgttagttgtgactaggtgtacacatgtaagacccagattaaatctttatttttttttaatttttagttaatattaaaaattaactttttaatctaatatatgccttatgtgtattgatatactaatttaattttattataatttttttgtggtatataattttattactacagtatattaattttcaaaattacaatatattaattactattttatatatttaacaatataatattatgtaatattaataaatttatataacttaattttattataatataatttttattaattaatttactacatttagctattttgctaaactttttaaagaaaaaaagatatttacttaactaatcaatgtatttattatttaaggtcatttctcatcttaagtcaatattaaattgcaataataattatttactaccttgtaacaccttaaagtacccttaaccatttctcttaataaaaaggtatcagttgtcatgtgttttattttagtaagagggcaaaaatgagatcgaagagtgaaataattttgcaacaatttacaaagtggtagcattttattactccattcattccccttagggaatctcctctcaaaaatcaccaaaatcagatacaatgaaactatattatatgcacattataatgacctttttatagtttggtcatgtgtaaatatcagatgttttgtgccgcctccttgtttaaaaagttaaatttccaattaagtctgaattacttcaaggggctttccagagggtaatatgacaacttagaaaactaataaaactatgaaagatcattatattttccaagaatgcagcttcctagacttaacagtttatcctgaatttcagttatagcacaagaactttcaaagctcatattacaaacaacaaaattaaatagacaacatgcaactgttagaaattatctatagatctcaaatagactaacacactgataaaataaaaagataataaattcgtaatataaagttataatcccttgaaaaaataaataagtggcagcagaacaagtgcttcctgttcaacaataaaagtactttgaagcagtagaaaccaagctaaagacactaaaattctattctatgttgatcagatctctagtcccaactttattatcacattatcaataaatgaaataataacataatgcaagatacccacttaaaaattgagtaacatattacaagaaatttacatttcttgctctctccagctgtacaataaacgattcctaaagctaaggcttagcttccaacgcagcctgagtttcaaaagaactcaagtcagcttttgttttagcatctacacaggaatatccatgtgatggtggagaaacagattagcctgtggagtataaagtaacagagctactaatctcctatcatacttgtaaaggacaagcccattggcttttgataaaggagctgagtatgtcaaaaaacaccaagtctgaaagaaatttatgagatacccatattagaaagggcacatttcaaaggcatttactgaaaatagattgtgagatatgaacctggtgtaatagtagatgctaccatgtctaatcaaatgacaatcttttaaagaatcattgagcttttaagaattaggggaatacctgatcattagaagcaatttaatagactgtgtagaaagacattgactaagtccaaggttgagacaaagagacgttgggagaagatgattttagtccttgttttccatgtatagctgatttgagcacattgtattgctcagctatagaaccataaaatgcctccttgtatgtctctttagccttctacaaagcacagacaaaatgatgaaagataagatgaatggcataaagttcatgaagagactaaatagataccaagttccagttccagtaacccggcagttctagcaaagtacttgtatgcagaaacaagatagcaggatacaatggactatggacaagatactgtacgccctattgttaagaaagaggattactgacttatatatcaactaatgaatccttcagtatatcctcattaagaccttctcagttaaaagaaaaacaaatcataataataaatggcctttggttggagataatgaaatggaatggcaaagactcaattttcattcaatttatttgtttggttgcattttaaagtttggtaatatcattccaaatttccaatggaatcacttttttactattttagtggaatgactattccattttgaaataggaagaaagactattctagtacaaaatgcaaaagaaaaaaaaaacattttaatttttattctatctttattcctattcatatgttttcactcctccaaaacaggcgtacccttaatcctattgacatgaaatctactccaccagatttatgatgcgcatttgaatgattaaaaggagttatccacagttgcctcacgaaaaaagtgcataggtataaggaggattacaaataatcccaggatgtataagactagtataaccaacctcctcagaacgttcatgagatacagcaatctcagaaaaactgatggccggtgccactgacactccaaccccatggaaggagataattcttttttctccaatttctttctctacctgaaaaatagaaagttgcgaaacagatgagaaaaattagaatttgacgagaaaccagcctacagaagtcatcatacctggagtggagggggcatgatatcatggcacagtaaagctaagggatatatgtgacctggagcaccagaatgttccacaagccttctcatattatccactgaagaagcatcaaagggcgcctaaccccctttacgtcagtatgaggaaatttaaattgcataacaaaagatcaacaacatgcttaatttgtttacaaataccatgaaggaaagaggaaaaaaaaaagcaacaaatttttatagaacaataaattagtctgtgatgacaatttttatttaatagaaacaaaactcataatattcatatgaagtgattgcaaggaaacaaatgtgattgtaaaaccaaaatattagtgacaaaaagactaggaaagtacagcagaatcccaatccctaccagagacatcacacccttaaattatttaacattgtaaatccataaagctagccagtatcttatcttctctcataccgactcaactgtgatgacaaaaattctttataaattcacatttactgttctttcccctcccaaaatctctcaaaatcactcctgctggaacctgatacaactactgctagccagtattccaatggcagcctagcatattgttagagcaagttagaaagggaaggggacggtgagcacaagaggcatggaagattctgtagggcccttaggtgttttaagttcagggaataagagaatgaagaagtgtgggagggatttgtaccgctgagattttgtgtgagggtacagcgtacccttgtgggaatattaggcctctttctctttttcaaaaaaaaaaaaaaaagtacagtagagccaatttggccatatttctcttcgatgtactgatactttctgtgtagtgaaataatatcacaacctcgcccgtcataaacaggttatgaagaatatgccttacagaacaataaactaggaggggagaggagaattgttttttaacacaaacaaaaacacatctaaagttgacattgcccgataagatgaactggaagaccattggctattttctcagcccccaaatccagttcctttaccgaaatcccttgtttacgaaagtagacatattatagtgtaaaagaaattgccagtagtttttttcttgttttattttggcacttttcaatctgttaaataaataatacttctttctaaataactgactaatagttcttcaaccagccaaagagcaactttttaatagaaaacttacaacactaaccgttaatcataagaaaaattgtttacttttcaggtaaaatcgattgtctctcatcagacgtttcaattcatgccaaaaaaatacatagaactcacaagataaaagtaatgcacatagcaactaactatatatctttagtatactaaaggtgaagaagaaaactcttactggataccattctcctgtaactggatctggccggtccctgcccccactaggagcaatccatacaatttgagacccacccctgcattgatcttgtttagtcagaagaacccactaatgtaaaatcacaagcaatgagaataaggttgacttaactgactcaaacagatgattgaaacaagacaatccatgatatacttcagccaatcatgaatacacagcaaaaaaaaaaaccaagacaagacaagtcattgtaatggttgaaagcagcagctatattattgggcaagctctccactatgaaacaactcttcagtatatttcaatcacttgaagtgtttctcctgttttattgtcattcactgtcttatgtttctagtcaccagtttaaccaccattcaaagagaccaattttcttccttttcttattcgttaaacccaaaaatcaagcaccttccttacccatttacacccaaacaccagtattttaaacaattgcatccttcttgcagcatttttatatagccttcaaaaccccaaagaaaatagggttaattgctcaaaattgttttatacaaggaacagttgggccaaaagcaccccacagtgaacataaataagagtagccctcaagcattacagattgtatgttcagatatttacataacaaagaatggaaaaaaatgaaaaataaagatacctcaaaagcaaagccatttccttcaagcttcgtgtattcgcctttcttttcatctcagcaagctcaggaacatcaaacatgtgcttttttgagtacacacataataaattcctgagagccataacattttttttaccttatcagaacatcaagaaacaaggaagccacaataattatttttaacatatcaaggaacatcagaagcacctccccatgctgaatggcttgcaaagcggatctgtcacaaccctatctccagcaacatatgtctacagtacaaaacctagagtttggttatgtcaaagacaaagcttttatagacagaaaaaggtagaactatagaggggggagggggtgggggggaaggaaaaggaaaatagctcacaatcttttcagcaaaatgtggatttgttgattcgagcaacaatgcaattactgctggatccgcctcagtttggtgatttgacatcagaacaatgttgtgaccctgcaatcagtagtccaatgtcaaaactatactgcagaagtcgcctataatttttctgttttctctcatttagcacacatgagcattttaactttgtcattacgttactgaccacatgatcaggcattggtactgtggggaagagctaaactcaacaaaagaacatggcatctgcatattacaaaacacggaaacatctagatctcactatccaaatctcaggcagtcaatgataaaccacaagataattaactgtgaggaggacttgaaaacccagataaaatcccaggatagtggttgtgacagcaataacctaattccataccggttaagaatggcttaaaatttcataacccaagctaagaacgtactggcagattaaaattgaatcaacttatgtatctacaacactgttcataactttctacactacatgcagtataacaaaaacagcatttgcttaatctcacaaccttgtcttgcacttcctaggttcagttatccagaaatatttacaaaaaatcaccctgaagctatcaaaattgcacggactgtacatatgcaagtatacaagtaccagaagtattttgtgaagtcttgaataaaactctttaaggaagttttgaaatgaactctttacagaagtttagcacaaaggtaaaagttcttcttgaaaagataactcatcagaacaacaaaatattcaacatttacgaacactacacctccataaagtaaagtttgcaatcagaataagcacctgctttaacttttcttccatttcactgaagatggaaatattgccaacatatgagttactgcatcagggtcaaactttagtttcaggaaagggtaaaacatgaagaaaccaacattatcaaagtagaaggcagatcaaataaatctcatgtacacatagtattcttaaaacaatatatgattagaaacaaattagaaacaaagtgaatctgattatcaaaaaagtcctcatacaaatcaaggaacaaagatttaaaaaatggttaaactattgctcttggtgatgcatgacacatgagtaaaaaaatctattaaaatattgtgaaaatatcataaattttacaatattgtagatatgctcattagtttagcaatttattacaaatgtacttagaaaaattcttaagtaggaataggacatcatattaccccataggggccttttctgttttagcacctataaaaattataactcaactattttaaattgattgcatatattataatatatattataattataactgacatccagtcaatcttttagaaattctaaaaattttcccgcgccaaaatatttttgttagaatattaattgtatattagttgtaaaaattaaagtaaattgtatttagtaatttgttagagtagttttccatttaatcttctacttttgtatataaatatatactattctataaaatacaatacacaattctattcaccattctctacatggtatcaaagcaatacttaaaattgtgattcaaaattcgaaattagagtttataaaaacataataatagaataaaaaaaataaataagattaggatttgagtttaaggttccttattcgaaaaccctagttggagagcgagttctctcaccacccacatagacaaattccgaagttcaacagcttggatcaccgcatgtgggccccacacgtcgccctgactcccacgtgacgacacgtgagcccgcgtccgacctcctttttggtgacgataaacttctgtcacgctcccagcccttccctgtcctccttgcatcagtctccgacggttcttctcattttgtggtttaatatttctgctttcctcatgtttgggcgttcattctttggtgttcgcttttttctttttccctttcaattgtttttgctttcga

SEQ ID NO: 266708 - DNA, 1689 bp, Cannabis indica
gaaaagactacacacttcagatggatgaaactagagaactcagaaaacatattgctcagctctttgccaaagaggggagagcaatagagaaggattgttgattgtcaaaggaaattaccccaagaaagaatacaagggaaaccataattcaaatgggtacaaagggaatcaatctaagacaaacatcaggaactctataaagggtttaaattccaaaagaaactcaaggaaatagtgttattattgtaagaaagaggggacttcagatataactgtttggcattgaaggttaagctgagaagagacaataatcaaggtaagaacaagaaccaaggggaggctgatgttgcagataattatgaatctgcaggagttcttgctgcatccagttcagagttaggtggaaaatggatcatggattcagggtgctcatttcatatgacatcaaatgagaatttattgagttctcttactaaagaacacaataacaaagccagtagcatcaaagggattggtactatcaagattaaggctcatgttggacaaatcacaaccctacacaaggtcatatatgtctcagaacttaaaataaatttgttatccataggcatgtttgacaaacttggatacatagtagatatagatgatggtgtgatgagaatcagacaagggtcacaggccttgatgcaaggaaagttgagtaatggattgtacttcttggactgagacttaatagttggttctgctgcaccaactattaatttagtaagtgaaaatcaaataagaacgaggcttttagcacttttgtataatagaagaagctgttggaagggaacaagcttaaagttctaagaacaaacaatggacttgaattctattcaaataaattcaaactattttgtgctaaagaaggaattctgagacacaagacagtgattaagactttctaataaaatatcttggctgaaagaatgaacagaacactacttgagatagtgagatggttgctcctaggtgctggtttgacaagaaaattctagggaaaagcacgcaacacaacatgttacttgatcaataaatatcctttgtttcacttcttataaacatagaaactatacatgttcatatatatagcagatcatataatctttatatgacaggaattaaagtacaaatcatgatcttagacatttagaaagtttctcgatttgtcactataaattggggtttattttaagaaaattttgcacagttgtaaaaacgtattgtgattgtctccagggtttctatatgttataaataggacttagattacagtcaaacgttctcatctcttctactctcatattttcatatatcttagttttgtgaggagagcttttataaaaacctagagtgttcagttaggttttaatctttgtttattgttcttaaactattcttagaatagattgaagaacttcatagaacaagagaatggtcttcaagagaagatttgtcaaagtcttacttaaggaggaaataagcactgacacatcaaaagacaaaaggagttcgttttttggtagtgttcagaattaaattgacaaagtaaattacaaaagattgcggtagaactttactgagagtcttaacttatttaaatcaattgtttgagactttactgggcgtgactcagtagactagtag

SEQ ID NO: 266709 - DNA, 2495 bp, Cannabis indica
atatactattttttttttaacttttttatttttttttttcaaattttacggtttaagtttctgaagtggttgcagcgttagttgcaataggggtatctatatgatttttttgttgcaatttaggttgcagcgctaattgcaataggagtttctatgttgaattctgtaaaaatacaagaaaaactgttttaaagtataaaaataaaaaaaccccttaaaaatatttataatattttaagtatttcaaatttaaataaaaatttctttatattttaaatatatataataatattataaaattaatataatcacactctatataaaatagatatataaatatataagaagttatttataaatatattattttaataaccgtatttaaaatataaaaaaccataattaaaaaaccaaaaatttttatttataaaattagtattttataatagataatttaatagattaatttaattgagaactattttacaactattttccaaaaaaaaatttgtttagaactttataatatttttactgccactaagggtttttaattttaatgtcgagtttgtcacatcttttcaaaccgttacatataaaagttgagtttttggggttgtgtaaaatcagaaaaattgaggactaatttggaaaggaaatagagacaagttgatgaaaaaatatacaaaaattgagggccaacgatgcaaataaaccataaatccattaaataaacacaagcaaaaagatacttttatgcaactaactatgaaaggtcaaattccactgaagttttgatgctttcatagcactttcatcttaaacaaatcaaccaagtttattgagcactaaaaaaaaaaaatcttttaaaactaagaatgttcaagccaccatagaactttttagtcccatatggtgttttgtagggtaaaaataagagagaaaagcaccatcaatatccaatcatatacttggtctgtgaatcccaaaattccttggtttgcttcaagattatcactctttctgcattcattctctccttccagtagtccttgcacctgcaaaatgttattgagatttagaacggtaatagttttttgctataaaatgaaatggcgattattggtactttgtttaccttctttttaatagcatatcaagttccaacatctgcactgatttagtatatactccagcctaaatgtaaaaaaaaaataataataatgacattaataaagataagtcatgacatgaagaggaatatgttttaagtttaaaatatatgagcttaggacataacactatgagaagaaagaacattcatcaatgatcacatttcagtgagttttttcatcatttggctgcagagctagaatcttcgagggaaaagaaagtaaacgctgaaaaaagtgcgaaggtgcaccgattaaaatgactgattaatcttgcagttttcctaatagatctcaaactgtatgctctttcctagccagtacttgtccatttcaatcacagaaataaacaacagaaaagggatctttgattctgtacttgatacagtaaaatattggatacacacctctctgcaaattgggcactttgattctctacttgctgttttagtcctttgaagatcatcacagaagcagctgagcaagcacatgcattgcagaaaagatggccacagctcaaagcacatgggttgaaaaccatttcctgccaaattatcacattacacacattaagaaaaaaagtgtcactatcttccattttgcaactgaaatctgaaagactgagaggaagatcttaccaagcatacagcacaagtaagatcatagtccaactttttagaatctggaagtatcatagtcattacagggggcgtggcatcaagatcactcgaaaaatgtccagaaagcccactgacatgtcccccatccgatgtgtccaggtttagataaaaagcacccaattcaataagccaaggtgattgcaagagttcaatatgttctgattgcatctttgatctgaaattcttgccattttcagagcaatgtatctgcagtaaaagagtaagaatcatcagaacaattaattacatgattacataaaaacaaaatgagggaagatctgtaagactatgattggctaggccatactttatcatacttcttaaggatctcctgatggcaattgcattcattgtagcatattcaatcagcatctttccttcttctaccatgttctgttgatcattcttgaaacatttacgcaattgcattaagtatctctgcattccagtggaaaatgtgaagaggacggaggtctctggactctggaactaaaacatccaacaatctctaaggcttcttcatcaactctgtgaaaaaacgtctgatcacacactaacgaaaaatggtagaaaaaaacgcttcaactcattagagaataaaatcacttatgatgcactaaatttcgaaactgataaactccca

SEQ ID NO: 266710 - DNA, 2216 bp, Cannabis indica
tattccactataagtgtatggtcacgttttttcaccaactacaatatttatgagaattcatacataatattattgtaatatattattagtgtaatttaatattaaattttatatattaatataatatataatattaaaaaaatattagtgacaagaataatagaatattttttttttgcatttgtatgatacttctaataattagtgacaataaagaaattgcatacatacatagtcggctctgggcataggagggttagacttgtgtttagagcccactcattttaaaagctcaaataaaaaaatatttttaaaatatatacatattcttttaataatttttaaaaatatcatttatctttataataagggcccaacaaattattttttacttatagttcatttcaactcaagacgggtgctacatgcataatgaataattgtacttttttttaaaagcataatgagtaattgtcaatctctattatttttaacttcatttaatttttgttgcattataaagacaaatttcaaattcaatcattactctcataatagataaaaattaatcaattacaaactatgagaccttccttaaataaaaataaaaaacatccattttaaatttaggcaatactaaccctatttcaattccacccttaacatctctactctcactcaatgaaatcgcttttgtactatcaatctcaatctcttcaattttttcggtttaccaacccgaaatccctctcataaagatccaccttaggagacccgcaaaccatcacatgggtatccgacccgatcatttctgcccattccgatatccaattttcagctccaattaaaaattctttgtctaacctaattacagtgttcttaattgcgttagctccaataattaatccatattctcccaacaactcacccctcgttgcctttgctcgcccgaacccgacacaattgcccaaatacgagccaggaaccgaatgctcgaatcgggtcaacccgcccgcaacaaacccgaaataatttggatcctcatcatcataagccaattgacttactctttcttgggtttttagcacacatacccataaaaatgcgcacgtgacaatataaggagacaaaaaatctagtgcaagtgaatgttgttgtttaagattaagaacactaattctagttctaatcttgtccacgtcaccaaatccaagtacaaaagttgtacggacaagtgtattattatcattgttaacaagctttgatgatgatgtcaatagggctgttcttttccaccactcattcaagaagacaccctctaatccacgtgtatcaacaacaaccgtccgatcacaaatgggcagagatgaagggtcaggatgataacttcggtcaacacaaaacgttgaccaaagcttcatgaaattattgaacgttctagaatctcccacaacatggttcaaagcgagtcccaaacaaaaccctgagttgggaaacacagtgactcggacagccaacagaggaacaacgacactcgcaccggcggcgcgtgaggcgcgtggcttgagctcgggagcgagttcttgaatctcggccgcaccccttttggtgtggattccggtgagtcgagcgaagtcggagtcggaaacgacgacggagaaatcgacggcgtcttggggtccggtgacgatgtggggtttggttggaggttgggttgggaggaagagtgcggcggcgaaggggcggaagtggcggagcgtgagggcgagtgagagcttgaggtttgggagaagtgtggaaatgaagtgagtgagtggaaagggatgattgtagaagaagagaggttgggttggtgggaagaacagccatggaaggtctagaaaggttagagctttttgggttgaagatgagggtggtccggcgggagtgattgaacattcttcttcaatcattttattggttaccattttctctcttctttttctttcttttctttattcacttaactctcatatcaatgtgtatttatatatagatatattagatattatattattatgaattttatttgcagtaggggtgtttgcagtgtgggtgatgcggtttttgacaatttttttaaactaattcgtatatacagtttttttaatttttcaaaccgtccacgcaccgcgaaactaaaaaactgcgaaaaactgcacagtaaaaaatagtgt

SEQ ID NO: 266711 - DNA, 2737 bp, Cannabis indica
tcaatgcttaaggagagttctccagagttatgtcctctaaaagttcaatcctcaagtgaatttttagaatgagagagtgagagttcgtgaggatgagtcgtccctctttgcaattgatatcttctttatataggttttcatctaggactctcttagactttaaactctcttaaccccagacacaacttccattaactatggtcgggttagatttttaaatacaaaatgatattaatcatatttcaaaataaatatctataaaaaataataaaagctgaacatatcttctatatacacgtaaaacttctttttgtcatgaggaacacatgctgagatcatgtcgttggccgagtaagggtgatatattgtaaaggcccaatagtacttctataaagtattttgtcttcaaatggttcacccttgcttagagatagttttgtagctgagctagtgggatttggatagaaagacagaaaagagagaaagaaatggaacaagcacattgatgaggagatgttgtcactgaagaatttaagaaacctaatggtcaaaagcttgtcggatgcaaatggatattcagacacaaagaagattaacactagaaggacaagatcaggtagaaagccaggcttgttggcaagggctttacacagaaagaaggtactaattttacataaattttttcacctattatttaacaagcatccattcgagtaatgatagtcaaagttgctaatgtgatcttgagattgattaaatggatgttacgataatattcttacatggaaagctagcagagaaaatttatgtgacacaaccagagagatttgaaaatggagagcccaatcaagtttgtctattgttaaaatctctatatgctctaagacaagctcctagacaataaaatctcagatttgatgagtttgtgaagactattggatactgtcaaagcaggtatgacccttatgtctactttaatcaacatatatatatatatcacttattctatgctaatgatatgtggttaatcgagaaaaatagaactaagatagacaaacttaacgggaaacttagtgtaaagtttgaaatgaaagacctaaaaccaaccaagaaaatcctaggtattgacatcaagaggaacatacctagcactatctttctatctcaaaaggggtacctagagaaggtgttgaacaagtttgatatgcaacaagctaaacctgtgtcaacactcttatctccacatttcagactatctaaagaccaatcacctaaattagagtaagaaaggtctcaaatggatgacataccttatggtagtggtgttggcagccttatatatgcaatggtgtgctccaaacttgatatcgggtatgataagaacatggtgagcatatatttggcagattttggacctcagcattacgtagctcttaaatggatattaatgtatctcaaacacactcgaaacatggtaaccatgtttggaaatattcattcataaaagagattaccactggttgtgtaaattcagattatgcagggtgcattgacacaagaagatcactgtttggttttgtttttactatcttaggtggctatgtaaattggaaatcaacattgtagaaggtggttgctctatttttcaactgaagcagaatacatggctcctatagaagctattaatgaggctctatggccataggaattcactaatgaacttggtctcacctcagaaaaaatcactgtacattgtgatagtcaatgtgcactttatcttatgaaaaattccatgcatcatgagaggtcaaaacacatcgatatcaaattgcactttatcaaggacataatctcaagcaaccaagtcaaagtaaagaagatcactatagaacacaaccctacagatatgctaactgaatgtgtgacttaagataagtttagacactggctagacttgctcaacattgaaggaaactgagtcacatcatgatgagacatgattggagtagacatgtactcattacattcttctatagtatcacaattaaggttgaaattttcgtaattaagacactaaaccttgacacttaagaaaaccaacccactaactatcaaaatttgttagttgtttgtccctaaccgattatatataacctatccttacacctattcaagttaagactttcattattgtaactagagagattgagagaaattgagagttgaaaaattagagtgtgattcttggagggttgttaaagagattgatcactctagaagtgacttccctcaggtaaactgcatttgtaatcgagcaagactcgcaagtgtatcatctttgtaatctcttgactgatgttaaaggttcatcaataaagtatattaacttctgcttccttggattagattatagatcacattgatttattgattaaaccacataattttttggtgtgatcttttcttgatttgttttgtttaggaaaatttgcgtcaaaaatctccaaaaaattcactttgatgcagattagtccccaagctcgatcaataatggtaataaggtcacgtttcttgcaagtccgttagtcctcattttaatagattcgtttacttattcaaaaataccacgtgttgaaacataattggtccaaattattgtttaatttaaataatataaaataactaaataatttaaaagtcataatttttcttttttttctttaatttctttttattt

SEQ ID NO: 266712 - DNA, 5064 bp, Cannabis indica
aagtgccacacaagacacaactacaccaattataaaataaccaaacaataacacatacccctttgaatacatgtacgtatattgtaagtacgtataattttaattaatatactatggtatattctacttaaaaaacaaaatcagatgcaataattgagttaggtctacaatcaccacggtctagatagctgagtatttgttttaacgactaattgggtataatatatcaactacaacatacaacagttctatacatgttattattgatcatgttgagctcgtttattattttctaattagtgatcatgatgaccagatcccaaaaaaaatcgttaatataaattatcggaataacatcaacctttaaaaagtaaaattggaaaagaaaaaaaaacaaagcagaattttagtaggggacaacatcctggttattcattattattactactaaattgatattagaggttgttgatacgtaacaaatcaattttataacccaaacgtatgattgaatttatacgccacctaatagtggcaactgagtttatcttggtttcatcagtaaaaacaaataaaacacaagcaagcaagcaataaataaataaataaaataaaatagaattaaagctgccaatgcatttcactagttaaagtcataccaacgaacatgttcctatacgtaaaactgtaagaccacacacccacaccaaactgtaaaaccatatttcatgaaatgagtctagaaaagcataatttcccatgccacacatcttcaaagacagacacatctttaaattaaaataataattaaaaaaaaaaaagctcatatacggctaatctaacatgaaatataaatgtacattagttttacacgtcatccaaattcaagggcaaacttttaagatatgaactcaaagtttgcactctaaaaagtcttaaccattatatacgatcagcttgcagtagtaaccacaaaaataagaaatatcacaaccaagattggtatgcaatgtgatccacattaaataaatagaaatattcttacacgaaaaagctacttcatatgagtcatatcataaacaagaagagtaggggtaaatatgaaatcatattcttctacgaaaagcaataagatatcagaccatgccacagctcaataaacttcaagaacagccacatatttcaacattccaaagggcattttattttcctccattttgatggagtaagactatgctttctcaattacagtcaaaggtttaagagtacaaaaaaattgtaattgtctatgacaagatgtttagcaaagcagcatagctgtaaacccattgttgagagaaaaaaaaatctttgttacctgaaatttaaaaaatttgtttgccacctcatggttgctgaatcaagtataagagttccagattctatgatggagctgacacgctaaatcgaaagccagacttcccacgatcgtcctcgtattgctttaatatatagtagtagttgcactgccaagaaaaccaaagttggcaaaattcaagacctttcttaatgattcaataggccatacagaaaaaagaaacaacgcaaacaattgaaaagtacttccatatgtgttggtcaaacaggttcatggagaaaacacatttttatatgatttccagaactcatactttaagatcaaaattataaatttcacaaaaataacaccaacacatatacagataaccagtcttgtattgtggaaaatcagtacaaccaagacagtttttttttagctggaacacaatcaaacaaccaagacagtttgatttattccgaacacaccagatcaaactcaagcaggcgaaaaatttaatagccacaaaaaactacaaataaaagctaacttagaaacagcaataagttgcagcaaaacctatcttataggtcagaaaaagaaaaggtatttaactcttattctagacgcaaacaataactcaaagttttatgctctcccatatataatctggcaagttctccttgccctaacaagcaaaataacacaattggctaaacaagtatgtaggcagatcaagaaactgttaagaaatagaattgtgacgattgtctacacaaaaaaaaaaagattatttattaaattctacaagactactatttctacaaatcaatttgaagtttcaacagaaattctgggttgtgaaacgaaatactctgtgatcaatcagcataacaaatccttgcacactttctttttggatgcatttcatttataagtgggtgaatttggaaatttataagttttacctcaacattgaataatctttcagatggaaaggacacagtaaacaaaaaagtactgtttaatggtaaataaaaccagattatataactaacctctaggcggaagaatttggtgggcacaacaatcccagctccaactgaacttcgaaatgactgaaagaacttcggaacagagaagttccggaactcattctctgtcaattttgcgaggttcccagaacctgcaaaaatgtgtccatgcactccatgttctcttaaccagcgcagaggaagatcaaaggaaagatctgcaaatgcagtaagagcaaggtctccgccaacaacatctcttcgagaagagtcggaactctcttcatcaggtttatcattattttgccttcttggctctgtaggacctatgcctcttgtcttaaatccccacactgttgttggccctcccacagtgcaaactggagagaaatcaccacccaagaagaacctttcaggcagggatgagggcctgttcaagaatccattcccccatgggaaaataacaccaccagatattccgaaattaagtgcaacgttataaaatccaaaaggcaaagcgtaacgaagatcaaattcctgtttgaaatttccacagaaaaagttacttaagcagtaaaaggcataaagaaaacaaacgaagggaagggcgtataacagtgtaactgtcatcaaattaacctaatgtccgatgatgctatgtaaactctacgaaatatatatatttttctctcaaactaacaaaacaagtaatcataattcctccaaataaggcgacaggtagggagaaaaaggaaagtaaaagaaaattgtcccaagaataacattttcttgcaaatagtccagaccaatttatttttacatatcataacagaaccaaatcaatttgactcctacccaattcaatgaaaaggctagacccttattctgtaaattctgttttaagagcttagatgtgatacactaaacataaggcaagtatacctggcgtagaaaccgtaaacaccgaggatcaggagataacccaccaacttgactgctcaaaacacaagcataacctcgagttggtctcacacctgaattccttctgtcaatcttaaacgtatatttaagagatgaaagtaagccatgtccaagctgccttcttattgtcctcgaggccatctgtgttggatctgtcaaggtacgccatccaagattatatgccaagtcgtggttcttggtcgaaaataaaccaagagatagacccaattgtcgctctttgtatgaagagtactcttgccaatcttgagaaagcaagaatgcccgtgctaccacaggagttaagaagcatttgaatctgggcaaaaacactccagcacttatctcagaagtttggtttggtccatacgccaaagaaccatcccacagatccccatatccaagccaattcttatacttaactgagccttcaagcgtccaagatctagcctacaaaagaatcatgtaatttcacgagagctatccacaagtaaataaacaactcacacacaataattcacaaaacttgacatcttgagcatctgaacttaaaataacaaagtcatataacttctaaattcaatgaatgctcctgagagacatgacaacaatgaaattatgaaaggcatgtgaatagtctaaaacttgttttgaacctttaggtcacataaatccaaaaattgaactgacctacttaaaatctattagtaagcaatacactaaaaaacttaattacatgactagaagtctttcatcttgtaaagcagcacttgcatttcaattaatccacttttactcagcaaccaaacatgtgaacaactaaatttgtataatgaaatgaaacaaacataagcagacgcacaattaaaccttaccgcaggtttagtgtaggcgccgcattctccggagagggggttcttggtctcgacgacctcaacgaccacattagcagtcccaggcaactcaggcggaccagaatcgagtgtaatcctaaccgaatcaaagatctcaagtgcttgaagcttcgcattggccattccagcagcctcgagcagctcttgcatagtgccagcgttcttgataccttccacttcagcctcgatcagatagtccttggtcttagaattacctttgatgataacatcatgaaccctcaaaggaacttgtccggtggacattcgatgcattaggttttcaagcttggacttctctgaacgcaaccggtctgcctgggattggggcttctttggtggctcttcttcttcctcctcttcttcatcgttatcatcctcgtcgtcttcttcatctgcggcatcgtattcatcatcttcggaatcgtcgccattggagaatgggccatggtcttcgtggtccttagggttgagagtgttgagaccctgtttgtcttcgttggggtttgccatagccagggttagagcggcggtggttagttttttttttttcagacaggacaatcgggcagacgtgaatgctcagcaaaaaaaatacctgtaattatttacaaaagattaattccacagttttatttatttattttattttttattattattattattattttttgagaaagaattacacagtttgtttggatagaaataattgcatagttctttacaaaaaaaaaaaaaaagaaaataattgcatagtaaataaagcaaaactaaaatatttaaaataaaattggattttttt

SEQ ID NO: 266713 - DNA, 1501 bp, Cannabis indica
tgactaaattatttcgagtgctaaaacagatgagggtgcatcaatatatacattttaaggcgatgcatggtaaattttcctatactatatacatgtcttgattatttaattttcgttttgggtaactacagatcgcgaactctataaatataggtttatatatatatgttaatttttccggtaaattaaagaatatgtatcatataaactaatagagagatagataaatgattctatatcggaccaaaatattgtacatttttcaaataaactggtataattaatttcaaaaccttaactgcgctgatcaatctttgtattaagcggttgatttcattttaagttaacctatagcaattatttcaagttatacgtacattttgttttataaccttatatacatggagaatttaccttgtctctgtaattaataatatgtatatatatatatatatattttatttttaaaattcttccattctaacttggtttgtaaagaaagaaaccgttcatgtacgtacatgcacatctgagcatgctggtgttcgatgttaaatcggttctcattacatggttataacaaacagttcacagattttgggatttcagatatctttgattaatatttactaatatgcattcatgagttgtgtgtgtataatttagtaatggtagaaaccttttgttggaaatttggtaagatatgaagagaagagagtggagagcagtctttttattagtactgaaaacatgagcagtatatatgcctggcctagctagttaaggcggtcgggacatattacttgtatctatgtgtaggtacgacacctaacatggttgatggtacgattcgttataacatgagatacttataccaattttatacatcatgaattcatgagtaatattattttccatgctcactctttgttattaattctaagtgcataatatgcgcatgatatagtattgtaattatttatatataatcctctaaaattagataatttactgtcatcaaaataagatttaaataatagttgttttacacatgtctaaaatgaaacaaacatcgttcaccaaactctttgtatcaagattattttcaacataatcaatcatttagaaatatggaagagtttattataatataaattttaataaaaaaatagacactactacaaaaacctcctttagaggcggtttttaagctctttcagcggcggttctggcgaaattctctactgacgctgatcagggcgacgataaaggatttttaaaaactgacgccatatatacccctatggtgtcggttcctatctaataaccgacgccataaatagcgtaggaactgacgcaaaacatgaacagttttcagtttttttaattttatataatttattttaattatatatttattaatttatatgttattttatttaatttaaattacctatttatttttaaaggtaaattaaatattatttaaattaatttaaaa

SEQ ID NO: 266714 - DNA, 3466 bp, Cannabis indica
gatgttaatgaaacatacttgttagtagatctagatcctggtaaaacataatccaacaataattgtgtagccaatgatttcttaaaggaaattgatgctgaaattttccatagtcctacagcagatccttcatctaaaactttcgtgagaatctcatcaccaaggctcagcaatatgtaactgtgagctttcaattctatgtctttctgaatcttctcttattttaattcttccacaagctcttcattaattaatggctgtttcaatccattggtggaccagaagaactttcatcttgattctccatagactaaagtactcattagttccaatggacttatccacctcaaactttgctaatgtcatttttgaatagagttcgatcttcaatttgttcttgaaatcttggagcaccttcaaccttgttttgatatcatttgttgtgatctcagatcacttcaatcaagaacaaaccaattatgacaaacaatgagaatttacttgaattgaaggtacacaacactcaacaggaaagataaaattgtgtttgttttattgatcttcaatgaactaagctacaattacaaaactaaaacacagagcaacaactcaaaataggtattggataattcacatgaggtgttagtaactggtgacttgtaactaaacttaacaacgaccatttaaaatggttcgtattccttagcaaccacttgaaatggttgtctattcatgtactcctttattgtcgtttccaacggtttgtaatgctcattaccgattgtttgcaaccgatgcctatttcatcgtgttttgcgtctgtagcatacaatgtcgatcttatgaaccgacaagaatactatatctgattgttttagatcgtgtctaaacttctttattttagtagtgtatcttgcttattaagattattaattattagtttaccatacgtttttcttttgactcctttttaattttaatgcttcctttaactaagttcatagggtctatatgcatgcacttaatcgactaaagaaaaaaggaggtcaaaatcaatctagaaaataatgatcaataagatatcaattgatgaaaatccaagaattaggtatgaagtaaaacaattaattaactaaagaaaaggaataataacataacaatagttttttctcaatctagtggtattgcttacttactcttttcctttatggttgttgtagttgagtataaaattaaaattttcattgataaatatttatttatatattgtggaaactattagttgtattcgtgaaaatcatgcaaaaagaactaaaaaagaaagaaaatatataaaaagtgaagtgatttacacgaaataaccctgaaaacatatatacttttctgaatttttttttttgaaatctttgacaaatgttggcaaaaagaagctttctggtttagttagtcttccaccatttgatatattttttttttctttttacttttggttgtaaaatcttttaatcatgttattttcataattatatatatataaatatattatattgtcctggtgcatgaaccagacaaattatatcatcttagatttgaaaacgcactgtatataattaatatgactcgtttcttaatttctgatgcactgatcatttatatatattatataatataataaagattattatatcactacaaaaaaaatgattttttcctgaaaatcaactattaattacaatataatttatttttgtggtccaatgatatgattaaatttatagccataacaattctaatgtgtaggcaaaataaaatgaaatgttatatataggagtaagattgtgtacctttaactattgaaaaagctatctttgatcaactaaattaagatttgtaaaacaaaacaaacgagaatttagattgggtatatagtgatctataacactctcttcaaagtctaaaggaagaaatgacatcgcaattttttatgtatcgttggaggaaagcttgttttaaacctataataatagagttcttaattaagcttgcatatgtcttatgtttacactactacaaaatagtgttttgcattagtcaacgcccaaaatcgatgcaaaaaacaaaccacattaaaatgttttgtcggtttaggatcgacgaaatttgcatcaatttaaaattggcatataaagatcttttgcatcggttatagatagatactatgttgtatctatttataaccactactacaatatgggcctttaaaaattgtttttttttaacttattttataaaaaaagaagctaaagggtgtgataatgcccgtttggtttaaaattgacatttagatgcagttttttggtaaaaaccgtaggtatagaaattaattatataccatatcccgtcggttgggggttggacaattttcaggattttttattaaccctattatggaataaccgacatcataggtgcactccttatacgacacgtgtgcacctatagcgtcagttattccctaataactgacgcgatagggttatataaaagaacgctaaccttcgtcttccccattttcttcttcttcaacaacacgatataccagagaaaacccagaactgcacatgaaaacccttgccaaccacccttaaaagtccatatatctccctcattttaacaccattttaccccattttttaaaaatcttctattttcaatatttaaacctatacactaaaaaaggttagttttttctcccataattcactatacctgaccctattaaaaaaaaggtggtggaataactctagccaccgattttagtggagaaaatattgaatctcaatgtctattatggtataaatatgattttttagtttattaatttacattatttttattttcgtttttgtaattttttttggaatttttcattttattaacattatgttgttgtacgcatggtggccggatttttgtcagaattggtcgtcggattgcgcttataaggtaaatatttattaacttgatataatatatatgtatatattttgtgtttttattgaatatgtgttttttttttagaataatgtgtttatatatatgtattgtgtatattatttatgtaaattgtattatatatattttaagtaatatttatgtatgtatatatatatatatatttattgtgaatgagaatgatataggagagatttaattcgtttagaaataaagtttttgaaattgtgttaatgtgagatataattgattatatatgtatgtatatgttatttgttttcaaaaaaaatctttatatataatttagtaagtagtaacttgttactattttttttataagtagtaagtaattacataattaaattttaatttattgtatttcattaaattgtaggttgtgaactaatttttgcggtacggcacaatttggtgttgatcggattttaacttg

SEQ ID NO: 266715 - DNA, 1013 bp, Cannabis indica
taacaaaacatagagtctaagtagtaacttttgcaaaatacaggtccaaaataatttttttaaaaaaatgagtagttttatatgaatttttgtgaagactctataatgttatttaagactacaacacacaatttcaactgataccgactttgccatttgaaagttgagttgaaactgtcaaaataagaactaaatcagttgtaaatcacacaagtacgatcttcttggtgctttcactaatatagataatcatgttgaaattgtcatatttttgtactttattatttattacttgtttgtaatcatcttttcatttcaggtttacattcttcatttatatattattgtattttatttgtggagcccttgcttgtacggtgtgagtcattatacaggatgctaacctttgttgagtctttttaaatcaagtaacgaacatactccacaacgaaaatagacaattttttgaatgtccatttgtaaaatagtattgttttttcttataaataattctttgcaaattagcatgtttcaactgtagtgttcggcataatgcgggttgtgtcaaaaaaaagagaaatttttgtaagtgacaatagggaagaaaaaaaacatatttttccaaatactctcgtatttttatatatattattactctttcaatctatatactcaacactatatattacaacttacaactacattattattctctcatagttttgccaggcattgattgtaatcctaagggtattatagcaaatcccacttatagcgttctggatagaaattctttcggtataatacaactaaaagaggagtatgtcattacctactaccacaagggggccgaacttatatatcaaatcctattgtctattactttttattcttctttgtcacacacgtggcaagcattagatctacatgaccccgttgtcggttgatcacttttcaaggtcaatcatttggtactttcattgaccccgttgattgagagtgcaattccaagt

SEQ ID NO: 266716 - DNA, 2177 bp, Cannabis indica
aataatttccaacattttcttcaatgttgagcaagcctatgtagtgcctaaacttgccttgagtcacacatttagtaagcatgtctacagggttgtagtatgtgcttatcttcctcacttgaacctacttgctagtgataatgtccttaatgaagtgcagtcttatgtctatattttttgacctctcatgatgcatgggattcttcatgagatgaagagcactttgattgtcacaatgtacagctatgtcattagagtttagacccagctcactagtgaacccttcaaccatagtgcctctttaattgcttcagttgcagcatgtattctgcttctgttgaagataaagcgaccaccttttgcagtgttgatttccaactgacacagccacctaaacctgtgaacacaaagccagtgagtgaccttcttgtgttaatgcaccatgcataatctgagtttacacagccagtgataactttttagtgaatgactcttttccaaacatcattcccatgtttagagtgcccttgatgtaccttagtacccatttgagggttgtctagtgttgttgtccagggttcgccaaatacttgctcaccatgctcattgcatacctaatgtcaggtctggagcataccatagcatacatcaagttgtcaaccacactagcatagggtatggcatctatttcagacatttccttctctattttgggtgattggtcttttaaaagtctgaagtgatgagctaggggtgttgaaataggtttggcatgcagcataccaaacttgtttagtactttctcaaggtatcccttctgagatagaaagatggtacaagttcgggttctcttgatatcaatgcctaggatcttcttggaagatcctagatctttcatgtcaaactctgcactgagtttttctttaagtttgtctatctcatatctatttttccaattaataacatatcatctatatacaactatatatatatatatatatatgtttattaaagtaaacacaagggtcatacatgctttggcaatatccaaaagtcttcatgaactcatcaaatcttaagttccattgctaatagcctgtttcagtccacagagtaatttgaccaacagacacacttggttggggttcccattgtcaaacccctctggttaagtcatttgaatcttctcatctagctttccatgtagaaaggttgtcctaacatccatttgatcaatctcaaggtcatatttggtagcctttgccattattactccaatggatgtttgcttaacgatctgtgaaatcagtgtcttccttttgtgtaaagcccttggcaacaagccaaactttatatttgacctttcccttgcatttttcatcttctttatgcctgaatagccatttgcagcctacgagcttttgaccttctggttttttaaccacaatccatgtcttattcttcttgaggaacataatctcatcatcaatggctttgttccattacttgatgtccttacatgtgattacttcttggaaagtggaaagtactaagttatctagttctcatgctatagcaagagcaaatgttgtgaaatcagtgaaaccaaatatggcaggtgctttgtgaacccttttttctctgtctctagtgagctgatagacatcaacttcagtaccagtttccacatccaaaggttcttcaacttgaacctagtctgtaataccctagaattaagagaatggattagcaaagcctaactagttaaatgtgtattgttgtgggattatattattatataatctattatatgagaattaatatgaaatatgacattttaagacccctctggttagccaggggcattttagtaattttgacccgagaatggtaaaataatgaaattaatatatttacgtgcttatggaactatattattatatagtatgcctgtgttgtctttttcagatgtgttctgacaggttggcgcggtatagtcacaaccgggtatttcgggccgaattgggatcggggccaaaatacaattatgggattatttattggcattataattatatgtgaataatctgaatttttatttgagaagatttatgttgtaaatgaccattttgcccttgtattggtgcttatgtgtgttatggccctaagggcattat

SEQ ID NO: 266717 - DNA, 1720 bp, Cannabis indica
gtaaggctgttagagcttttggcccgtggacgaaggctgaaacagctgtgataagctgcttcaatactaggaactaacttgagtggttcaggaaagaatcatctgtgttacctccgacgaaggaacgatcgacgaccaaagagaaaggaaaatcgccggtaacggataggcactatggcggtagacagaggacacagattccaaaaccagtgaagaaggttatcagaatcaatgacagaactgcaggtgctacttttggaaagaatttgaaagttgttgagaagaaccctctttgcccagcgggtgcttgcagttcgaaggcagcaagtgttcctcagaactcttcagagctaattagggataggcgtgctaggtctatctctcccagtttttggagacgacatgggaaaggaaattctataactttatctaatgaagaaatagtgaagaagttttcctcaaggccttatccagatgctagggatgcccaggtaattgccacgattatgtctcaaaatgggcctacttatttgcaaacaatcgaaggcccacatgaagaggtttgtatgtctagacaaccacataagtatcctgaaaagacccctttcccttggccctcttatgctgaggaagttgggcttgctgaggagctgatgggcccagtccaagtggacaaatttgaacctgtcttaactctgtttcatgaccctaaagatgtttcagatgagatccacccctgccctcagcctaggaaacgaaaggcatgccccaacttaatgccatatgttcctaggactgaggaaaatacaaaggagttctcaatggaaatacctgaaatgctccccttctctccgaacccttcgacttcaactttcaaaattggtgcaggggctcctgctacaaattcaaagactgagaaaagaaggcgcaaaggctcgaattctcgggcatcttcaagttcaagcaaagggcgaagggaagcgattaagaagagtgagattactagaaatctggaagaaagtttggacttggttgaggttagaattgatgaggctgagaatattcatatgggcgaggaggcggcccttatcaagccccccaagtcaccatgaaaatactttcgtggaactgccgtggtcttgcaaaagactcggcagtccaagctttgaaggcttgggggagaaaatacaatccggattgtatatttctcatggagactaaatgtggaagtgctcgaatgaaagatgtggcgagagaattgggatttactggtgttgtttgctaccctgtaaatggactttcgggtgggttctgtcttatgtggaattgggggttgattgtggatatagtaagaatggaaaatggtgtttttaaggctgaggtttgggatgggcaaattagtaccaggtggcgcctttttaccatctatggtactctgtatagctgggaaagtggtagtttttgggaagatatggctcacaagattaatctttgctctctgccgtggatggtaattggggacttaaactgtattttgagtagtgaagaaaagcgagggtggaaggaaggttgatgtaaacgatacaaagtacctctatgtaattttagattacacgaggggtattgatctaagatataaggttgtgctttcacttggcataacaaacgattctcgggaggtctaattagagaaggttggatagagctattggttctcatg

SEQ ID NO: 266718 - DNA, 1917 bp, Cannabis indica
gttacaaattcaacatacaaaaaaaatttaataaaaatataataaatatttattatattttttaatatttgttattatataaatatttttttaatatatatataaatgtaattggattggatcggtttttaattggattttgagattgacatccaataaccgatccaatccaattagaatccaacttttagcatccaatccaatccaattgtaattggatatccaactttttgtaattagattggattggatcggttcggttcaattggattggatgatgcccacccctacaaaggaccattccaaaatacatttttgcctagataaaaatattttcaagcaaaaaagcttcctagttcgagataactttgtccaaaccctaaaatgtctgatttcatcccattatgttatacacaaaacatgccctgaatgaattcaagaatttttaaaaatcaaatttgtttcatcaaatatttttataaatattaattgaatccgatatgaggaatttgtccttccagtttcttttttatcgacttcgatctcaaaatgtttttaacactgagattatcatttttatttttcggcgttgtgatcttcttccactttcttttaattccgggccatacaccgaaaaaaatactaaaccatgagttcttgcatctctatattattgctttcgccataacaacaacacaaataatactacaaaaaacaaaatcctctaacgaactcattatcgatcgaatcaaacattaccttctcaaatccgaactcttatctaaggtattgtaatagaactctccaaccctgaaatcgaacaaaaagaataaacacaattagttgttttttaaaagaacaaaatataactctcaccagggctctatagacataaccgaatcaaaagtcgtgaaaataaagcgaacctattcctaccatgccgtggaactaactctcggccttctttcccaagtctgaccctcgttcctgttttccatcttgtgaaatcctatatacatagaatgcccccactgctccgctgcatgagaaaatgaagtattgaatttaaacatttcagaagcaacagaccaagaaagtggcggtagcatattcagtggtacgttactaaatgactgaacaagtaaccacaacccggaatctgaatggcataaacagttgaaacgtatccagaaaagtaatggcaagagctccgtatattatgaattaaggttgggtttggttggaaggattgaaaacaaagaaatagaaatgaaaactgctcctttccattccattcaatttcgttacttccaaccaaacacaacctaagaatatgatgaaagcaaagcaaacaaatctaacatattgaatcattgataggtgtcaatattacaagaaaataacctgataaatgccgttaaaacactgataattgatggtctctgcaagggaaaaaaagaagataaatagtaaattttagaagcatggaatggaaataccttcaatacaagtttgtatatgaatgcgatatatatctagaactgtaaaaacttcttacctgtgctagcaagcgtacctccctcaggaaaagtatacttgcaataactgccacattaaaatcaatattaatcaagactgtctaaacaaacgtcagctgaaacacaccgaaaactcagataacaaaacaagtattacacagaaatagtatatatactaacccagttgccctttaagagctaaagaagattgttttcctttgttatgtgatcttaaactaattacgcttaaagccagaagagaaccaccgagaataacaccaaacctaatggcggctgtacttcccgttaccatgaagccgagaaagccaccaatagaaagaactaaacctgcatacacgaaaattgaataatgtcttct

SEQ ID NO: 266719 - DNA, 2368 bp, Cannabis indica
ttttttttttcttttttctctttaactcatgcatgtaaattaaaaaataataccttgagagtcactgacaatgacaccttgttcatccaaaatcttgctatgaatacttcataaactctatgatagcaaacttgcattctagtgagctaaatgaatagagtatagactgtgcatgtaaatattgtgatttggtgagcttcccaagcaaccccacttttccagaataaagcaacagtaacgagaaagcagtaacataatcttaaagctagctattaaaaaatgattgactggtaaagcttataagatgccactgaaagataaaacagtcctaacattaatacaatattatatgggaaggtggatttttacaatgcaaattaacgacataaaatatgttcttaaatactcagtactacagagtacagataaaaacattctttccacaatgtttttgcagtcaaaggtaaatggtatgtcaccaaagggcaagctatggaaactagctaaaacctattatgaccaggcagagttgagattcaaaaaaggttctcccacctaatatctgatactctatagatatggaacgaggcttacttaatgaaaacaaaataacaaaagaaaataatcatgtagacaaagtttagatacaaaggcagttaagtaaagccaccacccatttcctttctctttaattccaatgccaaacgctcattttcaagcttcattctctcattttccatcctcatcttttccaattcacggtctcttttcttagaaaatctttgccatttcaaccgctgtttctccaattccaacatctcaacttgaatttgtatctttctttcttctagttgcaaagaccgagactcgacccactgtttttgtagccatgccacttttgtgccatcaggtggggcttggttcatatcagcttgagcaacttgtggttgagaataagagcttttattacaatcatgcggattcaatgaattcccgaagccaacatcttcacgtccctgaccaagaccctgtctgaacctctttccagagtcccctaacccatacattcccctgtccccatgtgaagcattattatcctccaaatcatcacgatcatcaatttccacttcttgatcttcttcatcaggatcatcatggtgatgcttcctcccatcttcattatcattatcatctctagttctaagagccaactgcaaagaacgctgcaatgctggatcatgaggcagatgcaaccgatttccattatgataagaacacatctcttcgtaaaataggtgcttcgagcttaatatttttcttacatcatccttttctttctcatttaggtaatctataacgtccaaaagcgcaggattctcaacaacttggcaagaagttcccctcccaagcacatcattaagtcttttatatctcttgttaaggtcattaaatttgtcctcacactgttgaggtgaaacattaaaacccctttcagccataaccttggagacagatttccactttccctttttctgtaggactgcaaatttcctccttcccccaccactacaatctggtccagcatcctcacctatataagacactgcagtaatcagaagtttcaccatcttgtcggtccacttgacacgctgccatattgatcccttcttccctctactgacttcattatgaccatcaataccctcttcagtaaagctcggctcatcctcctcacttgccgagtttttgttcctttcccccctactattgtaatcaaccatcgacatcctttgatcacagctatgcaatgttcccatagtaagcgggaaaccctcacgtatcgaagggcgaacattgggagtttggcattggttaggattatgttgttggtgtatggtatgtgggtgttgtccctgatgttgagcccgtattgatccttgcaaatcaagacctccataagaggccccaccaggaataatccctccatgagacaaatgaccttccattgaggagatcaaacttgcacattcattatctccaaaatccaatcttttactcaatttgtgacaactaacacaaccataattcaaaaatcaagcattaccatattcctcaattaccctcttacaacaattcaacccaaccctattcaatgctcaatcaagttaaatttagatcatcaaacatcataacaaaacagaacccaccaccagattttcaacaataaccacaaatctcacaacaacaacaacaaaaattacaaatttcccaaacacaatccttaaaacaaatcctataacagtcgaacaacaatagaatcgaaactacttatcgtttaattaccgaaattggtgagaaaaaagaaaaa

SEQ ID NO: 266720 - DNA, 1522 bp, Cannabis indica
ttgttaattttaaagtattggtatgcttcatttcaaatttgatctcttattctatttctattcttatatttttatccatcctagctaacaaaacaccactttaaactattagaatgttgggagaaaggccctggttttcaggtgcttcgctttgtaaattgaacttttagaaatacaacttgctgacttttcaataagaaaatgattttttttttaagcacaattataacttagtaaaggtaaatatacaagaaaagacttcaaatgtagctaattactaatcatgtatatgtattatatatatatatatatatatactgaaaaatataaaaaaattattttaaaattttaatttgaaaattaataatttataaataaatatatgtcaaatttaatacataaacattgaacatgtatgatagtttcaaaaaactagactagaagaagaaaaagattaaaaaaaaaaaactacagagaagaaaataaagcatcagttaaataggcttgagaagttagaaatattcactataagcaagaagatgatcgattgtttatgttaacgaattaattattgtgaagaaacaaaaatattactggctctaacaactctaaataattattattatgtagagactgacatatttcttaagacgtattatataattaattataatatgtaatagagattaaaatttttatgcatgatcacatgtgatagttattctagtatagaataacatttacgaaagtttaatttagtttataatataagagatatttgttgcataagtgttttcaaagttttacattatttaagtagctactcaattaattttataacgagaaaactactcacagagttaatataacagtaggcaggcaccatttattaacttcattagcttattggatcacacgtgttagttcgtgaataatccatctcacaataataaatattttaaaaattatttgtgagcaattacgaagtgacatttattatcttcaatgaatattgtagcctaaaatagttatgttaagatggactaagtattaatgaacagcttctttacttaggttagattttaaaagtgagttcttctggtatcaaatcaagtattaagatcgacttgtggaattatgatcccaaactaagtacagaattggttggtgttaagtaagttttacctaatgaatatctttaaatatacgtaatattatttaatatttatgcctctcatctcgatcacaattatttatttcctctatcacacgaaagtgtataaatgatatatgattggtgtctataatttttccatggaaggaaagttattgatttgtataattaatggacccggttgcacactaaagactacatacaataacatgcaccattattgttagtgtgcaatatatatattatgcaaatattgctataatgcatacatgcctctatatatattttatatatataagtaaatataatgtttcaaaaaaaaaaaaagtaaatataaaggaaaattta

SEQ ID NO: 266721 - DNA, 1159 bp, Cannabis indica
gaaacttttgaagatatattataaaacccttttctaaactatagacagacagaggattaagccccattaaatcaatgctatatcacaccaaaactatactttgttccaccataacacaacccatttgtcaagctttcttgtttactattttaatatatataataagatgagctaaccttggactggcttggtacatcagtagtgagagacatgcacacacgttgcctaacattcttattagtaacaaaaactctaccaagagattgctgaagctgagtctgcctcaacttgttacccattacttctccattgcaaaactttacaagcctccaattcttcccagccaatcccgtcatgccacgtagctggccggccgccgagagggaaatccggcaatcagctgagactgccatatttttattttatatttaattttcttgggaaaaaaactcccaaggagaaaatgggaataacaaaaaagataatattgaagaaactttgttataatgtatatagtttgtataggagagggaagagcatagttgctatgaaaaattgtaagcaagtcattggaggatttttgccacgttatccaaaaccaattgtatccaccaatttccgttttgggtttttgtcttgttgttacatatacatatatacatagatacacatataatttatacatttttttttacaagatagtccccatgtttgattgaatttaccaatggaggaatattctactacttgtgcttagctgctttgagatttttggtgatgaaagaaacactgaccaggagacaatatattgaccttttgttctcctatatgcatattgcattattgcatttcattattaagttatatttggcacaaaatcagaaagtgaaaatgaactatctgtaatgggtcaaattagaagtaatatgaatgcgtattggatttattttcgggttttcatgttcggatttagaataatatttttggaaaaattcaagaaaataaataattcataaataatattaatctttgggatattttttcactatgaaaattgaattttgagttgttacaaaatgataatttcatatgttaatagcagagccggcccatagctgtagatgcagggccgatccggcccatattttgaaaagtatgg

SEQ ID NO: 266722 - DNA, 3584 bp, Cannabis indica
attaatagttatatatatatataaatatattatatcaccaatttatatatttattcatgccttggtgtgggctggtataggcttggcaggtggctttggagcaggctgttcaggctgttcagttgggataggcacattattcacctgaaacaacattcataaatatatgtgtaaatctatatttgataataaagagtatcacatgtataaaaaatattaaaagtgagataatttaccaattttctaaatagaaggctataaaacaattggaggtatctttgctttgcctgtttctgctccttattcaattgcttccaaaaattgtagatgcagcccatgttcaacaccttgtttgcataaatcttccatgtgtagctgaaaaaagtttatacattactaatttgtaacacaacaaaataggctcatagtatagttttactaatgatatgtacacccaaaatatgcgctcaaatattacacatagcgatgtgtatgtgttaagattttgtagttaactgaaatctttaacgaggaggcctagtccaactaaagtaaaagaagacttagtatgttaatattgcattaacaatctctaatttctcaattattgttatgaatcaatcagattttttctaaattatatgtgatttgatatcatggtatactattgtttttctaacataccattcattaatacgctgcaaaccagcaatggagaacttgttccaatatgtggcatctttcttgcacatttcaaagaaatcagcaatcttgttgcttgattcatctccattgttgggatcaatgtggaaacccgaaactccatcgacaatgatctcagccggtcctccttgattggtggcgaaagtaggcaatccacagttcattgcttcaatgacagtaagcccaaatgcttcatacaatgcaggctgcacaaatgcaccttttgtgtctgcaatacatctgtagagttcaccatttcggttcctatcggtttgagctgctatccatctgatctgacccttgagttgatacttctctatcagtgaatgcattttccttatctcagccatttcttctctgtcttttgattttgtagggtcaaagaagcctccaactataacaaggttgaccaaatttctcagccttgtgtttttcccataccactcagtcaatccagttatgttcttaacagtatcaaatctagccattgagaaaatgataggcttcttcttgtctgcaagatatccactatttgacaacacaaaaggtcaaatgaatcaataaatagaagaaaacaaaggttgagaaagagagacttctatctcttttatcttacatgtgttcattgttgtcctctttagtgaaaagtagctcctcaatagctggttgaaatgaggtgaatcttatttgtttctctgtatatgggaaatagacagcttgatcagctcctggtgcagcaatgttgaatttcgaatcgaatacattgatccccgaaacaaccctgcagagccctggaagtgtaaaagcagtgtggctttcatattgtccaggtctatccttgctgcaaaaagatcaaaacaatactactttttaagtataatcatcatctttcttccaatgtaaagtatttaagtacatgaagtttttttctaaccttcctgcaatttcctgaaatgtgcttgctatgatgaaatcagctgcattcattgaaattgtatcagcaagaaattggcaagagaaatggtatttgggatctaattccttccatttgaggtctgaatcttcatatttggtcttctctaaagcatgtgcaatagttccctgaccattcataatttatttagataagaacattagttgataagttaaactagaatacaaaaatagctgaatacacaacacacctgaattacaccaagtttgttagccacaatggatgaaaccaaattcccatcagtgtagtttccaatgacaagatctggtttcgcctcgaaatgttcaaggatcttggctattgcatcctgagcatatctttcaagatatggatacacttcgaaacgagaaacccattggttaagcacacccttttcagtcctaaatggcaccctaaggatgtgggagtattttgtgcctatgatttcttcccactcttggttgcacttagttccctttgcatcaggtatgagtcttgtcaccacaagaatttgtggcttgatactaagtccttgttgcttgattcttagaacaagttcttcctcaagtgctctaacttgatctagaatgtacactacctattttcacacacaacaatcataaaaaaactttagtaacataacattgagttgtatcgtataacataatataatactatacaatacaatacgaagtaatattttacctgtccgccggtgtctggcaatccaagaacatcagcttggccaaagtaaccatgaggagaaaaaatgacaacattgaagatagttggaagttttccaaagaatttctccatgttcaacggatccggtgcttgtagtacctctgagagtgttctcattgtctcttttactctctctgcagtgccccccaacccttctcaaagccccactctttcagcctgtaagaaaagcctttcatatgtcatttaacacacatatatttgtctccaaaaggagagaatttaaaatgatgcatcaccttgcttcaaaatcttggtatggtttggtttttggtagtgctgagaggaaaacatcggctataatcaatgccgtttgaagttttgcaggagtgtttagagtttcatttagcataaaagtctgcaatttcagaacatacaggttcatataattagaacttaaccaaataagaagaggaaaagaaaagagcttattggcattaaaaatcaaaattcttgtcatttttatatgcactataactttgataaattaatactcgattaattaataatcttgttaaattatattttcatgcgatcccaactcaggaacttagataatagttcttcataaatgtaaataatctcaatactcaactaggaaacttttaccttaaaatttaagtctccttgaacttaatgatcttatctttctcagtgtattaaaatttttctaatgtagtattcttgtattttagtagaaaaatgttaaatgtcaatttttgctaagattgaattcatcaacttttaacatgtaagtgcatgcactaagtgtattttgtcaatcaatactttgaaaaaatatattttattagctaagaggatctctaatgaaaaatataaatgtggtgtatttttatttttaacttcaataataatgtaaaatgtgtgttaaatttaacctaagctaaaaaattctattaaatttgaccttgagtcaaattttagattacaatatatactatttttttttaattacatctttactgcttattaatgttattcattaactaaaaagtttttatatttataaaatattaaaataatataaataaaattaattttcaatgagcattaatagtaaatatagttttatgatatattttcaggttaaattcaaccgaaaata

SEQ ID NO: 266723 - DNA, 1510 bp, Cannabis indica
tgtcatattttaaggttagagtttcttgaatatatatatatatatatatacattcatcttttagaaattgtattcacatttagtaacaaagtgtttagtttctgccaccccaatcagcaacttcgcaggctatactgaggatcattcttttgtgtattatcttatctggattataacagtttataaagtgtaattttatttctatgggtttccacaagaaattacaatcattggataccacctgatttctgcttactatttagatatggttacagcagagctggttgattcaatagctgagtgtgtgcaggaaacactgaatttgatgtgatgctatgcaaaattctaattgtttctaagtttctaaattttaattgtttggttaggttttcttttattttttaggtattcttaagctactgtgagttttaagaaaaatcatatgaagtttcaacttcaagtgttctttttttcctgtaagagttttgcctgctattaactttgtgccttcttatatttcagattagcaagaagcaacatgacattgttaagaacatgaagcagtctggcaaaagcatccagtctaggtctctgaaccgagttctaggtaaccttaatagttttaatgtacaaccgtacgaggtgtttattcaagaagaacagaagaagttgcgtgaacattggttagtgctttgaaaggacttataatactctgtcttgttctaaaaagaaaaaaaaacatatatagtttagcttttccctcctctaagcgtaacattattcatacaggatacaattagcaactaaagctctcccagcagcatttgctaattggaaagacttacatacccagagaagccaaatgaggatgtctttggaacaagagctgaatgaaaaattcaaaatggtgacagaggtttgtgaattaggctctgttttgctcaaatgtgttcttaccgtcttttttgttttgctttaattgtgtatttagtggcaccgttgtctataacatgttaatctgtaatgggtattttaggatgatgaggatggtgggagtcatgagtctgcccttcaggatcatatagaaacagtctgtattgcagaagaccacgtctcaacagtggagcatgatgaaaagtctctatctggctccccagagaaacagtctcaagagaactttgtatctggtgacgtaaactccactgatagtgattctgaagaacatactgtctctaagtcggatcctgttattttggatccgtccgagtactcgggagctgtgaacactgctgatgttgccgtcagtgagggagtacaggtatcctgtaatgatgatgtctggcctgcaggtaacatctcacattcctactacgattctacagcgaaccatgagtacacatccgatgagggattgccaattgcacatcccaaaacaaatgatgagcaacaaacacacttgattgatctggagtccaacacaggaaaagatatggtgaatagacaacctgag

SEQ ID NO: 266724 - DNA, 1636 bp, Cannabis indica
ctctctctctcactcactcactctctcactctaacttctctctttactgtattggttgagtctctttgttatgtgttgttatgaaatgagtagtcctctttatataggctaatagacccaataagcttgatgtcatatttaaaagttgagttagttgaagaacaattaactaaccgactattttgttgggtttaagaaataataccacaagcgacaaatctcatgctttcgggtttgttagcttgggatatttatctaatcaatgacatgtttaatgagagggatcgttgtctcattcatagcatccctcttaatttaacatctcgggtggacaagattgtgtagactaagtgtctagcttttattcggtcaagtcggcttataagattattcaataattaaatgggaattgatgtgtcaatacattaagtaaattttggaagatattctggcagttgagagctcctcctaaaataacgatttgatctggcgtgcttgcacaggttgtcttgcttgccccatatgtcaaaatgaagctaaaactactatccactgtttgttttcatgtgcaacagcccaaatagttttgaatcaggccgaaattggtaaaagattaccgttaggagtagagtttttctactggtttgaggcttgtttcatgggacttcagtaagactaatgttgtctcttgacagccatctgtcgggccatttgggccgctctgtatgaataagcatggaactaaaaaagtgttagtcccttggagatcatctcttcagcagttagccatcttgaacaatagaagcatgctcaagtttttattttagaaacatcattatttagtttgaccaaggatgatagggtggagcattagcgtttaccactgtttaatactgtgaagatcaatgtggatggaactttctttgaggagcttaatggttatggtttcaatatgattgctcaatatgagaatagatttttcattgaaggccagacccattgttgaggtgacagaaactatgaacatttgtaaactcttagttagattaaacaatgtttgtggcagcataattttttttggagattgattgtttcatggctgtgcaagctttgaggagccctattagtatgatttcattgtttagtgatttaattaaagatcttaaggctttacttgtcgaattatttttcgttaaagttcattaagtgaaatgatctgcaaatatggttgctcatagtttttttttagcttttcattcttatcttaatcataacttcaattcggagaatgtcccaactaatttgttaatagttttgataaccgagtttgatgattaataaagttttattttccattcaaataaaaaaaaaaaaagaaaaataaaacctttgttcatttagatcctaaataaaattaaagtgaacatgcagagagtgcagagaagtgggatatgtgctctgtcgtttttttatatatattttactttcaccgctataaaataaatattttttatttttctctttatatatttttacttttgttcttataaaatttatatttttacttttgtctttatatatttatctttgtaccatttatgtattatttttctcaaaaaaaattatattttttatt

SEQ ID NO: 266725 - DNA, 3405 bp, Cannabis indica
ttatcctgaagttctgaaattcaattgttatttttttttgtagaatttctttggcgctgcatactaagcaaacaatttaagaaagtcttggctattatgcttggtatcatgtcagcttgctattcttttagcagaggcaaccctacttacaaaaattaattaattatctcttctcgacgattattataattctgttcagggacaagaagttcttgttcaggtatgctttttatttctgtgctacttataagatctgcgtactcttatatttgcactcttataaaatagagcactttatttgttgtattttgctcataaattgaaattatcttgctttttctttggtttgatatatattatttttttaaaaagttctgtttctttgctcttccacatccattaactaattacttttgttctttttcaggtatttgcttttattcctctgatgtatatgtgcatttgcacatattattccttgttcaaaattggcatgtttacattttactctctaacaccaagacaaacaagttcggtcaacttgcttatgatatgctcgtaagtttgctcatgacactattctaatgacatgaagcttggctaactcattttatattacacagtattcacttcttgcttttttttttaatcttttgctagtatggttgctcggtatgctcctccagtttcgtacaactttctaaatcttattcgccttgataaaatgagggtaactatatttgaaaaggtaattcttttactttcttgacaatttataattattgtttttcgtgaactaaaaataaattatcatggttgttctctcctaaactacgggatctttttttctaattaatataagatttctgaagggatggattttacggtaacaaacttcaattttggccattcaattgattgaattatatgtacaaatacaattcttcttttttttttaccaactgtggaatatatttttctccttggttataatttataatctacttttgcttacctactgcagcgaatgggaaatattgatgaagctgttcctttttttgggagtgagtttaacagaatctatccacttattatggttatatacacgcttttggttgctagcaatttctttgaccgtgtaaaaaacttttttgggagctggaagagatttagatttcagaccgaggcagatgatatggatggctttgatccttctggagtaattatcctgcagaaaggtatatataaccttaactttaacaatttattatgtatgcttgtttgacaattccaattggagactggattgttgtgaatataagaatcgataatcttaattttaatgcttcaactaaagtcattcaaaatttctcagaaagatcttggcttgaacaaggcagtgcagttggtgagcatgttatcccattggcaaggaatttcaacaatgatgttgagattggcagcaatagcacggtatgtaatttgtcagtctcttatttggttttttgatcttacgcatacaaacgttccaaccttgattgtaaattttttcccctttctctttaatttatcttctcaaaaaagtggtgtagatacaaatgatagttacttttttcttacttgaaaagtaaaaatgtcttagggaaaatacctccgttgaaatgaaaacatcaaccagtctaatcaatgatgctgcaaaaggaagtgcatcaaaacacctgaaagaggaaacccgtaaatatggctccaacagagaagccatgagcaacaagtactcagctatgagagagcaaaacaaacaagtctcagctaattcaaagaagccagtagagcagcagagtattgcatctgccaaggtctcgttgcttgatgctgacaaacctcaccctaataaccaaactggagtttcatcttcaggtctggccttaaagtgggaatctatgaaatctggttttcaaaatttcaaagcaaacttaggatccaaaaagttccaaccattgcgccaaattcaagatactaatctcatctctcatgtttcctcttccgagtctcttgatgaaatatttcagagactgaaacagccatcggtgtcagatcataggagttacagtgatgaggatgacgaagatgagattgaaattaagaattctggctcttctagatgatattcaacatcggaggtaagtttgtcactgttacaagtcagaatttaagtcttagaatgtacaggtcctgagtgaggacttataccgtgttcttgtagccctcgggctctgaatattatacaagtgttgggagggtatccaattgtgtaactacgcaggtttggaaccagctaataattagttttctcagaaacaatactttgacaggaaaaagtaggaatattctgatgtgtaatataggtggaaaagttaagaaagaacaaaaaaaaaaacccctctttagttggggaattttgtaattgatttatagagcagaagcatattttggtaatttgattctcttccccggctggaaactcaagaactgtaaacatgtgaccacaatggcaattattttgtattacaccaaattcatgtaacgttttttgaggattgagtttacttttctataacaattatagtgtgtccataaaaagtggcaactcaggggttgtcaactgacgtgcttttcatagaagtgtacatctatatatatatacacataataaccaggtggtggtgactggtgagtgcagttaaacacattcaaggcatcttaaatttattaatctactatactaatgacctctgaatattgttacacctaacttttcaagattcagaaactattactgtttttgccttgtttatactttatacaataaaatcatggaccaattttccgttcgttattattattattatcctcggtagaagggcattgttcaatttattttgttgctttagttttgacgatttctcttatagttatcaatgaaaggcacttgggctttcgattacaatcgttttccttaaaaaaatttattattttgtctaactccacaaggtttccagcctatattacgtcttccacctagaatttcgaatttctaaaagataatgttgttgtcgaattgcaacaaattctaagttgactacttcgaaggtatggtcattatcttcgtttttcttaaattattcaaaaattaaaaataagcatttatagaccaaaatcttaggcacacaggaaataaaactagaaatatcaaatcacgtttccaattttatccaaggattcaaagatgactgaaagtctaatcacattttcgagtcattttaagtgtacaatgatgatagtaacccaacagttaaatttttatgcaagcaacccaacaataaaactttgttttcattagaaaga

SEQ ID NO: 266726 - DNA, 1512 bp, Cannabis indica
aaaaattcaaattaggtactattattattaaaaacagaggaatttttcattccaagagcaaaactccacctactcaacaagagagagaagcacgacttagccagaaagcgttgaaattgtgtgttgcgatcggttgagaagtgtttgtcttgtttgtttattttaattttaattttaattttcgccatttaagctcaaacgtgtgagccaagcctctgttttctgcttcccttagcattaacatttcagagaccaaaaagggagaacagagaggaaaaacaaaagaagagggaattctatcttcacaaccagttatatatcaatctctctctcacgattatatatgtatgtatgtatatatatttgtgtttggaataatttgggtgaaagtaattagagaataatgaaatcaccagcttcatttgggagaagcagtagttcgaaattgtcgagttacagccgtgggtttgacctcccggacgatttagagccggagttagatcaagaagctgacagctatgaagtcggcggagcaatgttgtctgtgttcctcaacgacctccgccaaagctctcagcaagaccttgtggaggtcaccttagagttaaacgacgatgattccattgtcgtttgtagcgttgctccaacgacaacagggactccaactaggactcccgtcgccgccgcggccgatgaggccgcttcagtttctgcggtgagtgccggaggaagtaaaattgttaggagtttctcgaatgcgtcgagaagtattcgccggaaatttccgtggctgagatcgactgcggcctcgtcgattgcttcggacacagaggatcaagctgcggtggctccaattacagctcgtgacgctcgaagaatcaaggcgaaacttcaacggtcgagatcgactgctcaaagagctctgaacggtctcagatttatcaataaaagtactacaggtgctaaaaacgccgatgagttgtggaagcgagttgagtccaagttcaactcgctcgctaaagacggattactttctagagaagacttcggtgaatgcataggtagataacgaaattgaattaagtattagttaaattggttactgagaaaattatattcatgcatatataatcaatattaatgtgttgtctgtatgaattgaaggaatgttggattcgaaggagttcgcagtaggaatatttgatacattggtaagaagaagacgacagaggattgataggataaacaaagaagagcttcacgatttctggttacagatttccgaccagagctttgacgcgcgacttcaaatcttttttgaaatgtcagtcttttctttcccagccgttggatttgttttcctttttctttgttctttttgcatcaaacaaatcaacggtggtaaacacagcagcgaatatgctcaatccgttcaattattgtttatttttcatttttttttttttaaaaaagttactttattttttctaccggattttgtttatttgtttg

SEQ ID NO: 266727 - DNA, 3598 bp, Cannabis indica
agagcgacccacacaaacaagcacgatcatttttctggatccccaaagaattcccagaaggacctgacctcccagataagaaatggtggctctgcagcaaaaattgcagtaaatcagaaaattccaatggaaacagctccatggaggcaaccacatgggaacaagggttctcaacctccagctttcaagtgttacgaatcacccacaaaggccccaaccgcaccattgacagtttatggtgaaattgagaaaaggttggctgatcttgagttcaaaaaatctggaaaagatctcagagctcttaaacagatacttgaagcaatgcagaagacaaaagacaccttagacagtaagaaaggtcaaaaatttctgtccggagcaagcgacaatggaagtgatcatagctcaaacttgggcagtggccagagaaacctacaaaggaatacctcattttctccaactgccaaagggtctagatctccacaacattataaacccccgatagtactcataaaaccaactaaacttctaggaaaaaacacccctccagcctgcaacatcaattcagttgacagcttgcaggactcgagcaagtttcgtaccagtaactctgcagatcacagaaaggtatctgttgagaaacaaacgaaacatttaaatccaaggaacacgcaagtcacaaatgccttgaacacgacaccattcttcccaagataaaaataacacgatgacatcaagatctccacagaattcaaagatgactcacagtgacagtgaagaaaacagcacaagctcaggtagaagctctggagccatgagccctagattacaacaaaggaggtttggtttggacaaacagtctgctccggcaagccctgattcaagcaggacaagaaggcaatgcagcaggcaaccaattgaatgcagtagcccaggtagaaaatgcacgccaaagccttccaatatgcagcgagctaatggccaattacgtgacaccaggaccaacagcagagacttgagtcaccaagacgtcaccatttctcttcaatctgaaagtagtatcagcttggcctcagatgtagacaatgaagtcacgagcatcatacaagctgataagataaacaacatctactgcgagcgcaatggcctaaaaccaaaagtacgagtttctgctctcatttagtcatacaatgaagtttaattaccagctaacatttttttttctttctttcagaacacagctgctgggttccctgtaaacaggacaatgacaggaacagagaaagctacctcagaacaaccaagccctgtctccgttcttgatgcattctatagagatgagtcgccatccccagtgaagaagaagtcaaatgcctttaaaggtgaagaatgtaagtatttaagtttaaatattcagaagcataggacaacttaacttctcttgtttaagatagaaaggccaagctttcttatacaccatatcaccagtaagggttagtaaattacacgatcttaaaatatagtggttgttacatgcaacaaatatgaaaaaggaagtaggaaaagaaatttatgcctagctgtagctttccatcctaaagatggtgtcttagttacagtgtaaacagaaacctagcattacatacatgtaagtctcactatttacaaatcctagaagataagctcagaccatgtaccaattttggataagaaattatacctacacattatgcttacggagagagtactgctgctgcagttagacatgcataggtcctctatacgttattttatcaagtgcactaaattctccccaaatttcttgctacagatgatgagacaccataccctgatgaactggactgggagctgatgcatatatatcagccatccaacgacagaaaatttaatctcagctcggaagttgactataaaacactagtatacatttgggctcaaactaaacaagagatgaactgcactgacctggagcgaatcattgccaataatgcagttgtctgtgatagcacaaatccagaccacatatacatttctgatatattgtcagcatcaaatgtcttcaaaaaatttgagtcagactggatggacattcaattcaactcatcataccacatgatcaaccccaacatgttctttgcattggaacaactcaatagaacacagctttcgcacaacgaacacagaaatgataagagtcaactgcagaaatatgataaaaaagttaacagaaaactagtatttgatgttgtcaatgagattctagttcgcaaatttgtggagacaaattttttgattcagtggctttcacaagagaaactgaaatgtaaaaagccaaatgggcagcgacttcttaaagacttgtgctcggagattgaccagcttcaaggcaacagctcaagcagtagtctggattggcctatggattcgtcagagtatgaacaagaaatcccagcagtggtgttggatgtagagaggttgatctttaaggatttgatcactgaagttctgagtgagaaatgccgatttggtggacatcgcaggcaactgtttcccaagtaggttattgcttttgaataaataagtagccttttcttactttaagccatcttttagtcctagcttccactttcatagttatcttttccatccatataattgcagaaaatcatagcaaaacttttaccactttgctagcatgtaaatccctaccttagtctaatgataggtgtactatacattcaatagatgtaaatctctaccagagatatgtaagggtaaaatgtaaggtacaaccaaccaacatgtatatacaactttagcttcataaattctctaatcagctatatatactctactgaaaatggcatatgcggagacaaactaaaccatattctccagcttcccattagtgaacttgtgcaagaactgaatttatttcaattttattctctattataaaaaattcaaaagattattgatattattgtcatataaagtaaaacaaaaaaaattcaagatacactaatactccgaatcttaactagtttattatatattgacattgtgattacataaaaattactaaatgaataatacaagatcacttaaaatgtataggaggggctttttctaatactttgtttatttctcaagttgataatggatctctcactcttgcaagccttgatagtaagaataagattgaaaccacaaaaccaaaggaaacaaaagtaaaatgccaaagaagcttcaaattaattgaggcaggaccatttgcaggaaagtcgttttctgatataaatcaagcttcgcaagtgttaatgacatagtaccttcatgacaaacaccatatagatgatcatcattatgtaaaggtcaagtaccttgatcaaaccattggaatagagtgagaaaaaaacaaaataaaccattctgtagctaaggttaagtgccttgatcaaattattgatgtgagaacaaaacaaaaacaccttagctttgtttgatgtatacgtcaagttccttgataatattatggaaagaaaaaatgccaatttatcactcttcccaacaggac

SEQ ID NO: 266728 - DNA, 1390 bp, Cannabis indica
ttttacctttttcagcatgctgcagatgaaaaatacaattttgagcgtttcgcacaatcgaccatcttaaacctgcagcctttgcttcggtaagatacaagctctgctttattagttttgcgagacatcatgaaccactcattttagaggttattgataaattgtgctaatttactaaaaattgacagatgataactctcccctttttgggaaaagaaacaaaacctttactaaacaatgcaaaaaaattagtatgttaccgaagacattcccagtctctatgcaactcaaagattgggaatgtgctaaagctctgttacccaaagccacctttcatattaagagcatttaaaattttaatatgcgattcctttgtaacttcatagacatgctttctgatttcaactggtctcggttaatgttctgtgcgcctatgcacaaatcagaaagttgactgatcagagaatgctattgctgcttacaatacgcattctgaaatgtggatgcacatttctaatgattcaccatcatgtagaataaatgttgttgttgttgctgttgttaaaagaattggtctaatagataagagaacgtaccagtgtgatgactgcatcagtgttagcaaatgtataacataaatggtagtacagttaggtctatgataaacacaagtggtctgttgttggaccattattttattctcatgtttttttcactttaattcttctttctctgatgatactaattttattcatattttgatttctgcaatttttgtgttcaggccattaatgttggagttatctcctgaagaagaagtagttgtttccatgcacatggatattttcaggtgctgaacttctctcgctaatctttgtgtgtgatacagttattttctccatttatcattgtcaagttattattatttattgtgtgtaacccatgattttctcttatgaggtttgtggtccaaattttagttagaatcttcttataaatttgctagagttcttaccattttaggcctgagcaagtggatctgaaactaacaaagataactgtaaatctgtgcccttagatgtaatttacttgtagttgattaatctttctctctctctctctcctaaaatgtttaaaatttaaatgcttacagagtttcagcagacttgtacttcgctggttcttctattctattatcacaaggatcatagcctttatctttcaggaaaaatggatttgctttggaagaggatctagatgcaccgccagggcaccactttagactgaaagcggttcccttcagtaaaaacataacttttggagttgaaggtaatccatcgttttttcgtttgtgtgtgtgtctttgctttaataaatttatgggtaagga

SEQ ID NO: 266729 - DNA, 5369 bp, Cannabis indica
tcaagattacattgaaatagatttttggttagggcacaaaatccaacaaggaccccatctccccctactctttgtgatggaatacctcaccccacttctattacatgcttcgaattctaaagattttggattccacccaatgtgtaagcccctcaagcttatcaacttgtgctttgccaatgacttggttatcttttgcaaaggtaatagctcttccttaatcattattcataatgccttcaatgacttctatgaagccacgagtctttcaactaacaaatatgaatcctccatctactttggtgacatttctattgatattaaaatgtagttgttgaacatagtgaacatggaagagggatccattccttcgaagtattaggggtcaacttgcggccgttatatggaaaacctcaaattgtggggatattatagacaagattcaaaagaaccttcatggttggagtagtagacacctttctttactggcagaaaccaacttattcactctattttattggagattctgaataattggatgggcatttttattctgcctcaaaaagttacgaaggaaatggggaaattctggcaaccgtagcaagcttcatcttgtctctggggataagatgtgcttaccaaaagcttatgagggaattggctttagagaagggaagaagtggaatgtggccttaatggccaagtatatttgggttttatctactaaacaagatagtctttggattcgatgggttaatgcggtctatacgaaagatgagaattttcagacctttcatccaaacctagatattagctggtatttccaaaaaaaaatagttaatcttcgagacaaaatttgcaagcaggatttgattgaggccggagcctctggagtgttcaaagttagaaatgctagctctcattcctttcggccccaaaagttaattatcatagggatatgtggcataaattcaaagtgtcaaagcatcatttcataatgtggtaagctattaatgaaaacctcttgatcaggagtttgcttgctaagattttcccagttgagtctattttttgcccggtttgtgttaaggaaatagagtctcactctcatctattctttgactgtattgtctctaagaaagtgattctataagtcactgtttgaatagggcaatttaattggcacttgaatcttgttaattggcttaacaggttgggaggaactcaaaattgtttgcttggtgatgttacttcggtaatagtggtgattgttgtgtatcacatttgtaataggaacaaatgtgtttttgaaggaatttgtaactcgataaaagctattagcatgttgccttagattaaaagctagagttgccttttataatctttctaagtataaggctagagagaaagacttaatttttacggttaacaacttttgagttgtgtgtgggattttctcgatttttgtaatttgctttatggttgtttgaataaaatcttctacttttgttcagaaaaaaaaattatatatatttaaatgtgatgtattcataacttgatggagtgcaaataaaattctcctaaaattattggttttgggataaatgacattttaaccctctagtttgaattgctcttggtttggtctcaatatgccaataaacaagagaagagggaaaagaaaggaagttactaatactcattaccaagtataggtaagaaaattcaataggacaaatatcagttgcccgtccctatacatcactaatcagaactcaataaattaagatactattaaaaatattcattgtgtggaataagaactcaacaagagatccaacataatggtgaaccaaatccgattcaaattgatgaacagaaaaaaaaagtaccatatttgagaatccaatcgaagaacatgtaacatcaatacaccaattttgctaaagtatctatccaatgaaatggtggcctgtgattgcaatatgatgtttatataagttcaaatttgagaaaatacaagtaatccatcaaaatgaatgattattacatattataatgaagattgaatgtacaatactggtatacttgataagtaaatgacctcaaaatcatttactttgtactacagcacctattataaaattatcatggtaatcatccacgagacattttactacaatgtattacttttttttttttttgagatacattttactataatgtattacttaaaagaatgtgaaaaccaaaaagacaatcagcaatccttaatctgcagcctataatttgaggattcaagcaagaatagaagcacagaaaggagaattctctgcaaagataaaatcatactcggcgagctaaaagattcttgcctctttactttctgcttatctcaactggttgcataccaacattccaatcaaagttacttgtgtattcttatgccctgtatatctctcaaccccatcttcactgctgtctttctaaatagagcaggtggtttttccagaccaattgattcagaaaatcttttagcaacctcaacaagtgtggttttatccctaccgacttccttgatcgagttatagtagccaagccaagcatgatatgctgcttctttgacgctaccatcgatcttggccatagaatcttccatctgtaagttgacaacagaatccagcataaaatattgaaattgtgcgaaaaaatccagaaagcaaagaagaaatggaagtgttctatagcaaaaattccatctgatagatattttaactgcaaaacaaggttacttatcatatggttgttagatattactgtggtttcacaagatttcaaattttgaacactgtttggttagtcatcatatggctccgaagaaccccaacaagaaaatgggagtttagaattaagtgtagaaaaatacactcttgaatgatattattttcactattggaaaagcccttaagtaggctaattataaaaaaataatctagatattaattacatctcaactataaaccactaaataatccaataaatacgaattacttctattccctccctcaaggagatgcatacaagtcccacatgcccagcttgcatacttgttcatcaaagctttcttttgataatccttttgtcagcaaatcagcagcttgttgcttgcttggcacacaaactacacatagttctttttcttaattttttgttttgtgaaatgacagtccacctccacatgtttggttctatcatgataatctggattatgtgctatattaatagctaatttattgtcgctgtatagcttcaaaggacttgtcctttgaagttgtagttcttcaagaactcgtttgatctcgatcaattcacatactccttgagcaagagctctaagctcagcttcaggactgctttgcaaaaacaggttgcttcttgcttctccaactaacaaggtttcctcatactttgggacaatggccagatgttgatcttctgtcctaaattgaactgtccaatctgcatcgtaaaagcttctatccttctttcttcatttttttcctgaacaacaaccttttcctactgtcttcattagattcagtaatatcctgtaaactgcctccaagtgttcttctaaagggttgtccatatactgactaaccaagctaactgataaatagatcaatttcccaactagccattgacacttctttttgtctacaggtttctccttttctaaaacatattacaggctatgcaaccaaacgtttttaatggaatattggagagtatgtgaatacaggaataaatcttaagagaacaaagtggagtttgatattgtaagacacgaggaggcattctattgattaaaaaagttgttgtcaaaacaacttttccttaaaaaactttaacagaagtatcaaacatgagagccacagcaacttctaacaaatgtttttttctttcaacaatcccattttgatagggagtacaaatacaggaactctgatggacaatgccattagagataagataatcacttaagattgaattaaaatacttcgtaccataccattatcagatataaactagtacctggacaaggactagtgaaagggaatgcctcaagttgggtagcaatcatagcatgccctttaaaattgttttcagcagctggatggtgaatattaggttgtttaaagtgaaagaaaacaaccttagtagaggcttttgaaatttcagagcactgaaagcacaactcctttcctcccccgaagtacgatgtgattgacctccatgaacagagtccatgagcttgggaagagaagtggggccttcgaataatattgctctaaaaagctatctaggaaagctggttataaggcaaaatacatgggaaagaaggttagattaaccccaaaaaaagtgatccaaaaatgggttaaaagcccaatgctctaccaaatgagctatacacccccggaaaaaaggagttccaagtaaccattggaactaaggtgggtaacaaaagggaccctagctatgaaacctcttggtcttggagcatcggttcgctcaagatcggcagcgccccttgggggatccgttgcgtcttttaaaaggactcaatcgaagggcataaacaaataaatggaaagcctaccgtttttcttctaagcttctagctcctaagagaaaaggtggtctacttgactcaaaaaaaaaaaggcttggctggcacacagtttatatctttaagttcaatcattgacaaggttctacaaaagggtgaaccgatcaagttgatcaatatcaatggattcacgcctctttgataaaaacatcttggagaagtaaccatggtagattttcaatggtcaaaatggaaaaacaagggattgagggctcattggacttgttaaacacaagcccagatctacaaaactcaaaaaagacagttgctgacggaaaaaaaatgtgaatagtagctgcacgtcagcagtgtcgtgtgtgaacagtaatcgcccatgatatggaggtcagacattggggttttgttgatcagagattgagctatctctgtgtcaaggacgaagctacataggctccaaagcaagccatggcccctcccaaaattttggggaaaaaattgtattgtaattttatattaaatttttatttttccaaataattatgtatttggtcccccctttatttttatttttttttttatcttttggcccccttcatgataccttctacctccgcccctactccttgtgccagagatgagaatagaagaccactccaatatggttttctaagattgaacctcagtaccaaatcctaaattacaaaaaaaaaaaaaa

SEQ ID NO: 266730 - DNA, 598 bp, Cannabis indica
tttccataataaatttgtttcgaagattcgtcccaatacgcctgcaatcaataacaaaacaccgaaagcatatgcatcagtatgtggtaacaagtcaccgaaatgttaacattaagcaagaaaagtaagaaaaactacctgccacccagatggaagatcatcatccctcgagagttcacttactacaggcttctttatttcatcattcctcgactctggtgtttttcttgtaggttcttctttggcaactactttggtggggttttcatcgttacttgactcgggggtttttcgtgcagcttctttggcttgttgagctcttcttcgcttcactcgttccctcctgttccaagacatgatacagatattaaagaaaagaaaaatatgcaatatgagagtagagtccaagctctaccacaaggaaggaactagtctcttaccaatcaccaccaagaggctgaaaattagcattatctttcgcctctccactggcaatctgttgcgccttccattcctgcatttaccgaagtataagaaacaagtaacaaagactgcattgaatttaatttaaaaacaaatgatgaagaccaacctcgat

SEQ ID NO: 266731 - DNA, 2615 bp, Cannabis indica
tttttttttttttctttttaaacagtggtgtttttgtatagatataaagttgtgaaggtggaggcaaatgacattgaagatggcgaggtaatgaaattggatattaggaggagatttttgaattggaaaatgtgtaaaatggtagcagggtgagatggacaagagtaattgaattagcataagttcatttatgggacaaaattaagttttgggttggcctttgactttctgatgtaaaagaatctattagtgttgttttccaatagtgtgagggaatggagtatgtagctgttcttctttagaatgttttacactcatgaactagttttttctttctaaaactttaggatcatccactttaattgctttctggtcagtggaatacttttgatatatggttaaagtttgtgaatttcctcattcccatcccatgtgcatatatactggtgttttcattatgttgatggtgatatctaattagattcttcctgctatatatatatatatataaatagattctgggtaagcttaatcattgaaaacagatcagctaattcatattattgcatgaatgcatcatgggattgtactagaatgatggctaaatgattgcaccaatttatttcttttcatttccctttaaatattttatcaattcagttgattatcatattacaatgacttcaattgatatcctcaccaaacacagtgagtcatttttctaccaggctacaagagtattctgtagagacggccattgccatggttgttgacggaagtgccaaactaaagattaacaccgaacatctaaggaacctgagtttgagaatcggctccttctaccagtttattggggaactacttatccaacctgataatgaggtatctggtttataacatcagtttgattctcttgtatcatatatacatacatcttaccatttagatcgactcttcttattttcaggcaatcttacaggcgcgtgttggtaggaacgtcgatggcattaaccttgatctctatcgtcagtccttacagctgctaagacaattccaggctgatcatcagtagaattcaacaacttgatacagttctagtttcgaaaggctcacatgggcttttctttttcactctgattaaggtatcatagtaacttgacttgaatcatatttgaaatgccggtcaaccaatgatttttaccattattttgactatttcttgagactaaattattgtaaatatatgatcttgattgtgctagtctgaaattcattctcccataaatgatgctaactctgtaaatgaaaataggttaataaggtagtcatagttatatagacaccaacaccaggaaaagtggattttcaagttttcttaagggcttctccaaagaaacggtaaaatctcaaaaatagtagagttttgacaccagtggtacttagcaacttttataggtggcgtcccacgattggttagcgatatttcttaatttttttttaagttatatgagacccgatatttaattatatcagtagcggtatgatactaagaagggttctaggcaccaatagtgccttcagcaattctcgggaaataaagattgacaaagttttattctgtctaatcaccttctgacataaaactgtcatataattcaaaattggtatctcatcaatactatttagtaagattgttaattggtttgtttagtttacgggcacatctaatccaacataattaggtagtttttggttggttcaaaatattgaattcactagtgatattttctctcattttactttcttggttgaaaatattacaccttttttttttcttctttctttatttgatttcatatgttttgttattttggattctccgattcttatgcattcatctcccatttataaatatttaaacaacctaatgcctttattgtaaaatgttcaatgttcccaactaatttggcagaataatataattctaggtaatcttttcttttctttataagattttattactaataaaagtaaaaacctgactctatttaatagtatctagctgaagttgagaaaattcttttttttttagtaatttattaaagttatttattttatttttttaactcatagtcattaaagttgtcatgtgagtcatggaatggagctaacacattattacatgtgatgtagatttgcactaacacaacttttttttttaattaataatgattatattttacaacaaatttaattagaaagacaggattgagatttaaaatcaaaaagtcaaaaaaagattgaaaagctaacagtgcaatctaagtgatttgggaaattggggtagtgcagtcataaccattaaacgcaattcaaataattttttatttactaccaatctttggcgttaaatgttgattggatcatattatatacataaaaagagggggttttttcaataatatacctaaaattgattttatttataaaaatacctttaagaaaattatttgcacaaatacggtcgtgccatgtcagcatgcataccgaaattcaaaacaattaccgaaaataaaaaaaattggaaaaatttcatttctagaaattttcgcttt

SEQ ID NO: 266732 - DNA, 2218 bp, Cannabis indica
acactcaaaaatcttgaggcaactgagaggtctcctggtcaaaggacaaaaaaaataaacaaaataataatagtcatcttgtgtatattagtagaaagaaatggcgatggattgatgtggcccatttttcgtgatttagagaattaggaaactacagctggtcatggaaaagctgtgagggatcccttcattatatgggagattttaagggtaaaaaggggatttcctcacatgtgatgtgagtaggactagtatattaacaatagtagtaaaaataatcatgttgctagcttgagggccttaaacataatttattttgtaggttctcttttgtagttgcaagtctcattagtttttcctttaccttaagaagaggcattgttctgtacaattcagtttccttcataatttgcagtgtaatgtttaccttctatgggcagcattacgtatagacaagttatgtgtttgtgcatggtgcctatacacaagaatgataaaatgatatatccattagcttgaaatactcgtgtgtttgtgtgaatgatgaaaggacatatccactcagaaaatgtctttttatgctataagaaatagttgattgttacggattgccatacatatacagttatactgaaaatgttcgctgtgcaaagtgatgtgtttaccgttcattttccatctcgctttatattagctttttgatgttacaacagttcgatgacattgggcctcaaggcacaaaagttattgtctataacctatgggctaatgacgacgggattgtggagctagatttcaatacagatcctagggtaacttattctgcctttattttcgtttcaaaatgtgtcatcattacatgtttaattttgtttgcctattatgcattgattgttacaggatataattattagtggggatactagaaaaattcagacaatccctgcttggaaattaataaatgaacagcacatcggcaaccggtaccattattctcttcgtgtaagtctatgaagttgaagatgaaaaaatatcttaactgttttgatgaataatactctttttaaataattttactttgtgagaacaaatcccataaaaataggattagaatattaaacgtaacaagcagatgaatacaaatataaaacacttcaaattaaatttgaatttcgtcaagtgccaatctgaaggtatgttcatcaatttttcgtttaataaagtgtcaactatgctgaataggattatgagctatgctaatagcttaattagagttgcataggtttgtcgttttcagttttcaactcgttcatctctcgatttagtccaaataagttcacaaaccccatgtgccatagctctgaacttcgattttgtacgccaagttacctatttgcatgtaaaaaaattcttaaagtaaatttggaactcttgattctctcttgggagaaacaagattgaaatatcaaacgtaacaaacagactaatataatttgaatttgaatctgaacagattatatttgaatttgaattttaatcaacaagaaacttttgaatgaataagcaaatcagaaatcaaaatttttactacagtattcttgttccttcaggtctacttgtccatcttgtatttgcggataccagcaagtttcagaataatacttaggggggaagttgttgaacatcataatatcgctgatgatctcaaatttccacaatttattttgtataaacctcagaatgcaggaactgtagaggttggctatattgttatgtttcaatgatttccagaatgttgttagttcgtagcttctgtcggtacttgcaggtctttcatttaacttgaacttctttctctcattatgcagggccaaattattacaactattgggtttcttaaagacgctccaaatgtcaatatccatggcttcaacgtctatcataaaaatcgtttaattcttgtaagtatcttgcatattagaagttaatattgtactgtactggaacaccatgatcttgatgtgtttgaatatgttccatttttaatacataataatctatggttgttacttgttaccactacctcctaagcataagttatttaatgggcttcatacaatgcctttatactatagaggctgctcatttcattttctcgattttctttttccatgatgtattcgttcaaagtagttcttgaatatatgtagctgtactc

SEQ ID NO: 266733 - DNA, 3733 bp, Cannabis indica
ttttaataagtgtgacaagtaaagtaactgtttcaatttttttttttttgatattaaactatttcaaaaagtttaaaaatttataagtgcttttaaataattactatagagaaaatagactaaatatttttatatatatattttatgaatactgaaataggtagaagaaaggaaaaagaacaaaacactggctatgaaatgtctaacctttcacacacacatttgtattaaattatattacttgaccaaataataatgttgcccatgtgaacagaataatggattttccccagatggaccatggtaaggaaaacaaagcccatatgcatttttatttgattgacagaagagtcacagtatttaaattaaaactgtcatgtaaattgtaatatcatacctttttattttgctcgaaaatctaatttctcagtattttaaattaacatttttttttcccttatcttttactataattgctacatatataacttttatttgggtaaataatattttgaacccattattttgtaaaagttattaattagatattttattttattaaatagcaaaatagaccttgtattttctaaaatagtataaataggactctgaattgatttttttggtcaaaaaaacattaatttacaatctaatctaaaagtattattataaaactgtttacattttctgtatctattcgtattaaaaattgtcttcaaattggttatataaaaaaaaagttaacaaaaattaagttaaggatcttatttctaccattttaaaaaatgtaaggtctattttgtcatttaacaaaacacaagatctaatcagtaatttttgtaaaatacagaatttaaaatagtatttactcaacttttttggttttaatatggacagaactagcagaaatatgtaaaaagagcaaaacacattgattcgcacatttttagaattgcataaccaaataattcaaccttaattggaatatttgttcaaactaattagtcaacaaccaaagcacatacatagccgagaagcaaaaccaaagctgaattagggttaattaagaagaatatatacatatgtatatttatatatatatatatataagagcaaattatatttttttgattccatcaaagaaaaaaaaaagatggggaggtaaaattgatagtttgaggttgaaaggtgtgcatggaaatggaggaggtagctagtcgtagacgaaacatttttgtattaggcatagccaaaagccaattatttctagttgttttcatgtctccatagtcaaagatatcttagatttggtggggcaaccttctaccctctaatttaacttttacacgacacaaatatgtatattattatatataatgggaatccacttgatcaaaaatgatattacgtaaattatacatatttatatattacgtagattaattatgtaaattacatattattaacgacaaatatatatattttatatatatttattttttttaaataaaaaaaataacaaatgttgtcacgtgaaggtcagcatacatgtagttagttaaacttaaatatttgtaattaataataaatttgttcatattatttatttttttattaaaagttattttcaaattttgatatttagaattagttaaattttaaatattttttttaaaaacatttttattaatttcgaacataaatttaagacgaataataattttttttaattattattagaaagtataataataatttttatttttatttaaattactattatgcttttaaattttaataattattatattgaatattattaattttaaaattatcatattaaaaaaaattaaaaactaaaataaaattaacaagtcacgtaacatttatttagtatatatatatttatatatgagtgaaagttgaactgtaaaacaaagaaggcagacaatttaaagtggtttggccgagtcaactaaaattctcaaaatacaagtttgagaaagagaaataatatgcgtatttaaaacataaccaaatacctgagcgaaaagttacattttatgaaatacgagatatataagaccttttatttattgacatttatttaatttggagtagtttgactgaatcaataaaaagatcacactaacctttttctatttggaatacaaaaacttaaatgtttaaatttaaaactgattttttattttctttttattcaatttcaatgagttaattttcaagttaaactaaaattcattatttatttttaaattcaaaataaaatattaagtgggtcaataaattttatgagaaaactgtaaaattcgaacccgaactcaaaaataaatgataaatgataattgatacgagatattttcagcataatttgatagtttgttgacagtttgttgtgtatcactcgtacatggacttgatgtgtgtgtcacaaaacaattgcactttgaccctgcactgcttagagtatcccgcccgtgccatgcgcttggggttgtacccgagccgtgtgtactatgccaatcgtcgagtatgctactccttaattactcccaatttggatccgtcaggctacacccgatggctcccatcgagagtgtgcttggcgacttcacctctactcataccccgatgagtgatcttgaacacaaaaaatccctacacgttggcactaacaacatttcttattgataacaaattttccattaattacattaatttgacatggtggaagttgcaaagtgaatagagaaaatacaatagatatggtttccctaataaattgactattataatttcatttttagtagaaaacgtgaagaagttgataattatgttaagtttacaaatatagtggcaagttaggctttacaactttcttaatagagaagagtagtcgttgttcttggtgtgcttcttctattgctaagcaacaaaagagagagattggttggaatgttgcgtaaaagtaagcaaatagaatttcctcaataaaagtctttttccttcttacttaacccttttccttttctcacttaataagtttcgttttttttctcttaggccagagccataaagctgagttgttgtctagtcttccacctaaacaattgggtgtatatggtgggaatagtgggattgtgataaaaaaattaaaattattcaatatttaaaaaatatgtatatatgtaaaaatatttataaatgatataaatataaaaatatataccgaatctgcacagttcaatttacacacgtgcaaaagttataattttcacttgtttatagaaattagagcaacattttagatatttttccaaaatttaaaatagtttatagtgtcaaagaaagcctaaaataattgttcttacataatattccacaagtggtgaaattgaaagtttggattatatattgtttctattttttttatcaaaaaaaaaaaaaaaagaacaaataggatgcctactgtaattctaatgaacattacatgtaaaaaaattttgacgattataaaaatatgcaaattggaccatgggtatataaaaatatgtgggactataaccactgacccaatgttgggattttttttttttttttaacattttaaatcaatttttatttaaatatttttactaacagaacaatctcaattgcagccagaatttatatagcaattcatataaaaattacaaggaacaatcaaaactgt

SEQ ID NO: 266734 - DNA, 1251 bp, Cannabis indica
attgtgaacttgatcatttctagcatgccaaatggtgtccacaataatagaagcaaaaggaacacttcacttgtgttcacaccatgacggtcaaggccccaaatgaactttatcaaatcccacacctgggcaccattttctctgataggaatgagaccccaaggagaggatctccaaaatgataagcaaaaatacaatagagaaacatgtgctccatagtcttctcttcacaaccacacaatggacaagaagtgtcctcaacatgaaaacaagtttcgataaccgctctggtaggtaaagcatttgaaattatactccaccataagaatttatgtcgttcaagtattgtggcactctaaaatttattccagagagtcggggagacaacacatggcagatctctcttcatagccattgtaaggtaggtcaatttggttgtgaactttctattatgctctttaacgcacatctacccatcttcaccaaaacctttcggtttaccacctttaaaatggccaaaatagttaccttgtcatacaactggtttaatttcaaaagatcccaattaccatcagaatcaatgaggtcgacaatagttttatatctctccctcaacaaatcccttggtgtgggacaaatattttcaccatatgggactcatgcgtcctcccaaatattaatgttatcaccttttcccaccaccttataggccctttcttttaggatatcctttgccttgataaagttcttccaaaaccaggaattagagctcttggcataacaattaaagaaattcttacctcttaggtaattggctcttagaacctggtaacaaagtgattattctttgtaataagagaccaaccctatttagcaagaaaagtcctattcatatcctcagtcttcttaatcaaaaacctccagaagactttgaaaggcaaaggcgatcccaagcttttagacaaaggcattggttccctttttcaaaaacccaccaaaagtctctagccaacccatcaatcttcgaagccaatcttttaaagagcttggtagtttgcataggataaattagaagcaaaaggcccattgtaacaccctaaccataagtttgtcgcttagcgactacacaacaaaagcgatgatgtcccaaagatcgtacgctccactatcccgacatgtacaatcttcatctactcactctcacggctgctcagccttggccttgccctataatcaggtgcccatacaccc

SEQ ID NO: 266735 - DNA, 1569 bp, Cannabis indica
aaaaatttacagagatgatactgtaactataacgaataccgctatgaaaaaaaaatttgaaaaaaaaaaatattttagcatgtgattttgagtgtaaatattaattaaaaaattgtaataggaagttataattagtactttacgctttattctttttatccatatccatattgatatatgaagaattctaagtcgtatagatagaattcatatcataagttatgaattagtataaaattttcataaatgaaaaagttggattattgaaatttttataatgaatatttgattgaagaaataaattattactcatgaaagacaaatttaaatgattgttaaaatttttaaagaaaggatgacatagaaagcaaaaaatgttccaaacccacccaaaacaattaatagtaattaaaaagaacaatgtaatttaaaacaacatattaactgccttattagctttggattcattttgtgtcttgtcactaattagggattgtagtcaaaatgttcgtttagtacttttaattagtttgtcttggctattgtcattctcacctttttttttcccttaattgttctttttgttgtggttctaacacatactctattaaacatcattgggttgactcaatggctatatgctcatatatatctcaacaaatttccaaacatgttgagaacatggacataaattgtcatattgaacttatcttttttgaacttctctatcttttaaattcattatgtggttgttagatattgattgtttgaactactgtgggagaaaatggacatgagattcttctttttaggcttgtttgtttcttgttaaaatggtcaagaaaagtgagaggtaaaatatggttggatggtcaatggattttgggttctttgatgaatttataagggtggacccaatacatacatgaaaattttaaagagatgtcacagcatgtcttccaaattaaagtaaaataatgataataataaagactatttggggtttagtctcactacatgattgagtataattgttgttaaaacttgaaatcaataataagtagcataaaaattaagtggaattgggtaataattagctacaaaacaatttagggaagaaggttgaatgggttttgtaagctattttcaaaaattttaacttgagtttagctgacatttattcaactagttttttgtttttttaagtcacatttggtaatatttatttaaggctaattaataatttttccccacgaactttgacatgtatcaaattatgatcactgaactttttttgtcgttaaaaattccctctgaactattgagtttgttaaatttaaggacttttgtctaattttagtgaaaaaattctaacatggatgaaagttcaagaggcatgatttatcatatcaaagtttgaggggcatgatttggtagatatcaaagtctagggagcatggtttagtacataaacaatcactgaaacagtaaaattgaatgaaattagacaaatgtccttaaatttaacaatctcaatagttcggggaaatttttaacatccaaaaaagt

SEQ ID NO: 266736 - DNA, 3242 bp, Cannabis indica
tatatatatatatattgaaattttacccacaaccacaaggaacttgaatctcagacaatgtgggagcaaagactgtcaaaccacaaggctgatcatttttgagttagtttctcgttttgggtattaataaattatagtaaaactcactcagtgtttgtgtttgatgaaatctaatgtgcacataacatgaaattggagatgacattgctccctaattctaggactatttcattgggatcattatagagtgtttctacatatcttattatcacagctcacaccaattatgtaatctactcgggggcggggtggggctaactggtatcgacggactgtgttactccgtctctttctgttttgcatctgcaattaatatagcaaacatttggagtaaaaatatagagtattactgattgtgtggtattcatgtataaatgaagagcaatgataatctagatgatctcagccatgaaaaactcttgaagaaaaccgtcgatagtaagtactactattactactaacctattgcactgcgatcgagatgcataattatgattgttgcaacttttgcacatccaatccccttcccgccattgcttcgcactgctaagaaattaatagtaatgaatgtcgtcgttatgaaccaaactatcagtgtcaaaaaccaaccacccttttccatatgtaaatggtaaaagtgataaatgaatacaaacttaccctttaccaagtaatgtaggagcagttggttggtgtggcaattgcatggggttttgcaaacttgaagctgcatcgaaacttacattgggatagggagtgtacgctataggttttgagtcaccaatagcacccaccagaggctcgaaacccaggtgtgattgatgttgcccttgtgtctacaatccagtgtaaaccaatagaagaaaaataagttttttatgtaagttggattaatataataggagaggtaaaattctcacatgtccaatgtttaacctcttgttgtcccagtcatgcacaaactcctcagatgctaagcgctttgttccgagtcctttatacccacaaaagagagatgaaagttaatacaatacagagaactagtcattcatagacactaaaaagtaaaaacacaaatggcttctcaaggagcaaacctggtggaaaagcattgcattttttgcactgaaataaaaccaaaacagcattagatagctaagataaagacttatcgaaatacaggataagaattttagaaacaagaacatccaggtagcatcaccattcaccacacctgttcacgggaagagtagttatggaaaccacaggtacataaccaatcaccattacgccatcctttgggaaccgaaagaagctgactcgtaggattcgcataaggaattccaggattaggatttccaccaaaggaccaagtattagctggctgccctgctacaggccaattagaggccaaaggaagagactgttgaaaagcaccatttcctattaatccaacattcattctttgatctgctactcctcctcctcctccttggaccctggcaaaataatgcgaataagttgggagagaagctccaggcattgcaatcgctggcattgctgctacctcctttggttgcccgcactttttgcacttttctcttgatgcataattgttgttagtgcaacctattgatccatttgccatacaaacccaacccagaaaatgcagccaagaagcccaagtacacgcattacgcacaccaaccagtccatcccaaccaaaacacaatacaataaatataaacacaaaccactcaacctaattgatagcaagttcctaaactcaacaattgaattcataccaaatgggtaacttgtaagcattatataatcccttacttgactacttagtgtgaatagaagatcaaaacccacaacaagaaacaatgggaaacaagagaattgttcatatataaatatagacatacatatacatatatggaaaaacaaaaaaagttaatgatcaagcttcttcagtaataatgcaataaaatattctaaccaataaaccaataggatgctaggacaatcaactaaaatggaacatcacaagtcagtagcgttttgtaaaaatagtcattcaaaataactatatttggtagcaagacaaagattacactatgagaccataaaaaacaaccattatagtcgttttgcgaccataaatttacactaaacgatcttcacggtcgcagtggcacagcccaagttcaatgtggttattttgctaatttaacattttcatgtcgttagtttggcaaattttccagtcaagaatctattatctacccagtttagctttcatatgaaacatgtataaaaaccatcaagaacaacttgattcagcagtacaaaaagggggaagaattcccctgtttggccaccaagaaaatcccaccaactctaataaaatccaacaaattcaaatcacaatcactcaaaacaaaaatcaatgaataattaaaacccagctaaagaaaaaaagaaaaagtagagcaatgactgactaaccggagcagatccaatcgccgattcgaggaagccatttagaatcagctggggtcttattatcgacgagaatacgaggttgcttacacctattacagaaaaacctgaaagcgtagttcctattccggcaaccattacattcccagtccccctctctcccttctcccatttttcttttttctttatcagtttgattctactttttcgcaaaatctgtatctataatctatatgtgtatgtatatatagtcagccgtacttacctagagaggaagagcagagaaagaggaagtgaagtgggctgccgccgtagtcacacccgccggagacgtggtgggtgtccggtggtgttgaagggagggagaaagagggtttcgaaggcaatacttttatatgtttattcactagtgaaatgatactaagaccatgtttggttggtaaccaaaaaatggtgaaatatgtctatccccaattcatttggctagcaatccaatcattgatcttcatcagtatttttactacattaaattgtaaaaatattttaataattaattcgagaaatcaaatttaaaaaataaatgatagcaaatcaaaaattggtcatatttattaggggtggacatcaaatcgctcaaaccgctcaaaccgcccgcaccgcaaaaaaaatgcggt

SEQ ID NO: 266737 - DNA, 1779 bp, Cannabis indica
ttttttttttttttgtacatcaagtatgtaaaaaaaaatgtggctgagctggctttactcaacggctccccagtctccaccatttaattaatattaataattaaataaagcgaaaatccaacagaatattcggaacaagttcgactagggttagggttttgctttcctctaactccgcatatataactttttacatatatatatatacttgcgtatcctttcttctctcacgctcactctcacccaaaattcacttcagctgctccgtttagagaccttcgaagacaaagatggagcaaactttcattatgatcaagcccgatggtgtccaaagaggactggtatgttttctatttttattgtttttgctttacctatttgattctcatatgagtttcttgagatttctcatatttctgggatatcttgatgattataatggatctggtgtttggttggtaggaaatttttctttttggtgggtcctagtaaaaaaatcattactcaatgtatctggattggggtttttcggagtctagcaaaaaataaagcttttgataaataaattaataatttattagtgagatgttgaaattagattcaccaagattcgattactgtttggaaaattaaaggtctaattattgttactcaggttggtgaaatcattagcagatttgagaagaagggattcactttgagaggtaagctttctatatcattaaaaggactttttctttttaagtttgtaatcatatatataattgagaattgtaattgtagttttctaagttaagggcttgattgatttgttttgttttgttttaggtttgaagttcatcactgttgatagtgcttttgcggagaagcactatgctgatctctctgccaagccctttttcagtggtttggttgagtacattgtctctggccctgttgttgccatggtttgggagggtaagaatgtggtaaccacaggaaggaagatcattggagcaaccaaccctgcagagtctgcccccggaaccattcgtggcgactttgctattgatattggcaggtaatgaaaatgtttagattgttatatagttgtatgatcatacaatgtttattgttagaaggggttttctatactgtgttgtttttgttggattttacaaccttattaactgcatgaacattcattggacgcaggaatgtcattcatggaagtgattcagctgagaatggaaggaaggagattgccctgtggttccccgaaggcgttgctgaatggcagagcagccttcactcatggatctatgaatagacttggatctttcttgagctctcagatactgggattatctttctcttagttgttatgatgatgaagatgacatcttattatgaagttttagagagttttgttctcctgataaaactatgagtctttgtatgttttgctttgattattaattcatctggatgttgagtgtactaagaaccttcataaacaagttatcacattgtggaaatcttgtgtcttgcttcagtttaactctgtttctcattatttatttggttggggtgattataaaacatctagacatatttcaatccatatttttttttctttatgttttatttatttatttattttttttttttgacaaagtgattagaatcgctcatgaatttacgacgtctatatccgccactggcattggaacctcttcgaaccaggatagctcatcgtctaaccgtagagcatgctttgccaagtcatgggccgctaaa

SEQ ID NO: 266738 - DNA, 5076 bp, Cannabis indica
tttttttttgttttaaattttatcattgcttagtaaacaaaattaacatctatcagatgcgattaaggattattttgagtaacttcaaagcatcctttgctttcttttctaatccacatccccccactaacaaaattgacgttgtaacctcaccttaactctctcatctcctttttaaatattttctcattgattaataattttagatttatattaattaattaattgatgtaattaataaaaggaaaacaataattcttgaaacgttttgtttgttttcagctgttaccagatatggcggtgtaacgcgaattgggaatattataaaatgttgttgtaaggcaagacattttgagatctttattatattgttgttttaccattttaaccctcctaaatggctgtactcccaattatgtccttcaacttcatactattactactatctactcttttgttcttcccgccattttacctgtctctaacggtcgagactcaggcccttcttcaattcaaaaaccagctcaaagaccctctgaaccaccttgattcatggaaagactatgagaatccatgtcgattcgtaggggttacttgtgatcctgtttcaaggaaagtctctgagatttctcttgacaacaagtccctatatggggagatttcaccttctatatctctcctgaagagcttgactaaactccatttgccttgtaatcatatttctggaaagcttcctacccagctgactaattgtagcaatctcagagttttgaatctcactgctaattttatagcaggaaaaatcccagatctttccaggcttcagaagttggagattcttgatctctctaagaactatttctctggctcatttcctgcttgggtggggaatttgactagcctggtgtcacttggtctgggcgaaaacgtgtatgatgaaggagagattcctgaaagtattggcaatttgaagaaattgaaatggttatatctagcctattgccggctgaaaggggagatccctgaaattctgtacgagcttgggaaattgcagactttggatctttcgagaaataagatctctggaaggctgtccaggtcgatttctaaactagaaaatttaaataagattgagctttttgctaatcacttgagtggagaaataccaccagagcttgctaaactcactcttctacatgagtttgatatctctgccaattacttccatgggacattgcctcaagagattggaaatctaaagaacttaggggtattccaagtataccaaaataacttctctggagagttccctgccggttttggagatatgccacagcttttcgccttgtctatctatgaaaaccagttctcgggtgatttcccagccaacctcggtcgattctcagcgttggaaagcattgacatatctgagaatcagttttcaggtgcattcccaaggtttctgtgtgagaaaagaaaacttaggttcttacttgcagtggagaataacttttctggggactttccagattcttatggtaattgtaaaacccttgagaggctaagaatcaataacaaccgtttgtctgggaagatcttagatgagatttgggaacttccatttgcaaaaatgattgattttagtgataatgacttcagcggggggatatccccaagaataggtttctctaccaacttgaatcagctgttattagggaacaatagcttttctggcaatcttccatcagaacttggcaagttgacaatcttgtccaagctctacttaagtaacaataatttctctggacaaattccttcagaaatcggagggctgaagcaactttcatctttgcatcttcaagaaaattctttaactggtcccatacctcctcaactgagctactgcagcaggatagtggacttgaatcttgctacaaatgcattgactggtaatctccctgttgagctttctcagatgagctctctaaactccctaaacctttctgggaataaacttaccggaatgattccacaagatattggtaaagtgaagttcagttctttagatttgtctgaaaaccagttctttggaccagtaccatcagatcttctgaccatgggtgacaatgctttccaaggaaataaagggctatgcatagatcaaaacttaagggcaaattctgatatgataatttgtggtagaaatcgaagccaaagaagcctacttcaaagcaaactggtcctgttttgcgttatagcatctgtgttggttgccattttagctggtttactcttggtgagttacaagaacttcatgcatggtgatgctgacatagacagtaacatagaagatgggaaagaaacagaatcaaaaatggaaactagcgtctttcaatcaattggaattggaagctgaggaaatatgtgatttggaagaacacaatctgattggaagtggcagcacagggaaagtctatcgcctagatctgaggaaaaatggaggcacagtggctgtgaagcaactatggaaaggagatgctctgaaagttttggcagctgaaatggagatcttaggtaagataaggcatatcaatatactaaagctttatgcatgtttagtgaaaggaggatctagtttcctggtgtttgaatacatggcaaagggtaatctgcttcaagcacttcaccgcgagatcaaatgtggacagccggaattggattggtatcaaagatacaaaatttctctaggagctgcaagggggattgcttatttgcaccatgattgttcaccaccaattatacatcgagatataaaatcaaccaacattctactcaatgacaattatgagccaaaagttgctgattttggtgtggcaaagattgcagcccaaaagggttctgattttagctcttttgctggtactcatggctacattgcacctggtgagtttcaatattatgatgtcttgtgcttaacaaaattacaaatatttttagatgcattctattctattctgttaactgcttagtctcattcatgtatatgctgctgtttcagagctggcatatactcttaaagtgactgaaaagtgcgacgtgtatagctttggtgttgtgcttctagaactagtaacaggtagaaggcctatagaagaagagtatggagaaggaaaagatattgtttattgggtttcaactcatctcaacaatcgtgaagatgtgatcaagattctcgacaagaaagttgcatttgaagtacttgttcaagatgacatgatcaaggtcttgaaggttgctatggcttgcacaaaaaagcttccttctctgcgccccaccactgagagaggttgtgaagatgctagtggatgctgagtcttgcactcccaagctgcttccacaccagaattctgaaacaaactatggtaatactgatagtaagatgttttactagacacttttacttctttttttttagcaatgtctcaacaggtgtgagaaatcttacacaagtttttaattaagagatactatgggttttgaattttcaatcagaaaggcttataacaattctgccatcttgatagactatcatggcaagtgtttcgccattgcatgatgataatgttttgtaatttttagaaacaaaaaatgtgacatcggaatggatcttctagttattatctatgaaactgtgtttcttttttacttctagatcaatgactattgtgaaatccttttcattttcagaaatttaatccagcaatagagcaatagaatggatgatgataaaaaataaatgatgtgattacgatgttttggaattgaggtgtttaattatatggtactgattattttgagaaataagttttgagttgttttattggtgtggtggccaactgaaagtttatgtgaaattagttagtcctgactaaatcctaaagccttagaaaaattatataaatatatttgaattttcaataagctaatatttgaccaaacttatattcaaattgacgaaatatatcaaatcattgcttactcgagtcgggtattagttctgatttttttttgggttggttttttacaaaaatgttgaaattttagtaaaaattcaaaattttattgtcacacggcagaaattacatttatattgtttttttttatactgtaaatactaaaaaaaacaaggtctctatctttcacgcccacaaacagaattaccacagaaatatcaaaacagtcggaaaacaattattaattttgacgagattgagcaaaaacagtaaaattgacgtcaaatcaaacaaaaaaaaaaaaaaaaggaattaaaaaaaactaacaattttttacacagcctcaacaccagatacaatagtggctatatttgtaagcccaatcttgaaaaataagaataaaagaactactaatataaaactaaaacaataacaaaaataaaatgtaaaataaatgaaccaaatataaccacttaaaaaaacaataaaagaactagcacaataaaaatcatcagaaattagtatatactgtaataaattaaataataaaaaagtaaaaaaaatacacgatactaaaattaaataaaattagaaaaaatattatggggtataattttttgttcctcaagggtgctagtgtttgggtatatattaattatgaagtttcttagttgcaacttgcaagtcaatcatttgtcaataaatcgttcttattcatttcatatttattaattatagtaaaagatttgttgctgacttttctttaatcatgcttcaatgcatggggcatatagattaaatgagaaatgttaattataatttcttattataattttttagtcaacttttatgtccgaaattatatgttgaaatatttttttataaatttttttcatagtacagtagaacctctatttaagaatactctattcaagaataacctctaatttgttataaaaaaatcaagtcccaatttgggccagttataaatagaataacctctaaatgtaattagttatacattttctaagtctcgtattaacaaaatatacctctatataag

SEQ ID NO: 266739 - DNA, 2586 bp, Cannabis indica
aaaataaagataaaaattaaaacaagtaaaataaagtggatatatgtaattttctcattgctagtatacttaagaaaaaacattactttaatagtgttttaaaaaatatgttaaatttgttacatgttaagaagttgtattaaatttgacacaaaatataatattgtgctaaatttaacaatatcactaattattataattcattgacttttattaatttttatattctttatttaccatattactattatttaaatgataaaaaataatagtttttgtatatgctcaataaaatattaaatgaccatcaagataattatttttttttttcttattttacatcttgttcattggatcacaattataaatagtaggtcaaatataagggaacctacttaatttgatacctttaatagttcccttgaaggagactcttgataagaaaaccattaaaggtatcaagttaagtaggacggggcctcgactctctcattttctctttgttgatgacatgatccttgtggggagagctaatttagtgaaagttagaggcctttggcaatgtttggagaaattttgtgcatggttgggacagcggataaataagcttaagacctccattttcttcagtaacaatactagtgagggtatgaaaagtgacatcaaacaggaactcagaatcaaatgtgccactaggaacattaattatttgggactccctctatttagatctcaacataagaatactgacttcaacttcattttagacaattttgtggcgaaactacacgcgtggaagttgtaaacactgtccaaggctcgccgagctaacttaatcaaatcagttaggctctccttgccagtttataccatgcagaccacgaaactttctaaaaaacttgcttttaaaattgatggtatggccagagacttttggtgggttgtgaaaagggtaactgagggctctatttgaaggcttgggatcacctatgtctgtccaaatccaagggtgggctgggcttcagaaagtctttggaaatgaaccagacctcattggttagatggggttggtccctcttaaatgataatcagttgttgtgttgtaaggtcttaagtgctaagtacctgagaggttcttcctttttgatttgctcttttaaaaactcggactctttgttttggaagaacgtggtgaaatcaaaataaatcattatgaagggtgcttgcaagttgatatctgatgggaaagagacaaaatttggttagatccttgggttattcatggtgaggattttttggccaaactgattaggccccagcctgggggacttgaaaaggtcgtgaaccttctcattgacaatggagagtgggacattcctaagcttcattccattttttgccaaggacccattcgtaaggaaagcccaacggtcttggtagggataggtgggtctggactaaagagtcgaatagagtgttttcaactaagtctgcctacctgattcaagctttagctcgtgcgcctttgtgctcggtttcccctgcgctgtggaataagctctggaactctaaagtgttggagcaacacaaggtcctctggttgagcattcttttaaatgctcttcttgtctgtgctcttcttgccaaaagaattcttatggatgacacctcttgccctttttgtagggagggtgaggagacgatggagcaccttttttctctactgtaattttgcattccatctctggcgttcctcttcttgggggattatgccagttgttgattctggtgcgcgtatttgggattaggttaaatttctatggaccctaaagtctagggggtggatgcagacaagttatttatgtatgcttcgattgtcgtaaatacgatttggaagacccgtaacgataaggtacacagcaactctctatgtaacattaaacaatgtattgattctatctcgttctgttacatagattatgaatcttgtttattttcttcgtcaaatgctactaagcccctaggttggtcccctccttcggaagactggataaaaatcaattgtggtgtgaaagttggatgcaattctatgtgcggagtggctttggctagggagcacacgagttttattttgtgggtggcttctaacaagttaaacttctctgatccccttattggagaagctgtgggttgtcagttagccatggagaaggtcgtgcttttgaaatatcattttgtgttaattgagagtgattctgaggccgttatcaggtgttgaatggaacatgttccaattggagtattgataactatgtgcaccagtgtattaagctctctagtatatttttgagttgtaatttttctttcattcctagagtttgtaactttgcagcacataatgtggctaagtgggcatttatcaatgatgtaactggcatgattaatacgtcaattatcctatagaacacatttttataacgaccatgaggtctaacttttatttatctataaactttttctttaaaaaaaaaaaaataataaatgagtaatctaataattgtgagttttctttctttcttttttttt

SEQ ID NO: 266740 - DNA, 5336 bp, Cannabis indica
  modified_base (27)..(27): a, c, t, g, unknown or other
ctgcactgcatgcaagagtgatttaanagttatacctagcagttctgctgtcatgttaagatggaatctggattttctcatccttaatgacagagagtcaatctcttctccctttgacaaaattaacatttccaagatgcaaaattgcagccacaaccctaaaaattgcttcctggagagaagtttttgtgtcaaaaatcttaaacacaaaggaaaaatgatagaattgctacaaaaaaatgacctgttcttcctcgctgattcccactacatccatagcccttctcgttgcaagatattcgtgggcatcatttactccatcaagctcatagcaggtggactgatttaagtaatggaaatctttcgggtttcctaacttgtagttctctctatactgaaagtaaaaaaattaataaacaaataatcaattatactctatcatcacatgcatatgcagtatcagtgagtatatggcctagaaagatttgaggaaatttttacataaagtttgattgtaactacctcaggaggagcaccacaaagaaggtaaaagcaatgataatttctttcaggatctgaaacttggcaaactcgagatctctcaagcaaataagtacgcacagctgccccagatatcctcccattcttatcgaattggatctcaacaaatttaccaaaacgactgtagcattaaagaacaaatatcaaatgagtaaaataggttacttgaatatgttgaacccaagaaagcaaaatttacaaacattaaccgtagtttttattttacagaaatctttgatgtaaagtgatagggttggcagagttgaggttttacaaaaataaagtatgctagacagggaggatattttgaacaatagaacaactgttaaaaaatcaaatttatccacttaacatgtttgatcatcattccaggtagaaaatggcatgcagtagagtaaaggcagaggcaaaaaaaaagagggtattagcaacgtacctatatagaccttaaaataaattattttacagaaatcaactactactaaagtacaccttcataggttacattcatagtattcacacaaagtcgaaccattgatatgagcaccacccgtttttagtaagatataaccatattaaaactcaaggtacaaacagataatcacctcgagttgttgttcctgacagttttggcattgccaaatgcttcaaggactggattggactgaaaaatcaagcagactaacacttcaggcaacagttacaagtcaattatattggaagatctaataagtagataatgactataattttaacccaataaagatagctctatcatacttcaagaacttgttgttcaactgtccttccttctaccccagatcgaccaccaagatatgcagataccgcataagcatctttgttgtctctgtcttaccagcaccactttctccgctgaccagaattgagttgctcttcccttcattgatcattgccctgtcatagataataatgaacccatatagatcaagctaaataagagaagaaaaaaaaaggggattgtaaaggatatttaatttcacctgtatgcaacatctgcaactgcaaaaacatgaggacttagttccccaaatgcggctcctttatattgttccatcatatgagtatcatacagatgaggtaatctttgaaatggattgacagctataagtatatttcccgtgtatgtctggggtaaaatattattaataacatatcaacatctttcttccttcttttgtcaaaaaataattcagcatataagaatatgaaatgaaaaccttaagcatcttacatatatttcattaagttcatatcttgcagccaagttattaagaactcctggttcgtgcaaatatgacagctttgtcatgtcatctacacctccaggaggagcttcagtatcctttggaaagactttggagatatttgtgacaacctacaaaaaaatatacaagtcaagagaataataacaccaaagactcaatcatatattacagtatttatggtagctttctgtcctcctaacttgcctcagcaacaagttaagttgaatcatgaactagtacatcatgaattgaaaagagcccatgacataaacaatcatattttatagagatcctttatttacaaaaaatattaatcaacagaattatgctttaaatttgtggtgggtgtatctcaccgtctttccattggtgcaatgaacatgaacttgttcaccagcaattcgagaaacttctccatcgatccatgcttcggcaggatcttcaacccaaacatgggaaccaacaattatattaactggcggggcctgaaaagaaaaaagtattagaaatgcaaagcaaaatacatgtataatgtactaccaagaaacgaaaaaaaaaaatcctccatttaaagagcgaattaaaaaaaaatgtaccaatggctaaactagccatttatatattacaaaatttagtggttatactgttaatatagtgatgataatttcaatgaacaagtgtgatgcagcttgtttataagaaaaagaaagagacagaaaaagccaatttggagtcacacagtgcttgataaacactcaacattataattaacaaattattcgccaagtccaaacttacagagaaaagaagaaaaaaaatgaacgccatactacatatagctacaacattctaaatgatgtatcaacattgctattcatgccttatcttctctcctttccttttgccactagtccttgactacaaaatttgagccacaattaactggccacggttcccaacatggtatgaacacaaaataatccaagatcccttttttcgcagaaaacaaatacaagtaccgctccctccctagttgtttctaacctagtaaactaatcaccatctcattcatcatgatagtgcctctgatacactgacttgtatttgttttaatctagcttatcatgaaagcgaaaagcttactctccaacatttcaaaataaatatattataattgctactataaaccagctgaagtgtctactcaaagctgtcaagttgatggtagaactgggtcacagttgttacatagtacaatgccttcttgctttcgagagacaaatactaaaagcatattgatattggcaataaaaccaattcattcacattaaattgattctatgccacaatcctattaccaaagttctaattcagcttcaagacctataattcgacaatgcaaagataaaataggaatgaaattggaacatagtgtgagctataaaaagctaaagagaacaaaattcaacaaatttcctctatacgccaatgattttctaaagtttgtatatcatatcatgatttttcaaaaattagaaatataatcacatacttatactcctagaaacacatcaaaccgattcaactcaactagcaaaggagttaaagaaatcaatcaaccaataaggcaaaattataattaaaaacaatagataaataaaatcaatcaatgaaaaactagatgctttgttcaagttaccatatcgattgaggtcggcgatcttctccgctaactcatccgagaacagaaccgagtagaagcagaagcagaaggaactcggcgagtcagatcggagagaacaagagacaggtgacttttaaatttcaacggcaatagagatgaacaaagaataattttaaacagaaatagagtttttacgaactgaagaagacgataacaggaagcaaacaaagcacagagaggggatttttgcccttttttgaagcttatgattttggtttttctttaaaatgaggtgaaatggaagcttatatatttatttatttatttatttatttatttattacgaaaaggcaaaaaagttaatttgagcttctctctctaagcttgtttatgtctttgctgtgattttctctctctaaaatttttatttttatttttattattatttctttgtacttcagctgaggaagatggaggacttgtttagacattcgtggcctccataaaggcacaagcagtggctctcacctctaaaaacgacaatgaagagctatatctaagggacaaagactctttgggcaggaaattggaatctcctcttttacgtatttaccctttttagtacttttagttttaacaactaaagaggtttttaattaatttttttattgattaaaaactctgcttgattgaattaattataattatagaacgtttacgtaaaataaatatataaatggttgatcattttgtggccaaaaataaaacattttgtttcagtaagttactatattattactcattcactagattagatacactatacatggcaattgacaatacaaatatggtgggggccctagtagaaaaaaagctaaacagctttcagagtctcaaaacttcatttataattttccattactgtgggtggtgggggtaaataagtaatttcataaatcaagaaagtaaattttcaagacaaaaaatattttccgaccaaaaagtattcaataataaaaaaaaatcgaaaatatagcgaacattacaatacgatatcgcttacaattcgctggcgcctaaatattttattacctatattttatgagcgatggaaataattatgtacggatcgctccaccgtaaaatgagaataccctacatccactattgcttaatcatgattcatgggcttatcaactcaacattgcattacacgtgggtgggcccggtcaaccaatgaatgtgaaacgtaaccatgtcataatttttaaaaagaattaattaatgcctttcattatgaattttaataggttgattggaaaatttaaggacgaaaatttgaaaatcttacttattttagcatgtgagaaaatcgttttcgaaaaaaaaaaaaaagagaaatgtgatttaaatccataagatttagttaaagataagataaataattaagtattaagtagtgtaattagtagctcgattataaatggtgatgacttattatagtaattttagttttacgattaaatttctaaatatgattgttgaaaattttactctaggatggttataaacaaggccaacttaaagcagtatagagccttgagcaaaaaattaaaattaagtctgttattaaaataaaaaaaaaataatcaatcaaaatttataaattttaaaataaagcaaatgttatatttggatataatatttggattgattaaataaatattactaagttggtcacacattttaatcttgtgggggagttgttatattatttttaatta

SEQ ID NO: 266741 - DNA, 2590 bp, Cannabis indica
gttaagcaaaattagcaagagcaaagagctgactctcctcattgcgtgaagaacacccctaaaaccaccaaacccattgaactttgaatccatcggaacattctcgtttagatcacagagtgacaacaatggttaattctagtttccatcaatactctattgtcatcttccaatccaaccgttcccaaagacaaatacccaggacaaccaatacaaaatcaaaacaataacaataatttttctaaaaaaaataaatacatatataaagaagtaataattattattacctggcgagacatggcgggattgaaatgttgtggagtgttatcgagagcagagagtatgttgttggctgtggagacataggtttcgatggaggagaggccggacttgaggaggtggcaagcttcccaaaggcgagagctttcgtccatgtactcgtcgagccatttgtcgccggtgggcaagtggagcttctgaacaagaattgtgagttgggaattggctaattggagagaagagaggacttgttggaggaaattgagggacattaagttgttgttattgctggtgttgtgggattggttattgagattgttgagttcttgagtcaacagattgtaaaacccacttacagaattggtggtggtactgctcaatgaattattagcaggatgatgatccatatcatcaggaaaaaaaagagaggaaggaagaaaaagggtgatatatatataatattataattatgtgcttagagttgttgtatatatagagagagaggatgagtaattatttaaagagaggggaagacagtgaagaagtgggtgtatatttagaatttatatgggattattattagatttatatatgattattggggtataatatatatatatttatatatataattagttaggagtactagctatagctagaactcaggtttctatatggtcgtatagtatttgttgggtgcaattatgagtgtttcctttagggtggaggggatgattgggaatctgctgttctcattgttaaatgggaataatgacatattgagaaaaatacacaaaatatatatcacaactaaaattgagtttttttttctttctaaaacttttcaactattataaaacttttcaactattattctacttgtatttaattttctaagatcaaattttagtaataaaacttttcaaattactgaactgttgtgatatttatttttcaaagttaacaacaaagttttactgctaaaatttgagcttagaggatttacaagtaaaataataattagaagattacccgcaaaaaactcactaaaataacatgagtctatctcaaaatttattaggaataattgaattttttatatagaatagtaaaattttctatatatagttataaattgattaatattataacattactttaatttcaacatgtgaattttagttcgtttttcatattgtatttattattatggaatgtctgctatagagtttgattacctgtctttttattataattttagttgataacttatgattaattgggtcttatttttaagtatatattattaattttaaactctctaatatttgggttagagattctctttaatctcgtcctctcccaactaaaatttatcatgtgaaactcttatactaaactcatattaagatcccgaattcgatcatctattgtgttgaaattaagatcaaaaatttatttacctttattatatgatacgagcagtcagaatttaaattgttttaaacacaacaaattatctcaacattctcaaaatattgcaagaagttttattttatgaaaatgtattctaatttgtagtcgtatagctagttttaaaaaaacatattacaatttatatactttcatagaaagattaataattattgtaagtagtaaaatactataattaatttcttcaccctacacaactttttttttcttccggttctttatttatacaaatgaaacatgaaagtctcgaaagaatagagtttgtgtacatatatgcatataatatatgagagtaaattaatgaagaatgttgatatgttagattatgttccttagatttggcgttaaagtttgaccaacccaacttcgattgagattctacttctcgttcttccattttgattttggttccccttcggattctgtgctattgatttcatttgttttcccattaatttaaagtaattactataattataataattgtttttgttggatataattaagcttctcttctttatttatattttatttgggagaaagaatatggtgtatatggacatggaaatggaatagtaggaattattgggcataatatatatatgggttatttactttcaatgttttgaaatcttctttagggcccaacattctaattttggcattagatatttgacatataaatgaaataatataaagattaaagtttatatacacaatcacatgtaccatctcatttttcttttttctttttactaaagaatctccattttattttaattgatggctgagttgggtggaccacttatagggtaaa

SEQ ID NO: 266742 - DNA, 3606 bp, Cannabis indica
actttttcatttttacattttaaaatagtcaaccactttataaacccaaactgtaaattaaaaaaaaaaaaaaatagtatatacagtaattcctctaattaataattatgtaattgtagtgtaagttttaaacatacatactaaaatagtcacttaccggtgaataattagaaatggttttgacaaatccagtcccgccacgagaagctcgatcaaattcatcctcaacgtataaactcaatggtcccaaaccttcctgcttaccaatgaataactcaagaagagatgatgatgatgaggaatagactacttgtgaagatcacgttgcaatatataattgatcaaagaaactataaaaaaaacccaccttgaaataattgccaactggagaggcatatacaagaaaagtgtattcaggagcaggagccaaacccaagacaggaccagttccaatgagtagaggcctaacataaagagaccctttttcacaaggcggcacctgcacttatatagacgtattataagcactagtacaattttttctttttggaaatattcagctctttgtgttagcaacattacaaacgaacaactttaattacaatctttgaaaataatctccacccaatctctatctatttcactcatcttatacatatcaatattctttagcctgtgcaatctcaatatatagttggtaatttctcatctatgttcctgcttttccacacttggtagacaagagcagaaattgtagaaataaaaactttccttctccaagttgtaactttacatattttgatccagtttatcatcccaatcgtattctccattcccagccatatgcaacatctttccaaaagcaatttactataatggcaataaaaaaaataggtgctcataagtttcctccttgctcccacacaccaaacagtcagaaattggggctattccaaatctgagcaacctatcctttgtaattggcattcatttgatggccagtcaaataataaacgtgtgcttcggaacacaccatcggtcccaaaccagagaaaaatgccacttcagaggaggattggaagttaacattttgcatatacctgaaataatctattgaaagaggaatctgattgagagcaaacacctttgattctttgcttggtttggacaattctttttgttgggctatcaatccaagtcccacattaaaagaataagtaagagttgtcttaagtgttccacctactccattagtatgagatcttttaagaagtgtcaaaaaataaaatcgtaaatatctagccccaaaaccgacaatatcatattaatgtgagagtcacgctaaagtagcagccccacaaaatggaaaaacgggacctaacattatccaataccatctcgtatctagtggaacctcatagtcccatagtcctttccctttatgtataccgcattaaccaaattaaccgataagttgtccttcttttgcgagatagtccatacatgtttgccaattgctccaagatttcaaagaacgatatctttaaaactcaaaccccttatgtccttggcttgcataactcggaccaagctacaacccagccccattcgattcctcagtaccctctccactaataagctctatatatttatataattctgtgcactactgacttaggcactaataatctgagacaagtaagaattaatagttagtagcactgaatttaaaccactctccataagaaagattcctcgagctccaagtcttaattcgactaatcatcttatcaactggaaattcacaatccgctctaaatattctcttgggacttatcttcattacatgatatctaaaaggaagaatactctttttaaaaccagacattgcaacatcaatctcatatgtggtcatacttagtctatacatgtcagacttattatcatttgctttcagacgtgaagtctcagaacatgagcctttgcagctgtaaagtctcctttgcaaaaaagaagaagatcatctgcaaaacatacatgagtaagtcaaagacttttacaacgaggatagaatttgaaatcctctccagccgccacttgaaccatcatgcgagacaaatactcaaataccaatgacaaacaacatcgacaatattagatctccttgccgcaaacctcttttagaggaaagaaacccatgtaacactatatttatcatgaatgataaactaggagtagtcacacatataataataagctcaataaatcttgtaggaaaacataaagcttcaagcatatgtcttaagaaattccagtccaacatatcataagctttttttttgcaaattaattttcaccatacaagctgattttggacttctcctgtcatacctcttcaccatgacaaatcatgatattatgtgcaatttgcctgccctttatgaaactgctttgattctcagaaataatgaacgggagaacttttcttaacctgttacaaattagctagctaaccattttataaatcatagcaaacaattggtctataatctccaatagtatcaggatagacattttttggaactaaggtaatagtagttacattgatctctttaagaatattacccttatggagaaaagataacactacatcaaagacttcctgcctgacaatatcttcatgcctctttaaagaaaccactcctatatccatcaggacccgaaaccttatcaatgggaatcgaaaaaagggcattcttgacttctcccttggtataatctctagttaagaaatcggctcaccagagatgaatttcccttcttgcacaattttcctctttacatgtttcccgtttgctaaccttgttccaataataatttcatagaacccattgaaagctttaataacatccacttaagtatctacccttcttccttctttgtctcggattgagtagatcgaatttctgttgtcttctcttccttatgctacaatgaaatagcttggagttttcatcccctgccctgtcaaagctatcttagctttctgtctcaaagcattcataaggttttagtgcacatttacatagcttcttcatgcatctatctcttttgtaatcttgtcttccgttggccttatatagctgtgattccattagacaaacaatcatccacttataagcagtagcttcttgtctcttcaactccctctgcttgtgacgatctcgaagctctcttttgaaccattttatctttataacatcacgatacatcgaaaaaccagccatctttttagaccaggttgcattcaccatgtctttaaaattgtccaccttactccagtaactgaaataccgaaaagccttcctcacattattaatactagggtacacagaaattatagctggacaatggttgaagtcaccttctggggaggaaagttacttcagtcatagtgtagatgtccagctacttcgagctagctaacacccaatccaacttggcgtaaatttctagcacttcctgtttattgctctaagtaaaatacgttctattatattttatgtcgtccaaaccacacacgtacttcaacacaatattgaaaag

SEQ ID NO: 266743 - DNA, 1889 bp, Cannabis indica
tatttttgctcacatactcggactcggaccccaaccccggattctggacccgacctaaacccagaatcggacccgaatcttaaccccagactccagacccctacccgacctggacccggacctagactcggacctgaattcagactccgaactcggggctaggttcgaggtcttgtctggggtccgggtatgaggtcctgtgctgggtccgggtcggggtctggggtccggagtaggatgagttcatgatatggtatggtgtagaatattaaatttttttttaataaaaaaaaatctaaaaatagttttaaaaaatttgagtcaaacactattaaatttttaaaatgacaaaaaaccgatttctattcttattttttaaaacacaattttgaaaactgaaacgtaaaaatatagtcaaacagcctcttacaatctaaacgaagacactatactatatcgtgaacaaaactcaaaatgggacttccaaaattaaaccctagaggatactaaaccttgaaaaaaaaaatacctaagtttgttataaaatactaatttcgaaacactgagagcgtcttgataccatgttatgtgaagtgaaacaaattgtattctcttaatttttattaaaaattacatatatttaattttggctcatgcatatatctcatgtattctattatggttggaaattttgcaaccaacacaggtatgcagagtttgtggtctactaggatactacaatcacaaacttaaacaaggaatttgttcgtcatgcaaaaatggagacaatatatcaaccatgaaattgccttatgcatgcaagctcttgcttcaggtaaccacccatttctcttgaatgaggaaaagtatattatcatcactagtaattgagttcattacaacactttgctttccattttaaagtggttcaatagtgatgaaaatatgacatttagctacgtatcgtaaaatgaataacttgcatagttttcttttgtcactttgacacttggataaaactaaaagttttgtttaaagagaaaaggaacaggttgtttgtttatgtatttattttaatatatgatcctttgactttgctttcaggaacttcaatctatgaacattgttcctcgcttaaactagcggaggcatgatctcacaactgtttccatcaacgagctcacaaacacagaaggatagttcatctccaatattaggttattttataaattattgaagaaagttgtatcaagttcttattcccttcaaaagcttatttttgttaattatctgatgaggccaaaaacaattgttttatgtacagtgaaatcagttttgataaacaattttacacaaaaacagtaaaatatatttataaaaatagacaaaaaacagagagttgaaattaggctatgttatgaaatattatttatggatgaccaaatcactaaattaattatcattattaatgctcggtagtattttttttattattatattaatttagtttctcatttttttagtcatattctttttttgtataattaagggttcaccctattggaataaacaattgagaaattctcattcagtttctctttctctcttcatcttcttcttcttttcttcatatctactttatataattctatattattttataacacgttatcaacacgagtctttgcccaagcttcaaggtaaatattttgttggagttcttaagttgtttcaagatcacgatacactaaatatatatttatatatataatatttatatatctactcatttgatttaaataattttaagaatcattttttttttatctatatatctatatattatatatgtgtatatatttttatatgtttattattgaattcatata

SEQ ID NO: 266744 - DNA, 1268 bp, Cannabis indica
tatatttgtaaaggttgatatgtatgatcttttcaaattatgtggaaattaatccgaaaataatgcccacataattagaggcaatataacgtactggttgctttgtacgtacgcaactataagtggatataaaagatatctacttgtatgaaagttttctgctttaaatgtacgctgggagcagagatgaagtttcaagattcagctctcaataggtaagtatattgctgctgctaattcttcttcttttcttcttgaaattaatagtaattttctgcatattaaaatattgataaagataacattccttcacgattctttaacctgaaattaagttcattattaattttttccacagtaaaaatgtaatgaagaaacaagattagtcttggagattatggagtaattaagatggtgtggaaattggattcgaagacacttattgcgacacagaagacacttaatttgctctgttttgtgacgcaataagtgtctcccaatccaattttgcatagccttcttaagtaaccctgattatgagacagaggatcaacatcaacaattcacagggtgatgatgtctatgctgaagtcccaaaggtacattctatttatttagttaactagtaaataaaactatagcccccactaataaaaaattaaacataaattttttagtttgataactatggactaaaatagtaaaaaagccccataaaattaaataaataattataatataggtataaatattttttatgataaataagcccccctaaaaattttagttttgctcataataataataattgaacttatgtattaatttattttataaatatataattaatttattttataattatatttaatattatttataatgttaacttctaattaattaatattattatagtaactaccaaataaaaaataataacaaaaaatcatatataatatatagagatttgtaagtgtatatatttaaacacacattatatatggtaaaatatatggttacttaatagtactcaaataatacctattttttttttttaatttatattgtagtaaacattacatattacatatttattaaatatggaaatattaaaagaaatattgtaatatataataagaattcacacataataatgtgtatggtcttaatgggtattactcatgtatggatattttattcttaaccattagatcaaatatctaatggttgatatttataatcattaattaaatattaaaaaattaata

SEQ ID NO: 266745 - DNA, 2669 bp, Cannabis indica
caagttatttttttttatttatttttcaaattaatcacaaccatttaatagtaatccaatggcttaaaaaatgtaactatgatggttacaataaaaatataactattgaaacctcttccaattcagtatagatatactagatagatgttacgtgtcaagtcacgtatgttaattttattttagtttttagttgtttttaatatcataattttaaaattaataatattcaatgatatagtgataatcattgaaatttgaaagtataatagtgatttaaataaaaataaaattactattatactttgtaatagtaattaaaaaaaaattattattcgtcctaaatttatcttcgaaattaatgaaaatgctcatctagttaaactatcaaaacatttagatttaatttaaaataatatttaaaatttaactaattctaaatatcaaaatttaaaaataatttttaataaaagaataaacaatatgaacaaatttattattaattgtaaaactttaggtggattaattatatttagatttaactaactacatttttaaaaaaaaatcacctaataatttctcacataaaccaaaaattatgttatatagccacattttatataaaatagatatatatgctttccttcgagagtgatgctaacccaagttttgatttgaattatattaaaagatggggtcatgaaaaaatttatattataactaacttataaaattgaagtagtatagttggatttggcttttaaaattacaactttttagaagttattcacatggtttatggtcaacctattattaagagaattaattagcagcctattgaattatggaatattgctattgagtattattaatacttagcacaatttatagctgcaaccttactattgattagcgatatttcttaaaaattatttttttaagttatatggaatacgtacttaattacactaataacattataatagtgagaaaaaaaaatattactcaccaataatatcttttaatagttttcttaattaaaagattaattatatataaaacccacaaatttaccaaaagtcaaatttgaaggcaattaatgttctttttccaccatcctgaatctctgtatctctaccctatgataattattgtttggtttatgaattattaaaaaatgatcaaaagtgatttttatggatttagaagattagtttctaattattttgaaacacttgtttacaactatatataaatatacatatatatatatatccatatatatatatagcaaaatgtgagtaattaaattggtccccaataggtactcacgttttatgaaagagagaagagtcacacaaacatttacttgaacaccgtacgcacgctgctgtccaatgacctgagctagttggtgtgattggaattatttttgagcaatagtatttcttttgactgcttgcatattcttaggggtgtcgcaaatattttaaagagagtgtgataatctacgatttaactcataaatttcattcgataatattattctccttttatttttaatagaagtattgacaacaattacttttttaaaaaaaaaatcgaaatcatgttgaagatgatatctgtgatgaaagtgagtggtgtgactatataataataaaaaaagatataatttattatagtgagttgtgtcatgtgtataatttaaaatcagctaatggttttttgtaacatttgtggaaattagtactatggaaaaaggtcaaattaaattaacatgtagcaatacgcgttagtcaaacaaaatagcttatgtgtgtttcaaacttttttcactactttgaaggtcaaagtttgttgccttttctttccttacttgctcttgtgccaaacttgacaaaatatcataattctataactgaagacattatatggtgatattgttcaagttggtgattaaagtactaattgtttttgttaatggaaataggaatgagttcaataagaaagaacaaaaaaacgtcgacaataatatacgtttacaagattattcatagaaaagataaaattaaaaaaacctagtttgtatccctctccaaaaaaaaaatatatatatatatatatatttataaaacacttttcaatacctcttatccatcaatgattactatacaaaaaataactgatccactaaaaataactatttatttatctttatatttatataaagaaaagtcatgaaagggtgacatgagagcaatatttcattattttttttatatatttatgttatattaaatatgactgagaaagttattttttttatttttagctaattagtaatttttccttaaattttgacatgtactaaattgtgccccttgaacttttttggccgttaaaaatttcctccaaactattgagattgttaaatttaaggacttttgtctaatttcattcaattgtactatttcagtgattgtttatgtactaaaccatgctcaactttgacatgtttgaaaatattctattaaaagttaatatttgaaaaaatatcaacttaaaaaatatctaaagaatcttaataaccaattcctaaaattcctcaacttaattttgaaatttgaaattcaaaagatattcagatttaagttgatcagttagagaaa

SEQ ID NO: 266746 - DNA, 3045 bp, Cannabis indica
aaaactttcttcaaatgtattgtcaatcacagtctccaggtggtacctcctcttaaagttacattgttcatccatagtagtagcaccattcttatccacaacagcagcaccagtctcatcaacatcagcaacaccagcctcgtacatagcagtagcaccagcaccagtctcctccataaaaccaaaatcaattcgtaatggaactcctttgcagtctcgtccgctctctttaaactttattgactttaggttatttggtgggcttgagagttcttcacagcaacaatagtttgttactataccaatactcaactaagctcaattgggagaactaacacttgggttttcatcagatcaactatatgttccttctgcatcacggccatcacccaaccttaataatacaaatcaagattagtttctccgagaccttaacaataattttatgtaataattaagttaataatattaaataaattaattcattatatattaactctagtgatttggtgtagtagttaatttaagacattgtgaaaataatgaatattttatttacttctagtaattttatgtagtagttaatttatgaaattataaagataatgaatattaatttttttttgtagttaatttaaaatattataatttgttgaaatatatttaatttaatattatttttgaatgaattaatttttatatattaaactatataattttattattttaaaatattacgaataatcttttaatttgttacaaatctaacaattagcggcagaacacgccgctaatgatgtgtgccagtttcgtattttgagactagccaaaaaaattagcggtggtgccactattaattattattagaagcagttagaaatccataagtaataatagttattagcggtaggacattaacggcaggactgcattgctaacaaattttaatcacaaaatacaaggttattagcggcggccccctccatcgctaataccctttaatggtgccaatggggcccactatctatagtatgtgtctatcactattcttacacagtgattgacacaattttgtaataacatcacaaaatgatgtcttgtcatgatcataattttttattttccaaatttatttaaattataaatttaaattaattatttattacaaaaataaatatttattatttttctacttcaaaatagaattttcttcttctctttattttgtaccatttatacctttaacagtgttatatagtggcaattcgagaaaaatgaacctataataccaagctctaataaattagtttatttattgaatctcatcaatcaaataatcttatttatcaattccattattattccactataaatatagaattatactcttagtaattatataattatatttattgagtttaactacaacgttcatcgatataatcaatattagtggttagccctccatgtattgatccataatttaaattggtcaaattataattttaacattttaattacccctttattttttagtaccattaattcactagagaaaatataattttgatttgatctaaatttgtgcacaactttcagtttctgcatttatatttaaaagaaatcgatatttgatctattaggaaagtttggattacatattgtaaatcaagttcccatccattcacattattagattcccaaaatagaagttataagaattatctgctttgagatattttaactagtgaatcaaagaactaataacatgaacaagatttcatgatttctcaagatttaggctgatatagtaattgatcattgttgtaatataaattaagtctttatagtaaacggctagtttgataagaacatcttaaatatatattagtcatgtcatatataatctctattacatgcagcacattcactaagatgtatctacatcatcgatccaaaagattccataactttaatatattgctaactattttattcatagctcgtgatcttagttcttcatgtaatacaaagccacaacctcatacataaataaagacttttttgatatttatataaaattattaataaataattaaacattcaaatatatatcaaattattcaacttatttgataatcaaaatgtttattataagaataaaacctaacaaaaatatgtattaacccatttattgggtctggaccaatctgacctaaagtacatggctacttataaatagaattattacgtcaccaagcgaagagtcgaattctaagctttcatagggccaaaattttacaaaatgacaaattccattggcattcaagctcagagctcaataatattgacttgttgattaaaactttttaacaccctaagtacgtaaaaaaatacttgtctcagattgtctattttttttttcaagctctaaatcatctttatttttagtttttgaaaaactcgttaaacatacacaattaaaataagaaaatttataataatatatacattatataattttatttcaatatatctgcataataacttagtttttatataattatatattttatttattataaaaaaatattttcaatttatcatataatatatatgttaagtattgtagcggcggcagccatggaggctccaattccaggaggagtaggagtgatgttcagatcaggcttattccttatttcagcatcaataaccctttcagcatcttctctcgtcacacatttatccttctctagcttctcactagcatcctatgatgtgtaattatcagaaaattttcaccacacaaataactaaaaaaaaattagtacgttaaggtcttgtctattgacatggtttgtttttctctctgttaagttttgtgtgttttgttaagctttgttgggtttcgtattttgcgactatggcgacgttcaatcatgcacgttcaaacatggaggaccagtatgcttcgataactctggaagaagaggaaacggggggtctacagtatggggtgaatgatgatgatctctctgagat

SEQ ID NO: 266747 - DNA, 3128 bp, Cannabis indica
tcaggcgtcggtggtcctttatttttgttttgagcatttgtgtgtgcctgagagctaaggacgtattgaccctattgaccagtcatcctattatttattggtatggctaaggacatatcatccatgtgggatattcatcctcttatttgcttataacttttgttcaagaagtgtcattcttgtttttatgcatagtaagatttttcaagcatctcttcaagatcatttttggctagttgactcaagttgttctaggcttatttccatgaggtggttctggtgcttcttgctgttactctcttggactacaagagtagtcaattcttacattcttgaagagtattttttttttgtatgcgaggtagttacttaacttgtactttttattgttcctctattttatttactttggaaatttgaaatgccaagtatagaaaacaagttaaatgggcaggtgtagaatgacaaacatcagataaatgatgaacattcaacacttcattgataaaaataatctcataagtatcgagtacccttgccactactagaggtcatatttatatgccctctttaatttaatgccacacgttaaaggaaaatagagtcattacttttacataaggccaaatacagagtcttatttggtcgttcaagctaaataagatagtttgaccacaataaatcttcttagatacttgatatctatgggtggaggggtgaaggtgccacttgagtatatttgctcacaagcattaaggtgtattgaataacaaacccagtaaggatatgatgagttttttaaggagtattcactcatacttttctttaatcatgcatttccttcttctacatggatatacttcttttttctatcatagaagtcatctagataaatcaattctctctttagcatgttctcccataacctgccattggggagaactcctacagctatggcaatcttgagttcatgtttagaaaccttcctgaccttggtagctttagcattgaagcattgaatgtagcttcgcaagattttttgttagctttgcctcacattagtgatacttgcgatggacatgatatagtcatatgttgcttgatgttgtcggagaaactcttccaaaagttgcttccacaatgcgatattccctaataatagcctcttgaaccatttatgcagctcctttcaacgtgaccaggaagcattggcatctagccttactgagaactttcttcatcttcatcagcacattaaaagtaccacggtggtacttcagattggttgtgccatcgtatagtttcatttgtggctccttgaagttgggtggaagtggttctgcatgtatcttgtttgaaactcatcatcatccaagtctcccttcgagggagcaactatcttttgtcataggtcgtatatcttcgcttttatctcattgatccttttgctccccttcccttaggggttaacgaatggaactgagatcctcgttggggttggaatgggggctacatgtacttctctcatcttattaatgtgtgacttctcaccaacattgacttacatttgcctcccacttaagagaaagccataagcgaggttccctctagcataaaacctcttggatgaagttcctccttacaaccatggggtgttcccaccaacccgttcctctaagggagggtcagcttgggatatcttagcagacctgtagggtgcccatttagtgatatgtctttctttcgccgacctcgcgggtaaccaccagtagagaatattgtattccgctcattaacatgcatggttgattgccttctctattatcattttctgttggcgaggcataagtttttcctttaagtatgctattcaacaccattttcatgcccgtcaccatggtttctaacctctagttcttcaaacgaaggtgtttatcgcctatttataacagtgggtttgaaaactttgatttgctaaatgcacttatgcattctttctaaacttaaactttaaatgattgatgttgagacatttatggctaggtggaatgagacatcgcgaggatgatggaggccctgggtggtgccttactttagaaatatcattaccccaccctaaatcatcccgtttattactagaaatggaaacatccagaatattatcaatgacattatcattaaaatagtacggaagcttatcaatatcctaagaaccagaaggagtaatgaaagaaagacaaagtatgcgatgggttgaatgcaacaaggagtaggatttaaatctaaaactaggaagtcaatgatcatccaaaatgttaatatcattaccagtccacactttccttataagacctctttttaaaaaattttatgccccataaaatgtttctttaggagaaaggactatggccattggtagcatcaaaaattgaagagttaggaaaatatcgaactttaagtgttaagctgagtaaagatttcaaacaattaaagattctcttaacttgtttgcaagcataacttgattaaagatgactatggatatgaaccctaatcctcccacgtatttagattgacaaatggttcttcaattttttcaataaacttttcgagtatcaaacgaggacccccaccaaaatctagacgtaatagattcaatttctttgcaaaatcctggtgggcaaaggaaaataaatcatcgcataagaatgaatagcttgaagaacaactttgatcgaaatttctttactagccaagaaacatttatgatgcaatgaatggatgatggacattgggtaaaagcgtgatacttagacctagagagacattgggtagaccaaggtatttggttatgaaaggcatattttcaagatcaaaggtacgaaaaaaatagatctcgaatattatcctgagtattaggagaaaatgaaataaaagacttaataaaattaataacttgaccaaaagctttaaaataagtacggagagtactgttcaaaacttcacaagagttatgatcagcaaaacaaaaaagtatcctatcatttgcaagaaagagatgaaaaatagggggagcaaacactccctcctcctaaaaccccctcctttcatacaattgtttactaaat

SEQ ID NO: 266748 - DNA, 3236 bp, Cannabis indica
ataccaatacggtatgacactaaggagagtgttaggcaccagtgtgtcttttagcaattctcttaaaatgatcatatgatcttcagcacaattggttttgacatgttaaatatcacgatattcctcaaaagaacagatttgagatataacttttacctgacaagatagtgtatgtgcaaccgaggttatgaaaatggtatgagctttcggccaatgagcacattgaagaaagtgtaccagggctttagagagatccccaatataattgtaataaactgcctgcattttgtagaataagacagttgagccattagatagtcaaggaaagaacattaacattccagccatattttgacaagatatttatgaattccatcttcaactatagaagacgactttaaacaaaattcatacgattgttattgatacatgaacaagatgacattatgtaaaacaagaaaccatgacaaatgaaaaattcttaccagtgcttcgtgcagccatgcaactggaacgcctaaattttctataaattgacgttgactttcttgagtactccacgattcacagtattggaacaagatctcccgaattaaattagcttgaagataaggaaaatcttcacgataaggcatatggagaaccacatagatggcccaatggcatttgcctaaacacaagagttgagaaataagtgccacgtcaagaacatgaagatcatcagaactgatgacaccaattgcttccaacacagcacgctgatgccatatcatgtgataatcaagtgggtcgtgtgttgaagagaaggcactgaacatattcttcaaaaattcaggttgtgtttcatcacttgcatgaagaagcataagatagtatgagatgtcaaaacgctccttcgatttccaatttacagcctcctcttcaaatccttcatcgacataaactggaacaggagatggagcttttccatcctcaagaagatgttgataagtgtgaaagacaacaggcagtgaagcatgaggaggtagtttataccacattaataaacctagaaaccgcttccagtcaatgtcaatgttgtacaaagagccatgaatgtcaccagaaagcaactcataaagccttatcctatccttctcaatgaaattaaaatccagcccattgattttccaaaggtcaagctgccttgcaacatcagaacgattcaccatggaaccaccagcctgacttaataaacaagcaagtcttacatcacttttaccaacggccagttccacggcagtatccaactgcctcccagtaaggagtaaaaatatatgttgaagataatcagtctcatttagggaacttatgtcatcttgtacatgaccacaaacactttcttgcagccaataactgaactctgcccttctgattagagggagtgcttcaagatcaacatcaagagaagcttcctttgcatcctggtcctgcatcatatcttcttcattgtctgtgctcgaaggtttcatttctctattattctctctttcagaaaaaaggacttttatcaactcccataccattatttggtgcatcaaaccagagcgggcagaagatgacaacccaggtacttctagctgtttctgaataatctcagcatagcttctacaaatctctgaaagctgtaattgattagagacaagtttttgaagcttcaatttaaaagacccaaattctttttcttttgtatcgtgatttatttctttgtggagatttagaagagaatcaaatgcaaaatccactagttcctctctcactttctttttctcatctctaaccactttgtcaatggcaatcttctccaagtggatcacagaagacaaccccttctgagaatcactaccacaaaccggtttaccagcatgaatgagtgttccatttggaccccacgctaccccaaatgacctacccatgaacaaacccgcatcaactacacactgagtatggcttctagttactggtgtttcatgcttgaggtccagctgaaaaccttctggttttaatttcttgagaggtgtagttttaatttgttgggccatcaaaatggtaccaggagagttcgaatcaaaactaccatgcttgtactcaagcaatgccaatggagttttgcgggcaactagtggagtagctctatgattcatcggtgtcaaattctgcagaggtggtttgacagattctttattaaaggatgatttctgatgactaggaaattgttcgaaatcatcactctcctcttcctcatcacggaacatcaacattctcaattcgttcatctttattgggtcaagcccaagatgagtaggaagagaatgagaaagcaagtttccagaattatcaaattgtggttgttcatcaatgtcagagatctcctcaccaatcatcgctgttggctcttgaactgcaggagcatcatccattaccatatcgtcttcatcatcctcgcttaatccgaacctactaaaatgctgaaccaagaatttccattcaccattagcggagtcaaatgatacaaactgagcctcctgtctctgggcactctgccttaatttacccaccacactttctttctgatcctcctcaatagttgaggatgttaattttagcaccaaagtcacctcagcagtcttgttaaggccctgaccaaccaaaggcttggtactttcatcttcatatacaactacctcgtgcctatggaaggttacaatatcgtctagattcagccacctaacatcagtttctccaatatacttgactgaaccaaaaccatatcttccaactgtgaaatctggaactcggctagaataaccaggatccatcaattccctcgagaccaactcatcaaagcatggctccatataatactcaggcttctgtagagtaggtagaagagtttcaatctctctcattctcttttggactacatcttgtgagctagaaatttctgcagcaaaatccatagcacaggaagtactgactgtactccttctaccatcaagttcaacagaggcccctagcaaaaattataaatgaattatatgacaaaatatatatatatgttcatattcaaaatacagtttacaacacggaaacatacttgtaattcatcagaatctgccatatgaaaccaagaaaagagaaacacacatcgaaagttcattttactagcgattaatccaaattatagaattaaaaaa

SEQ ID NO: 266749 - DNA, 2072 bp, Cannabis indica
  modified_base (7)..(7): a, c, t, g, unknown or other
ccccccnccccccccccggggcgcttgaaaggtggtcttttgggattttttctaaaaataaaggtttattcttttttgtcaaaaataatatacttaagttttattttataattattattaatataaaaagtatagttaaaatccaatttaatttacttaatggttctctttttgaaaaaaatgtaaaaaatatatattaaattaggaatttcaaaataaacaatatacattatattttacttaatatattttacaaaattaattaaattatacatcataaatcttggtcgtgacaaatactagtatcataataaatatgagatagaatagactgatgtctagagactctttctgttaccaaacaaatttttagaccttaatatgcattaataatgaagccattatttttcacatgtggggaaaatatcatataaatttgggtgaacaattaatgcaggacaacttttttctttttaacattgagtagaatttgtggctatatttgtttggtactgaatttgtaatactttgttttgtatttttgttttcattttgttttattttattacttgacattattattgttttagttattttagttgtattaaacatttaaggatgatatttttatggggtattaacttatataaaaggtgatatttagtttttagatatattttttttcttcataattttaagttaatattacaaattatgtgtgtaattggatatcactaagaaccttgaattttgaggtctcattgaattatatcaaatgatgattttttaaatccaattattaattggattagatcgaactaggagaaaaatatttgattggatcggatgcccaatcctaattaatacatctttccaaataaaatcaaatactcttgtttaatattcttaagcatattatgatcagtcctatatttaacttttcttttcacaatctgtacaattgaattcttcattgccattttttgattctagaaaacttcattacgattcctccaaagagcatacaccaaacccaccactgttgcaatccacagttgtcttcgaaacctcgttctcgacttctcaatttttctaaaaagcataaaaaaaaaatcagcaccttacaccctccaatccaaccagtggttcagatcttcaagacaattggtactcaggcaaacagtcaaagaacaagtgatcaattttctcacgagcaacaatttttgtattgactaatgctatatttaaagagtctctattttgtatgcaatctattaaacacaatcaaccaagcaataaaaatatgtttaggaatattcaacctactccaaataacctcctgcaatcttaatctttcgtgagaagagattaacactttgtatccttgagctaattagtatgtgtcattagatgatggaagttgttatcctagtttttgcaccacgatgtgacaatagaattggatgacatgtgtcccatatttctggtacctgaaggaggaagatatccctagtagtccataaatgactaaccagtatctgcaatagtcaggtatccgagcagaaatgtggagaagatatccgacaaggtacgaacatgtttataccgagcaacatacaagagatggaaactttagagactaattttgttatccgctgacacgaagataatccgtataatcgtgggattgagtcagaggaaaatggcaaaattttatatttcgtatattgtaattatagaatcattgtaatttcctattttatgcattgtaagcaaaaaagaaaccatccctcatgtaataagtccttataaatagtgacctagcctcactaggaatgagatcgaaagaattgctgcagaaatatactctagagagaaaagagagatctaagagagaaattactcagagatcagttgtaagaactttcaagaagaagaacactctattccttctctcaagtcaatacaatacaaggggagtaggctattaccacacttatggggccgaacctctttaaaatatggtgttcattttaccttattgcttttactttcttttaattacattactt

SEQ ID NO: 266750 - DNA, 1360 bp, Cannabis indica
tttcattacctctaaccaaacgccatctaagaggcagaggaagtgagagcatatggggttatttgtgcccctttctcaattttttataatataaattttagaatatttttacattttgatgctataattttttttttatttatttatgttcttacatattttatatttttctcggtttctcaaggtacatgtgttaccatcaaaatgcaggatttagtgatgaggtgtcttcaccttggtggatatagtaatgttcaaagagcgaatcaacttaagggtgtcctggccccaagatgatcctcatacgctaaaccttcttaagaagatgctcccgacatctcaacaaggaagcaaagtgcagaacgaggaacgtctcgactgggacctcgctcaagaagcaacaaaaggaaaggaaacattgtcttgtatggttttggcacttcttctcagacgtgattcccaccaaaaaggccagaagacttacacgcaacattttcttgcgtcagaagagtaatgtagacttgtcccttccgtacatactataaaggttggaccttattgcctaaaggtatgacctttacaaagagagtattaaacattaagatatgcacacccactcctctatctgacattcccttttaccaacacgaaaagttacggctagcaactgcacttgtcatgtcaacataggacaagtcacatcaacatcatctaccactttaattgggcttccccattgggcccaacagtttcaaatgtcgttgttaagtattgtaatcagtcacattaaaggctaattatatttaattagcttattaattaaataggcttttgctattaaggcctaagggtgtccttgccaataaatagagcaacacctgcattatgagagaacactgctaaaattgtgagagaattgttattcttgtgctcatacaacatcccccaatcgtttgaaattatacatatcaaatcgttttatttttgcattaattttacaaactaaacaaattaatatgtaaaacaacctagaattatgtttctaattgatttgcaataacagaggttcaagtaaacatacttactattaacgcaaattttcgttaactaaatttgagcctcacaatattgatttcacacagaaaaaataaaagctataaaaatagaaatatgaacacaaggttttttacgtggttttgcagttaaaattctacacagtccacgagtcaatcttattcagatttttgagtatttttcagggcctctttcgtatgagttttttcgccccttttttgctcttgtttgtcactatttataattacatagtggacaattatttacaaagttgactggaatatgt

SEQ ID NO: 266751 - DNA, 2312 bp, Cannabis indica
actaaaatgtatatatattttttcttctaagtgccctacctcgcttctatgtggatcgctcctatttaatctgtaaaaagtttatcaaaaatttagagcatgtttagtattattttttgttttttgttttaagtatgtttagaaatgagaataaaaaattatttttgaagttttcaaaacacaagtcccatttggttagcgttttttaaaaacaatattgatcaaaagtgaattgttttttaaaatagaaaacaacattttgttgttttcaaaattttattttttgtaaatttgttttctaaaaactatttttaaaaataattttttagttatgatgtcagataatgcaggtaattttctctcttatctaactaaccaatgcaggtaattttctcttttatctaactaaccgaggcacacaggaatgaatgggacaattcaagaattttatgaaaaaaatgtaacagatatcttacctcccataaaaaaaaataacaaaaaaagaaaacatcgaaagttatacgagttgaagaaaaaagcttctaatttcagttgactaaatcttgtctttaattaaattcctacaccgttttcatcattaaaaaaaaaatctgaaattaggatatctttctctccaaaaaaaaaagtaaataaataaattattatatttagtccaattattcgctttttaaaccagcaggtgattttaatttgggagctaaactacaggctaaaggaatgatgatacacctattgttttgttttgtaatttatatggactgttgtttatctatttattacatatactttaaccagaatcgcttatgaaaaattactagtgtagtggttgcccacgtaaaatttcttatgaataacaatcatccagggacaccataccatggaatatatataaacttttccagttttgcttgtgaattaatggtggatttcaatcccggtaggacttatttaatcaatttatattataagccaacttattaggtgcctgactaaagactttttcagttttgtctacttttatataattgaatttaaaaaatataaaaatagatatgagaccaacagcgctcgtcgaaaatccaaaccagttatattgaaacgaacaacatcccttttttcttccatagaaaagaaaaatgaaaatcccattaattaatatggccgattgtctggtattatattaggctcagccgccacatgaattcatatatacacaagagactagcccaccgaataacatgtataagtatcagattttcacgaactaagctacttactaagtttttctttcgtcttcgttgataatataatcttctcctacactactcagcaatccacatatcatttgatattttcttttaatttggtccaaaaatattaagatggaatatttatttgatgatgatgaacccataatagaacgacgtttagagagtaaaaagagtataggagttggaacaattaggccttcttcttcttcttctccttctcctaataatgataaaaaatcttatggtggtctttgtaatagtcgttcggagtcattccggacattggaaatgggtgtacccaagtctgaagctgcagaagtgagattagcttggattcgttctcagatcattgggggcaattatgaagtggaatatgattctccttttggcaaacgaaccattgtttatgcagatcacaccgcttctggccgatctcttctctacattgaaaacttcatcatcaataatgttcttcctttctatggtacgtacgcactcaatccaccccaccccttccactactaactacctcttcttttatatatttacaattacattgttattaggcatcttaaattcttaatcacaaaagagcgatatattttgtatttcttactaaattaatattaatatatatatatgacactttgttaatggtttgaacacttgtattatgtataattgtatattatatgtctaactagctcatccactatataatatgttaatatatatgtaccatacgtgtgtagggaacacacacacgtgcgacagtcacgtgggtctccgaacgacaaaaatggttcatgaagcagggaactacgtgaaaaaatgtttgggaggtggagaagaggatgccctcttgttttgtgggtcaggtaccactgccgccataaagagactccaagaggttatggggcttacagtgccatccatacttagagaaagagtgatgaagagtctaaccaatgaagagaaatgggttgtttttgttggaccttttgagcaccattccaacct

SEQ ID NO: 266752 - DNA, 1062 bp, Cannabis indica
aaggagtcccatcagtgttatttcgaagtaaaaccagatttcccacatctaaaagtttagccatgaaactatttgcgtggtggaccgaagcattggctgtccaaaaaacagagcttctgcttttgttagcatggataacaaggcctccgtggccgtcgatggacaaaactcccgaggtatcactgagaggactgtccctgttagcgacccaaacgacggttttttcagggatcttgtagtaccatactccgatgtagcggtttcgggtgtttgccgggctgaaaaacccgagagcaaaagtcttactggctgaaatcaaaatgtcaccgtctttgaggggctgtttgggtgtaatggcagtgagagaaaagcaagaagaggaaggcagcagagctagtaaaagcaatgtaattagccataacggttctgaagaaaccatggcgcttgtggactgtgtaggataaggataatgatgagttcatgttaatattgacagaatacggtgttgggagtttgataatgaactctctcgagatcgacctagctggtagttgaggctttaattgtgttagtttggggtaaagttcttaaaagtagcaaagaattaattacattcagtgctgcttaatttctatattttgatcaaatttataaaaaatcaaaattaacactgatttaatcataattattttagagaattgttaaaaatagggtgagcacaaaactagcattatttgtactgcaccgtacgtctggttaatattattagtgatgcagttatgattaaaattcttactatcattaggcggtatagttaaactaaacaaatattaaaaaccgcaattgttacccatcatatatataatattaatattttgaatattatcataaatttagaaaatttgttttatataaaatagaaatttttacatgaaaaatccattttgtacaatttattacctaaatacctctacacgcccatgtctacatttttacttacaaagttggttttattacaaccacttagtcatcatttcatccatcatcaatcaaatcctactc

SEQ ID NO: 266753 - DNA, 1031 bp, Cannabis indica
gccatatgtcaatgattatacatcaaagaattaagtaagtccagataaaaagcaaacaagaagcaagagatagcaacaaaaatttttccccattgacaaaaactgaaatccacaactaccaatcatgagacctatgataactttaaagcaattgaccactgttaaattattcctccatggtaccaatataacattgtaaaaaaattgcagtgccaagcaactccaaacacaacagtcaactgtgactgccccaagtactaaagttcatcctttttaagttgtgagttcacaaatgaactatataccatcacacatgaactgcaaacatacataacggttcaaatcaactttgatcacaggcttgtcctaaaacacgctttgaggcacgttactttcatgtacattaatagtatcttaccttgagtgatggaaatctatggagtatctgtgatttccgtctaagtgaagcagtaccaatcacgctcccttctgggagctctgcaagtgaggcagcactcaacgagataaacgcatcacgaacatcttcacgaggaagattgcacgggagaattgtcttttctggcaagtaggttggaacatctttcattgaatggacagcaatgtcgatgtcgctatttattagtgcctcatcaatttctttagtgaataatccctttccacctatgtcagcaaggggttgagttagtattttatcacctgttgtttttataattacaatctcaatagctccttcttcagctagctccgcatgttttgccatgagtttatctctagtctcgtaagcttgggcaagtgctagtgggctatcctatatccagatacaatattagtaactcaccaataaatgtttaactaaaaaaaaaaacactgcaaacaaaacttagagagtataaaatcacaagcaataagtacataatataatcagaggacattaaaatattaaggtataaagcaatagttccactaaatgcttcaaccatgtttcttctacttgaaaagtggaaactctc

SEQ ID NO: 266754 - DNA, 5127 bp, Cannabis indica
atttgttgagaacatacacaaaataagggcttgagagagaaagagagcattattggttaatcggagtagagtggatgatagttgactaagagtagggccgacctaagcatgaggtagcttgggacattatattaaaaaacccatttttttttttatcatctcattatatatataatataataaatattattttgataatgtatacataataaatgttcataacatcgaacattcatttaaaaaaaaaaaaaaaaatctgataaaaatttgttgtcataatacatatgattttaaaggtcaaattttaataagaaaaataatatgagaaggggaaacaagctctgctagggcacatatttgcgattttggcaattgaggccttcttctccccagcgtaagctagtgccatggtcgggagggggagaccttgtaagggttcaaaaccatttgtaaagaaatcgaaaggacctcgtttgcctctcaaagaagcgaaggtttgtacagaagctctaaactatgattccatggaattctctgaagctgacatagacgatgaattgacgatgctggatgacgtgttggacagaaagaaacaagaggaaggtttggagatggaacttaaaaagcaatcaattcgtaaggatttcgctgactgtatgactatcttgaaacatgggaaagaagctagatctagtaatctttattctcctttacctgctttgagatttgatgggcctgttatgggtgaatgtgggaatgctaatggagtgaaaatcaaaattgagagaggatattgaggaggaggtgagctattgggctgtttccttagttgctatattcttggagcgaatctccctttatctgtaatggagggtttttgtaggagagtggaaaaataggagtattgataagattggattactacaacatggtgtcttcttgattaggttcaattcagaggaacaaagagatggagtgcttgatgggagttacctattttttgatagaaaaccagtgatcatgaaaccatagttagaacagtgcaattatcagagagaattagccaaaattccaatataaatttaggtccataaactccatttgaaatattggggtaataacacaatggctaagatactaagctcccttgggaaaatagtgcaggaagacacaactactaggaatagagataaattactctatgctcgagttttgattgaagtgaatgttgatcaggagttcccaaattacatagaattcttcaatgagaataacgaacttaacaaaattgagatactctatgaacggaaacaaactttttgcttgaagtctaaagtttatgggcacctccaagaatattgtaagaaagtggatccaccaaaatatgtctgaatgcttaaggccagatttgttctaaaagctaaagtgatcttagagaataaaggagaagagtttcaacttgtggtgaaatctcagaaagttaggaatcttaattaagttactaatacctctgtggaaaattcattccaagctttggaggaattaaatgaaggggaatttcaagtgggacaagtttggtgtgttttaggggccattaatgatggaggggagttcctccagcccctaatggatagaattttaacatggaatgtcagggggatcaataacagcccagagcaataagaagtttgaagatttttttcaaagtaaaagtgcgaggttagttggtctccttgagacaaaggttaagtctagtagtttgagaaacttatacattaatgtgttctcaggttggtgtataacgacaaatttattctatctcctaatggtaggataattctagcttggaaagaaaattgttttacagaggacattataaaagttacaagctaaataatccattgtcgggttactccaacacggggggaaagcttttgggaaacctttgtttatgcttacaatgaggctttagggtgagaagatttgtggcaagatttgaggatcttggaaggaaatataaagatccgtggatcattttaagggattttaatgcagttggggaatcagaagaaagaatcagcttgaaaggagctaccaaggattacaaagtcctaagtcggctctttaaatattgtaaattagaggatttgaatataatggtaagtttcatacttggaataacaaacaagatggtgttgctagaatttatgtaaagccttataagattttggcaaaccaaagttgattggataagtacattaatgctgaagttactttttatccagaggtggactgtgatcacaacccaagtgtgcttacagtttatccgattatgcaaggagggaaaagcctgtcaggttttctaatttgtggtgtaagcatgctgatttcttaagaagagttgaagtgatttaaaatgaacaaattagactccaatgttcattatggtgcaaaaattaaagaaagtcaaaaagatgttgaagggctttaataagatagagtatggagatctctcaactactcatagtgaaactttacaggaagtcttgagataccaagaagagttaaataaagatccatttaacctagagcttatagagagggaaaaagaggctcagaacaaacaacaacttactgtaaagaacctcatgtctatgctttcccaaaaagcaaaaataatttgggccaaagatggtgatgataacaccaaattattccacagaagctttaaacaaaaatgggagcaatgcaagatttatgcttatccaaacagattaaggggattgggtggaagattcagctaaggtaactagtaattttgttgatttttattcaggtttacttggggaagaaatgaaaagaagaaggaaaggaaatgtgaaaattgtttgagaagggcctgtggtcactaaagctcaaattgactatcttttaagaccttatacttgtgaagaagcaaagcaagctttattctctattttaagttcaaaagctccgggtcctgacgggtttaacggtgtatttttttttaaaaaagcttagaatattatgggacatgatgtgacagaagcggttctctcctttctcaagtcaagagaaattctaaaagaaataaacaacacaaccttgacacttgttccaaaggtaaattgtccagaataagttgctgactttagcaccatagcatgttgcatcgtgctatacaaaacagcaacaaagatgatatgtacaaggttgagaattattctttcatagccagtttctcaaaatcaaggagattttgtgcatggaagacatattgctcatatataatgacgtgttaagacttcgtctgccattatggaaggagcgatgataaaccagcttgcatgattaaaatggatctaaagaaggtttatgattctatacattgggatttcttagaagagatgttgatagctctttgttttttgaagattttgttaagctaatcatggtatgtattaaaacccccaagttctccatcttttctaatggcactttacatggatatttctcttctaaaagaggtttgcatcaaggcaatcctatgtctcctttattttttgttctgggtatggaatatctttctagaatcttttcaagaactttagcttaagagaactttaccttccataataggtgtaaagccttgaaactcactcatctttgctttcctgatgacctgttgttattttgtaatggtgatgttcagtgcattatggctcttatgtgaagtttaacgattctcctctacttcaggcttacaagaaaatacaaaacaagtcaattatcttttgtacagaatggatagccaagatgtgcaagagatcttgaaaaaaatccaattttgttcaaaataagctgccatttaggtatcctggtgtgcctatttgttccaaaagaatatctagtgtggaatgtaaaattcttattgataaaatagttgcaagaattaagatttgagctctagacacctttcttatgctggaaaggctactcttgtcaactccattcttgtggcaatccattcgtttgggctcaagtcatgatattacccaaagagttctccaatccattgataaaatctgtggagactatcattggcatgaagcagcatgttatagatctcctggtctggttgtgtggaaagaggtgtgcaaaccaaaaaagataggaggtttaagattttattgtcttgaagagtggaacacaacagccatcagaaaacatatttggtcctttgcgtaaaaacaagataacctgtgggtgatgtgggtccataaagtttaccttagaggctcgaattggtgggagtataaacttcaccaagacagtagctggtattggtctcaaataataaaaggtgagagatatgttgaattcttatatttggaaccaaattgaaacaataaaatttaccattttagaagcttgcgacaacatgtttccaaaggttaacaagcaagtttggtttgcaaatcatgtttatgggagaaatatcatccctaaacatagaatagtgcttggttagctactttgaacatgttaaaaataggagacacactttttaaacaaggagttcaaactccaatcttatgttacatatacggtgatgatcaagaaactcatgaacatctattttttagatgttcatcattcagccaaagatgcttggaccgtatgttgaattgggtaggaatcgacactaatcaataccactttaggattgcgaactggattagaagatgcaaaaaaagtaagttgaagaaagatatttacatgcttattattaatgcttatgtgtatatgatttggagggctcagaacaaggctctttgggatcatgaggttccaagttaagagttttattagcttagtaaagaaaattgtaaggactagattttactctttagagataaagataggtgagaaagataggtattggtttaactaatctttttgagttgttgtaaagtagggttcttgagctatttgagataataggttatgatgtacaattgttgattgttgaaggtgaaatacaattacttattttctaaaaaaggctcaattttaattaaaagagttgttgtaaagtagggttct

SEQ ID NO: 266755 - DNA, 5525 bp, Cannabis indica
aaacaacacattttggatggcactatatctccttacataaaaatctttagaaaactttgacttcacgatggtatttataaatttctcacttgcaataagaactgtgactatcctgttgtgaagtaagaaataattctaattttcatcaccaagatattagttattttttacgagaatttttgaaaaaccaatataaataattagaactaatgaaataaataattaaaagagaaagagtaagaacaacacaaacaatttttacttggttggggcattaacaagccttagtccacgagtcaatattattatgtaactttgaacttgaaaagtcttcgagattacaatgaacgtaaattctcaagtttgcctaagaaaatattgcaagagagttcaatccttagtctgtacgattcaattgggaatttatagtatttagagaataacacttagttttccttttccctttattcggtagtttacactgaattacataacttgggctgtctcgagaagttaagtccacgaaggagatgatatactaactaggagaataagatacggttgaactagtcaaaaacgtgtcctataattgtgggtaattaatcttgaattaatttccttatctttgtttaggaagttaccccttttagcttgatacaatcttctatcgagattaggaaagtattttttttcttattggtgcataggaataaaaagggaaaccacactggtctttcaagaacacgctgtctgtctcttccggtatcactgtactagacctgcttttgaatacaagatgtcacttgtaaaagatcatctgatcacggagctaaggtacgttcctagaaggtcttatataacttgagctaggcccatattatcttctttgcaacccactggtgggcatttgatgctgacctggattccacgtgtcccttgccagaaacacggacaatatttacctcccaagatttcagaatgctttgtatggtggaagcttgcatcattccattagtgtggacaattggaagattaaaaataatattatgacttttcaggtgttaatcgatcatggaatgtgacttttatccttagttgtagttgtttcttgagattttaagaaacaaataaaataataagaactgaagaaacaataatcgagaggaaaaatataataagagagaaacaacttttacgtggttggggcgttaattagccttagcccatgagttaattttatacagtaatgtgtttacttgtaaatattctcaaaggtacataggatgtgactttgtatgtttgcctgagtaaaagtacaggagagaattcaacccctaatccatgagattagttgggtatttatagtagttggtgaattaaattagggttttccccttttcctctattgggaagctacaactgaacagtgtctgtctttgggcttactcatgaagtccagcccatgaagaagacgattgctgactaggccaatcgagcttgagctgatcaagtcaaaatcgtatccgattataatgggagaatattctgaaataactactctacgcctgttatgggaagtttcctctttaatcgcaatatgattttatggcacagtttgacagctcgaatttccttatttataggaggcaacaaataatgagatcgaaagattcttctgagaatgcaattccttttccctctgggctcatgataccaaagctatcttctgggtttaatctgtcgagggtggaaggcgctgtgaggacaaaattaagataacacccggagggtcctatccaagtgggcatggcccactgtatccctaatgagggtcccattgatgagtcttaaatgtccacttggaggccacctgtccattgtcagaaacccagaatacattcacccaagctttcaggatgctgcacatggtggaagcttgcgctgatctctttgttctagacatgtggagattggagaaagaaataatgatttttcacaagttactcaagcacgaaagctgactttttcctgtgataatggttcatctatgtggcagtcaagtgcgtattagggcacggttatcgaggagtcatcttctaggaacgactatatttaggaagttgttcactgactaacacaaaaaccaaaaaagagcatcttcatcattacttcacacctttattattaagagcataaaatgcagagatactcttagatctttaatcttcctaactgttggatagggatcgtactttattccgaaaagatcgtggccatcaactccttcctcatgtggatcctagtcctcgggtataaatacctttggtaatcttcagttaccacttttactttctttttcaaatttttcgaactctcaaatcgcaccaaacttcttgccatatatataagagcttcaaatcatattcaaggagaacttttctttatcaccctggaaggcaatgtggactactaccttcacctgttgctgagaattagggctcaagagtatccccatcttcctttgccagtgagcagaactgttacaccaagagaaattgcaagcctagatttcagaaaggaaattgacttactgatagccacagtttctcgtcttcgggaaagctgcgaccgtcttcttgagccaaactcagcaacaatcaatatgactctcccactattatcatcaagtatgttgtttttattcatgaatataccttctgaattcgtcgctttaaattgtatgtgcatgttctgttttaggatgaaattaagatttatggattgtaatttttccccttaggtagatttaggaattacgaattgctttactttttgacttttctatttaggaatttcatcaaatgtgttggccaattttttgcccaaagtccttaaggtttttggtcgaatgttggtctgtgtcgtctcccttcttacaccgttcttgttttccagtttggattgagtaacccctgggagttttttttttctaaatagtgagtttagttgggacctctccaagcagtttatgggggaaaacccccagctccctttctatattaggtagttagggctgctttgatttccttctttttagacagaaaccatgacaaagcgctctcatcaaaaagaggttgatttagaagaagagtcgacggaacctcaaagacctccccaattggtcatgaacgacagtccgtgggaaaaagaccaacatgtcaactcgtttagaaattacaaaaatctgagaaaatacgaaaccgaacgagggcttcaaagcgttccaagactgttgtagaacaggctttttatacttggagagaggcccaggcagtgcgcggaaggaggctttggcgtatggagttgggctcatattgagatggggcacatatgcttctaaggtactattttactgagttttgtatattagctggagtagcaccgttccagttcataccccaagtctacagtctttcgtcgagatggcatgttttatatgtcaaacatggaaaacttgcaccaactccgaaagatgtcttgtacttttaccatatcaaatcccagtcaatgagaggttacaaggacaaggtgggcttctataggttgcaaacatatagcacgagtatcccttacccaactagtcatacaaggtacatgcatgacttcaaggattactacttcttcacctccggcttcgcattgaggagggttctcacccttagtttagacatcagtcttgtaagtaagtctcgactcccattttaactcataaaattatgttttcccctatactcattgtactctaaatcaccactgtttctgtgtgcagactgccttcctcaatccacgttgactccggtgttggaagagagagtcaacttcataaatccttctcgcccaaggagttgcagctaaaggatatggtgaccacggcgaatcttcgagaagtaggtctcatttccccacacgaggatataactcacctctccatgaaggagtcagtacaggaatccttgaagggggaccaagaataagttagagaagccatcgcaattattactgctgaggagcctttgaaggcggtgaaggtcgatgagcaatggttggaggattggaggagacaattcccaaaaagcctgagcgaggctaaagagttttccatccactttaaggattgaatacctaatgaaggtgcaccaggagcgagtacttttggtagtggtgagacgccttatcatataattagggctcctatcgtgtctgattttaagacagttaatcagtgtggattttatccatacttcttgagtttagatcgtcataaatactctttcagtagatatatagatagggtagattgtattgtccaaagtcctaaccacttcatccctcctgtgcaccatcatgtccgagtggatgcatttagcgaaagctatttcctaggattcttcctatacaaaaccaatttaggtctggaagacatcacgctgttttctaggagaaaagtcaattatgctaggattaatggtttggaccctcttgaagtcttgcatgcttatgtgttgtaaaattcatgcctttcgttacaatttcttttaatgaatgtttttgtgtgtcttatgtagatcagctagccactctctggatggggcatcaaaacaagttcttgggcagtgtccaggctctacctggcgagattagggagatcgcccaaactgatggtgatggtggaaagaaccaagcctctgggagcggatctgaggagccaacacctctagtatcaaatctgggagctactccaaaggctctgggtatggcggtggtgtctacgactatcatggacttgatggagcccttcctgctggtggaacctctaaaccaagttcccttggagtgctctagaggagatagtgttggattaatgttaccaggatctagatttactaccatgtatattatttaacattctaaatatgaacttctaaaacaatgtaaataaacacatataaagttttcaaaaccgtacagtgggtgcagcagaattaaatgactccttccactcagatctctaacccttgtatcctttttgtagcagagtatcaccaatatctgagcccgattctttttccttgtgtttggattcttcacagtcttacgtactataattgaggaccaacttgatgtgtgtgggcacttactcaatcactaaggcttgaaaatatttgtgaagtaggctatagtgttttcgaaattgaagaggaagaagaaggaagagatctcatcaaaaagctagctttttagctttggaggcattagttggatgaagagaccttagctatccttttatactaatttccatagggttagggttgatttattagcaataaaaaattgataaaaatagagtaaaacaacaccatatcgccggccacatattgggccccactcaagttttgtttttgccatttttctcaactattttttctatttttcacaaataccacttcttgcaacttcaaccctat

SEQ ID NO: 266756 - DNA, 2186 bp, Cannabis indica
gacaatatatgtagaaaacgaaaaaaagaaaaaaaaagaaaaaaaaaaaaaaaaagagaccaaaatgaaagaaacaagcagtttctacctcacaaacctgtacttatcagttatgttatgttacacttataattacaaccccactttttctctttcattttcgcttcttttttctttctaatttctcttctaacctgaataaatctatacaaaagatctacattttcacggggtttcctatccaaaatttcaatttaagtgaagataaaagaggatctaactgatatgttacaagaaatatgaatcaacttctatactaagtggttagagctttgtacacggttttgatggtacagttgaaaggagtgctttacaatcttatatctggagctggaaaatattatgtcaaatcaacggtgaaagctgagaaaactgcatcacctacttgctctcaccgtgatggctttgacggggcagataaaacatcaggatggcaatcatccccatgtcaaaaacctttcaaatctcagccaatccgtagggtgatcatcgccaaatctgttctgagtttctgtccacctgagatatctaaatgtgataagttgaacaggatcacccgattgtacaatcatttgtcgagcatgcaatgctaagcttcttgtattgggcttactggctctgacagtctcccttttgcttggctcaaatcaaatcaccttttgttgagcttaactttgcaccaacatcaggggaaagggacacaatctaatatggccctagtgcaatgtctactctaccatcaaccctgttttgttgattcctttggcatcaacctagtaaccatcgcgacggcaggcagacctcctaaggaggcaagagctcaatttctcatgtaggggtaggaaacagaaaatcaattaccgcctatttagctgcttttttcgtgaggttaacgcctttagctttttccatttcggcttccttctctgctttctttttctccaattcagcttgtttgcaattttcttcatgtgctttccgaaacaatcttataaaatttaataaagttgctgtcactgcatttaatcaaaccagaattataatgtgagaaatcaacttcacaagtgaaacatttgcactgcctgggtataaactatagtactacaatagagaatagaaagtgcaaacttcacttcttctcatactctgtgtcctttgtcttttattctcattcttccttttcttttccccaacactcaaccaacaaaaggcaggaatatttcccaatgtagaagcttaccattcctagattatttcctattcattctccacaataatttcactccagaaaaatacatcacagcctctaagttcgagaaattccattatcatagtctcaagaaatgcttttaaataagtgaaatctatgcagtccaagagactgaaagatttggggacggcaatgatcaattaatgtagcttgccatggatcagatatcagttacagcagtcaaaaatggaagataactaaccttgttcgaatggacagcgtgcaggatcctcgccaaaatacaaggcaagtgcatcagcattcctaccctgtccatcaaagggtaatcatgtaaggtaacagtcagagtgaagcgagtgtaatactcaacataaaccagtaggaaaaatcagagaagtcggataattagcaaattaccaccacagagtataggttagtcacagaaaccacctccgtctcagcaacagtaatgaatcctttcagtgtctagaattttaagaggaaaaaaaaagttaaataaaaggacccacatcagtaaaaagcagtgaagtaagcatatgtcaagtaagtacgtatggaatataaagatgagtaccataaaatattaatgttataaaatttggaaaataaaagaggaccataaaaaaaatgcaatctagaattccaataaacaatgaaaataagtactgaccttacgaaaaacctcagacacgggaccatcattttccgatgcacccagctcctgcttgaccttttctagcccctttattatagcttgcatttcttcagctaaagacttcaattgtatctaaaatgaagcaatacacaattaaatctaagagttcccaattgagttccactaacaaaacactcaaattaaaaatacacacctttg

SEQ ID NO: 266757 - DNA, 2673 bp, Cannabis indica
aaaaaaaaaactgaaatgaaataaaaaaatcaaaggaaaacaaaagaaaaagagagaaggaagtgattagggatgcatgatggttgataggtgagttgacgtgactggtgcatagatgtgatgtgtatgtggtatatgtgtaataaaatatagagaaaaggtaaaaaagttgctttaaccgtgtgtaggtttatatgtaataaagtgtgtaatttgtatttttggtgtaaaaatttctttttattttgtgtgaaaattttttaatttctaatatttttttttgaagaaatcttttagattaaagattataaaaaacttaaatttaaaaaatttaattaaaaataccaaaaacctattgaatttaaatttatttagatacagttttatttatttatttttattattatttattgatgactatatatataaaagctaagtaattaacttattgataatatatttataataaattaatatatgaaaaattattattcattgagttcaaaatattcaatttaattaagattttacaatatgtattttttaagattaattaagagcaaaagaataaaaatttagtagaataattacttatattattaaaaaaaatatacaacaaaaaatattaaaatttaaaatttaatataattctataatttaattatcattaattaacatacaatcaatacacaatatctttcctagtatatatgaaaggaaattaaaaaaaaatactaaattattaagctagcaagctaatatacccgccacaaaacatttgcattaatacaagaatccctatcaaatttcaagtacaagacaattatacaatttatacgtacgtacttataactaataatcataatcatgatcatgatcatactatcttcttcagcaaacttataatttcattacaattgttcgaaatcagatcagatcagatccatgatcgtacaacgcatacgtaccgaatatctgaagattttggtgtgtcatcaaaattaacaagagccaaaggagtatatatagtaccacttccatcatcaccctctcttgaaaaaaaaaaagccacgtggcgatcatcatgattttcttacacaccagataaaaatctcctaaccgacacaaaccagacaatatattctgctaacacatataaatgattgtgtatttgtgtgatgctaataaaatttaggtctcacacatatatgatacgtcactttcctcataaaccagtgcctcttcaaccaacttggcttaatagagtaatattccatatatatggctaaaaaatttaaacagtttaaagtgtaaaaataggtttataaagtttttttaaacaatccagatgatctacgactcaaaagtaatagaggggtgctactgtcaacttcctgttacaacctcttagtaaacctccacgtccgaaaacatatgtcgagtatttttttttaaaaattttttttgatgggggtgttcattatgcttacaacatcatgtctgtaaatttttgaaaatttttgaatagtttatagtgccaaaagtacgtttgaagttttttgaatacgcgtggtaaactggaatatcaggaactctgttttcggaactgtaaactattcaaaatttttcaaaaattgacaaggatgatactgtaactataacgaataccgctatgaaaaaaattaaaaaaaatatttcggcatgtgatttcggacgtaaaaatttactaagaaattgtaataggaggttgtaattagcatttctcaaaataatatatgcacaagaaaagtaaaaactaaaaaaaaaatagtgaccgaataatatgtatgaataatggtatattgtatacgtatgaataccctcatgatgatattggcacagtagttttcatctctttcaccaacaccggaaggccaccgctgaaggtggcagtaaggccgggagaaaaccgtggcatccggtattgtggcggcgctagctcgatttcgaagcggcggagaagagagagtgccacgcttttaagctccaccatggccatatctttccccaaacacaccctgtgtccagcttgaaacactgggtacttataagggttttgagaacagaaaacgccatcgtttaaccacctctctggtttgaactccaaacaatcagttccccaaatttcttcatttcttcccatggcgtaagggtggtacgtaaccctagtccctctcttcacaaaagtcccatcgggtaaaacatcatcgtccacacaaaactttgagtcaaactgtatcggaggataaagcctcatgctctcgtatatcgccgcctctagataatgaagctcttgcatttgttcaaatctcttaacgggttgacccgatccgattatccgatccgcttcgacttggatttttagacgggcgtccgggtttttggccatgagccagaagaagcttgttaaagccgatgcaacagtgtctctcccagctaagagaaaactcactatgatatctctaagaaacgtttcgtcttcgttttttacagtacgcatgaaacgtgacaagagatctttgtgttgatgattcatcgataaccccaattctctcttctccttaataacttctctagctagtgaatcaatcaccttaacagcttccttcagtctcttttcagaacccaaattga

SEQ ID NO: 266758 - DNA, 2952 bp, Cannabis indica
cagaggctagctgagaagaagagtaatggttaattgggaaattgatctgcgcacgtgacatacacgtggtttaacactattttcgttgaaacatattatttaggaaatcagcccaagtcatgtggctcctctgctttaacgaaacccatgtgcgaaaacgacaagacgttccaacaaatgtttgaagtctatctatctaatatctatctatctacctctgcgtgctctacgtctacgatctctttggtgttgctacaacgtgatgtctgtatactctttatcacgttttacttgatcaaataatttactggataaattaacatagtatattatttgtattatgttatatcatcagcacgtgtgtaatttaaatattcataaggattacataattgtgaggttaaaatcattgagagtatgtagtgtttgtaattattaactaatataagtatgtcacaatcaattatttaaaaatatataattaaataagtttaaaccaacacagtaacttagctaaatatttttcctagctattatgaaagaactaacaaagaaagaagagattggtgagtttttggcactttggcgataattttaagtttttagcttagagcatcttacctttgggtccatacacgaccctttgttgttgattcctagaggtaaatacttctttttgttggtccactaattctgaaatacttgttggttgttagcgttagtacctaaaccttaagtattttgttggacatatgtattaggtcagcaatcttttgagtgcgacatccaagtcattttggcgcgttctcatctcacgagcatgctcctggacaagagtttcctcttttggttgacaaagctttcagccaaagctgcttgactcgggtttgctcttggtatacacgatttggacacgaccttgcacctgccctattgcatcaactaattgatccatttgtgggtcagttctttcaatgtccacatggggttcccgccttggcctaaagatgccaataccccgagtgatatggatttggcttgagatgaaatttttggtattgtcccttctggcggcgccgccagtagcccctcccccatggcggggatgttagtcatacgcccagtaattgtttgcccaacaacggtagtttggtcgattatcccgtgaccaaccgtggtttgggcagtagcttgcccagttgttccttggccagtggtggcctgagtagtggtttgccaccattaataggacgtggtggtcactcactattgtttccagcaaggttgctcattgacgggacttggtggacatgatcaccttcctcatcaggtcattcttaagatgatctcttggtaaacaccattttttttgtgaaatgcttcgagatttttattaaaactctcaataaaagcactaaaatgttattggatttttagtcaaccgatgtcgagtgagaaattaatctaaaattttaataaatgttaataaagaacaccaaaatttaaagagattcagtcccaagtattggtaatagtttacttcctttgtattttattaatctttgttgcaggttaagaacaagctcttgactgcaaagaataaaattgatagaatttttgctctttgagtgataattttcggatccccttcctaagtcatgtgtgaccctgtatagagggaaaggattggtgcgtctcacttcaagagacacgaccttgatgctaaaatatctcatctatttctttgatttttgggggtggttgagatctgattcttgcggtagtatcccgctatatttcatgtgtttgtaaccatttttgaacttcatgcaagattaatggatgatgctgagagagtattggatgtgtcagtttgtgtggatttaacccctagagtacagcctgaccaatcaatcccctatgggggtagtactcacctcgaagtggtacccccgagacaacacctccccgctcctcatgtggtgtttaatgcttagaagtatgtaatcttgtattcttgttgatacgtgtagcaagttttacactatccacacatgtatgtaggtagggtatgtatttggggtaagggttaaacccctaaactaagctatcacccttagtgtgtgtatatgaactactatgagggtacagggggtgaagggtttacttcctagactatatgttaacacccttgagtggatgatctaccctaaaggaatgatgactatctaaccccctttgggggatacttatccatctctttggaggagtagtcacctcactcacgccgaggggcgatcattctattcccccgtacatagaagtagggccgggtgactactccaacttatcctttccactaaatgtgttttgagagataataattttacatattcctcgttaactcaatcttaaatattctcgtgtcatcatattctcaagtcaccttggttaaaatttaggaaaacaatcactaatataattttaccaaataaaatatatcaaaatatttagttttttttttaataaattaaaatagtattgtgacttgtcggagactaaactttatggtggttgggtggaagggattaggcgacaaattaattttgctaatagttttcatgttgattgtattgggaagagtggtggtctgttattattatggaatgacgattgggaggttagtgttaagtcattcacttctggtcatattgatgctctggttaagtgtcctggtagggatgtgtggaggttcactgggttttatggcaacccaaaggcaagtttacgggctgagtcatggagattgttatgtaggcttaaggatttatttgatcttccttgggtctgtggtggtgattttaatgagattctttcgataaatgagaagaagggtggtgttgatcatagtctggcggcaatgtctgaattccaacaagcactggataggtg

SEQ ID NO: 266759 - DNA, 1560 bp, Cannabis indica
ttatggcataaaacccaacaattgtaacttcatcataggttctttaattgccacttcaaatatcccattactagcttttaccacttccaagtctacaccatcattccacatcagagcaaaacctcccccaatacccacggcggggataattgaagaaaattgataacccaatagccttgccacttcatgaatcccatcctcgttagtctttgtttccattaaaaaaagacactcctgtttatgacgcctaacccaagacctaagtgctcgggtagacggggttctacgaacaccccgataattccacgatagaagcctcatggggacggggggcttgataagggccgcctccccgcccgacaatacattttgcgtctcaaggattgtaacgttcactaaattgcaatccaaatttgaactactcgtacctgtattcaacgtattcccagaatccaccatacgactcccaccacttctggtcccctgcttggctcctcttctactgccaatcgagcccctcccaaggccacgagaatgattttttctcttggagctatcaccatcctgactgcaactaccagggttgaaggtatcaacttccagagtaggaagcagagtaaccggtgacaaaggggttttatcacccagggtaactatggtttcttctgaagcaatcacaggtacaacattaacacaggctttcctctttttcgcaccagagaaagaagggccacaagaagaaaactccatgtagtcatggtacacaacaacttgagtaggcccttttccaccttgggccggacttaagacttattcaattacttcttcaaggtttgtatcagtgggacaagtaatgtaagtgggctcaggataatggtggggtactctagacttacaaatatcctcatgtggtctatccaccatttggtcacgtgtgggcccaatgtcagccatcaaacttgctatgatcccatcatctcttctcctactatctatcttggtcatagggtgttttctagagctaggtaaaggcctcagagtcaaattactcaaatcgctcatcttcccctgatccctcaagcacgccttttttgtaccctacaacagtttccaatttggtgaaatcctcacaccaatagtccgctgctgttcgaaattattttaccaggatcttagatctactcacaagtatgttgattaacaccctaaatatgaacttctaaaacaattataaaattaaacacatataaattatgagaaaccttacattgggtgcagcggaataaaatgtctccttccgttaacccttgtatcctttctgtcgcagagtattatcaagatctgaacgtggatctctaagaggttcgaaattattcaaagaagaagaagagggtgaaggtggcggctaggtatagagagagaaggctcaggtttttctttgaaggaaataagatgtgaaagtctatgagcatgtctgatattattttctgttttttgttttcaaaaaattatttttagaaatgagaacaaaaaatagtttttgaagtttttaaaaacaag

SEQ ID NO: 266760 - DNA, 1677 bp, Cannabis indica
tttaactaattataatatatatatatgcgtggtattagacacattaagaaattaaataaaatataattttttattttatttttaactataatatatatgatgtgttgtaacaaatattttacttatttttaaaaagttatataaataatttacagtattaaaaataaaatttaaaataaattagttaaataataaaaaaaataaagtggatgttcaaataattcagaattatattttttacatgttaacttatttagaaatttttaaagataaacataatatctactataattataatgaatgttattaataatttgtctgtataaccaaaaataaaaactaccgaaaagtaaaaaaggaaaaaaaaaaaaaaaaaggtaaatgtgagtgatttttcattaatttcggtttttctatataaaccaaagtaaaaagtgctcttttaactagttcattttgtaaaaggtattttactttcttgggtttacttcaatgctaagcaaaaattgacgttgaaacttaatttttcttagaaaaaagttaatttctaccatgcacttcttatttatttttgcaacagagtttaaacagtttattataagcgtgtgaaataaattatttgaactgtatttttgatgtattaattttttttaatattttaaaattttacaagatattttaaataactatattatagaggaccatataaaatattaaactaaaaaattctatcaaatatcaaaataaataaaagtgcattaatagattccttttaaaaggtgaattgtaaaaaaaattcattagtatattattcagataaaaaaaaaaactattacattaattagccccttaaataaagtgttatgtgcttttcttgagatagtgtcctactccgtccctgaccctgcccataacgcaggtactatattttatgacatatctatacatctgcatacattcattaagcagtaatgatcttattaactatttgaccatatttttttatacatcttgatcgttaatttatcttaatattttccatgcatttataataatgtgagctagccagtgaataacgcgccgtgatagcgaagttgaatatcacatatgagacaaaattagtaatattaattatgtgatcgttttatctaattaataaaattaggtctaaaaatgattccatcttataagaaaagtgacgtctattaaaataaagagaaatgttgaatatactttacactacatgcacttcttcttcttcttgttttttttttaactgtatatcttaatgacattaacatatgtatttgcttaataacaagttgcctatttttgcgatctaacatcgatccctctcagtattattattatttttttaaacaacttccgtcagtattattaacggtaacaaaatatggggtcttttcttttactatgtactcaaaactacgtataaatacacttaacatatccccaccttgaatcgacgcgcttttgtacagtctttgaaaaagttgactttgacgaaatacatataatacctatactaaattctctctgtccccaaccccaacaactacattaccattattcattaatgctatactttgccaatattactcatccctataaattagcccaaactttcaataactaatcccactcaatatcctctcc

SEQ ID NO: 266761 - DNA, 963 bp, Cannabis indica
aaaaagaaaacagtacctcgggattccgtataaagttcccgccgtgtattctttttcccggggatttccgttgttatattcccgcctcatttaaagatacccatttctcttctccattctcaaacacaatttcacccattgcttcttattctctctctctctctctctctctaaactctgcaatgtcgtcctctcgtcgccagaccaatggcagatccccactcgttaatcagcaacgccaaatcactgccttcttctccaaatcccctacttcttcttccgatcaaaagctcaacaatcctactcctaaatctaaactcaagcccgtttcctccgatcaaaagcgtagccctagtcccagccctgtcaccccatctcctcttcaatcgaagctcaagaaaccccttttagttatcgccgcatcttctccctcttctattacttcgacttcggcttccgacaaaccctacggcgaagaagctgtcggaaagaagatcaaagtgtattggccgttggatgagagctggtacgaggggtttgtgaaatcgttcgataaggatcaaggcaagcatttggtgcagtatgacgacgcggaggaggagttgttggatttggctaaggagaagattgaatgggtcaaacaaagcgcgaagaaactcaagcgtttgcgtcggggttcttctttgagtatgaggaagatgattattgatgatgaagatgaagctgagaatcttgaagatgaggaagagggtgacagtgacggtagtggtgctgatgattctagtgatgaggattgggggaagagtggggagaaaatggttactgagaatagtgaggaagaggatatggaaatggtattggaagacgaggatgagaaggatgaagcattgaggtgcaaaggaaagccgggtgtggaaggtatatcgaagaagcgaaagattggtggagcagtagagtttgact

SEQ ID NO: 266762 - DNA, 2316 bp, Cannabis indica
taatattgcattacttgctcttagccattcgatcagttgtgtttaatgggaaactgcgttcctagataggatttttggaatttttatcaagaatgagaacggaaaagatagaacccagttcagttattgtgctgaacttgttgagatcaagtgctgatttgaagatgaagtcagtaaaatgtttcatctattattatataccaaaacttggagctggaattcaaggatgataaagacaaaaattcaaaaaataagctctaaataatgttgtttagtttactgcagtagtttctaatctttacgaagaaaaacactgaagctgaaatcgaaagaaaagcctctaattagttttcacttttatgtccaaaaactaggagcttcaaccaagacaatgagcatttttggctagtaacaaaaatccaacccaagagatcaccaaatttcctcccacaaaatctatattatgggtatcttcgtagccctaaagcagtatttgctataaattttccattttcacatattttaaggctaggtggatatgcaaaagaaacacactaaagggcctaaaccaagaagaatcactactaggtatataagtttaacaagaccaacaagcactgctattaagcatcttagagtatccctagggcatgacatatcaccatgactgcattaatttaaaataaatttaaattcagatatgtaagacctatattcatctgtacgaacagtggtataggatgctcattattattaaactattggaaaaatgctctggtttcaataagcaccttcaatttccacttcctactttcttgtaatagtcaatgatgaaacactaaaaatatataagattgagaaatattatttttttccctttttctaagaatcaataacattgttttgataaaaacactaaccagagattggaagatgcagacccacaacaatgctttgatccccaaactgtcaatataatgctaatggaccacaacgagaaagaaggaaataatacactaaattttaattcaaatagatatataggcaaaattgatatgttgaatcacaagaaccaacatttttagtgacaaaactcaactcattgcggttccttggcaatatataccatgattcatataaagaccttacaaggagttttcaaactagccatatttatcatgtcatgtcttctgtagcaacaccatcattttctcctcctggtacactgcttccaagtcgtagccttttcgttgctaaacaagaagaaaaaaacaaagaacaatataataaataacttgataaacctcgtgaagaagatggagattttgtaagtaaatacaagcatttttttctcttatatgacatcataactgataatacattttccagtttgctctgttactccatttcaaatggttgcattacaagtttagctattaaaataaattctagcacttgacactaaaaaaaaatctactcaatttgttttataagggtatatggcggcagtaacaaaacttacatttaagagaagatccagcaagacaagttattcttgagtttgtattggcctcggctaatggatttggcttttcattaacagccatacgaacatcccaaactcgtataaccccatccgatgatgcagaagctattaagtaagggtcgtcatcagcaacagcacccgcattcctagtgagcacaacaattccttttacacgagaagaatgtgcatcttcaatgttgtacgcaaccttcccactgtttgtatcccatgctacaatactccggtcctcaccaccagtaaaaagaagaccactctacaataaatcaggtttaatattgattaaaagagccaaaatgacacacacaaacctacaaacaatcttctctttttttttgacaaaacctacatacaaagtcctaattgcagttcttctaagttttgcttttgtagtatattacagttgcgtatcttaagaaataagggtaagaaaaaaaacattatacaacacttttgaataaaataatccattttccaggaagcttaaattcaatatgaaccagaaacagaaaagaattactttcttcatgaccaaacgcataaagaataatccattttacagaccctttacaaatggtatcacaaattcaatgtcctaaagctctgcggaatttactatgaactatcaaatcaaaccattacatagcccactataaataccagaaacttcaacatgaagtgagcaaatacaaaataaacttgcaatacaaaattgaatccaagagcaatgacagaaacaaagaaccaaaaaa

SEQ ID NO: 266763 - DNA, 2103 bp, Cannabis indica
tacataaatatacttaaattggattaagtcatttacatgctaatcaacatttaattagtataagtgcacattttaaattttctaatcctatttaattcacataaatacaaatattcgtacttcgtaaaataaattggattaaatcgtgtgaattggattatatcaaatattttatgaacatattttctagtactttttttagaattattttacaagtacacaaaaataataaaaaaaattataaaaatatggttgtacaaaattctaaatatttatacgattttttatagttttatttacagattatataatatttttatgttgtaatattattaatttgttgttatttttatgattttttttttatttaagcgtttatattttataatcatattatcatgttttacttgtactcgaacctaggacctccaacatacactcacccatcgctacttgaggtagtcactagctcaagtgttaacttgatccattaactttgaaaaataacacatttttcctacttttggacataagaagaggaagcacgattctggcctacggacgtatatggattgggaagaggagattagaaatacaagaagaaaagaaaggcgaggatgggcggcaagggtggtcctttctcctttcgccggaccagcgctcgccgccgtctcaagaagtctcctcagaccacccacgcgacgcccggagatgccgccgcctcctcgccacctatcaacaacaacaataacagcttgatcgccgccgcagccgcagccgcagccgccgccactgctgggggcgttaaggggaagaagaagactggtggagccaggctatggatgagattcgatcgctcggggcaatcggaactcgtcgaatgcgacaagaatactataattcgccgcgcttccattccccctcgcgacttgaggattcttggacctatcttctctcactcttctaatatccttggtaattttctttctgttccttctaattttaatatctgattattgtaaatttgctttagggatataatgctttttttttgctatagcttcaaggtccacttagtcaaaattagccaaagaactgttaaaccgtaatatctgcttctttgtttgttgtatattatctatgtgtggtagttgattatgatgaattgtgtatttgctatctatgttttgcagcaagggagaaggccatggtggttaatttagaatttattaaggcaattgttacagctgaagaggtgttgttgcttgaccctcttcgtcaggaagtccttccatttgtggatcaacttaggcaacaacttcctaagcaagggccatctcagatcaatggagcagcaggtacttttggggaccaagaaaatgaaatgaatgatttaacaagtagacattggttacctgttccagaggccgttgaaggtctgcaatgtgagcttccatttgagtttcaagttcttgagattgcattggaggttgtttgtactttcctggattctagtgtggcagaccttgagagagaagcttaccctgttttggacgaactagcaaggaatgtaagcactaagaatcttgaacttgtcaggagtttaaagagcaatcttactcgtctgcttgcacgagttcaaaaggtatgtttgatgacttcattttctgtgtcattggatgttattgttaccacctttatcttatactcatgctagttgataacatatagcacatctggattatgttatagtttcatgaggagtagatcatgtaagttatcttccctttgctttagaaaattttattctaaaggggaaggagaaaacttatagtcacaataaatggtgcctcaacgttaatatatttttatttgatttattaaccatgtaatcagataaacctgctaatttcttgtaattctaaaacgatagttgtttggattccatagattaagcatcccaggtcatacgtatgagtcagaaatatcttagtttgttatggctgtttagcatcatgagtcaaattgtttcttgtgagggactgctacttggattatgtttctactgatgattcttgttagtgggaatgtgttacaagttac

SEQ ID NO: 266764 - DNA, 2765 bp, Cannabis indica
atatatatcaaaacttatctttattttcccatatttttgtaaatagccctttatttaactttataacaatgcagcaacaaacccattttgctacttaaccatattcttgctacttaaagtgcagaatgtttccaagttaagctataaactttttttcttatttttattttatttgacaatgttcttttttatttattacatatcatatttaaattgaaaactaaagaattatattccatctttttttttaatgttagctcacgcaaataatctgaaatcaaatgttatgaataatagtgaaaaagaaagtattacaagtaatacgatggagaagctaaatggttatattataacgtctcgttttaaaaaagaatcagaatcataattaaaaaaattgaattcgtctcatattagtgtttgcagtgggtccgttgagccaaaagtatcttctacgaaacctttggagcaagagacgtgtgtgttagatatactcacccttctctatcatattttattttcagaccaataaaaatgttaattttttttttttttgaagaggaaataaatatataatttaagaacacacgtaaaagtaatttgtcacatcatagcaagacttgtgtctacatagtccacaaaaacaaatctatgtatgctccaacaaaacattcatcactctataaaaactcttaaattttatctaccactattcgtggaaattaaaataaagggggtctcccaattcaatatatataatatattaaaaagaaaagtatgcacttgtgccaaatctaaagaaaatctaaagaacatataaaaaattgtaatcatttgaagtaaacttttattttcctacctgttcttattatataaaattaatgagttttgcgtttaccttggaataaacctatagtctttatctttactcattcatttaaaaaaaaatacagcgttatcagaccttttatatgtaaaagatactatagcatttttttaataattaatgtttagaatctaataaatgttttaagtgaaagcaaatgacttggagaagaataatcagatattgagtctcaatgtctgtggccagatgtcaattgccaatccaaggcttatcatcgttaatcaaaggccaataaatcaagactgattttttttgtttttttggtcatgaataaatcaagactgaattgaaatagcttggattgacttctggctttcaattttcgattcgagcattgattgaaaaaaaaaaaaaaaaatctcaaaatgacatgattaatatgatagcaatctagtaaaaagagtaacttcatatccgcccccacataccaatctagtaataaaacgtaccatgcaatggaatgaaaatcacattctgtcactccaaaaaagaaatagaaaaatcttataactgtagtttgaagcttatttggtcatatatcgaaccccaagtgcttgtcccgtaccataaaacataagaataagctcttaaaagttgtcaatcatggagtgcatcataccacatgggactccactcccacacccccacaccacccaacgtcacgtgcatgaatacatggttgttagccctttttaacacgtcaaattcaaggcacatggtggaacctagactagaactactaagctctcactacagaattggataatttactttatattcaaatcactcgacagcacacgtggcactgcatcatagtggtgttataaatgtgtgaagtgaagctatacatttcataacgcatttttcatgtactgtgaaaagtagtgataaatggtctgcccatattaaatctatagaggggttaaaatcattggatagtatagagaaggaaaaggaaacgtagtaatgtgctttagtttgccaaaaagttgagtcataaagtaatcaaaagttggaaagtgaaccaaaaaaaaaaaacattggattaaagtaaaacatcattagcattgccatatacgaaaacaaatacaaaccaagatttttttttaatattatcttttttatttaaggaaaaaaaaaggaaattaacgatatagtggattcacgtggtacatgtttgtgctcttgataataatatatacatagtactagtagcctgttcacatcagaggattctccttgtaaaaagcaatggaaataaataaggttatatgacacatccaagtgtccaacgatcaacatggcaacatttaatcactcactgcatcgatttctctttgtgctatcaaaagaaaaaaatatctaaatcaatcatttttaggttttctgtgttttgctatgataattcccggaaatccccacagaacagattagatactgaaacaccaaatatttatttcttatcccctctactgtacaaaacatcattggacagcatcatggtggccctcaagaaaatgcaaatttattgggtctataactctcatgtttttctaggagtagtaggagattttctttatcacatataaaatcaaagaaacaatcattcaattaaatcagcttttaagaaacagccacacatacaaagatgtattgaaatttgaatctgcaggtgtgacacaagccatgtgtctatgtctataatcatcccactagctcagctcaactcagcaattataatattcaaccatatatatgtgactcaaaacacccaggtctcatctgagtcatctcatccacgttcacaagtgtttccaatccacaaactagaccaaatgataatcatataaaacataagttg

SEQ ID NO: 266765 - DNA, 3202 bp, Cannabis indica
taataacagagactcgtggaccattaatgctcgaaccacgtaataatatatgcattaattcttcctaagctatcattattacattaatatctggttatcgaaaatcttagtcaataatggtaaaattgagaaattaattttggactataaaatattgtccacgcatgtaggtttgacccacacgtatagggtaacatataaatgcccatattaattttatttattattttatcggttaaaataatttaaattaaattaatcaattatcttttaattattgaattaaacatactagataatttatttaattaaaaaagataataataaaataaaaaaaatttaaggaggaaaaagatcctttcaatagtgagttacagatgaaggaaaaagaaactgggaaacctacatacaagctcaaaaggtcttatacttcttcctgcaacaaaaggcaaagataaattgggtgaaaggaggagatgataatactgcatttttccatgccagcattaaggataggaggaggcaaaacagaatactttctattgaatctaaagaaggtataagatatgaggattcagagcaggtgactaaggccttccttgatttctataaaaacctcatcaggaggaaaatggaaaataagaagcaagtgaaaagatccataatgtggcaaggaccactagtaactagtaatcaagctgagatattacttagagatatttccagagaagaagttaaggaggctctatttgcgattcctggatccaaggctccaaggccagatgactactcaagctttttctttcaggacaatcgggagattgttggagaggatctttatgaagttgtgtcatccttccttcagactggccaacttctcaaggaaataaactctactgttatcacacttgttcccaagatgaagtgttcgaacacagtgagtgactatagacccattgcttgctacaatgtaatctacaaagtagcagcaaagttgatttgtgctagactcaaacaagttttgcctgatctaattgctaagaatcagggggttttgtctatggtagatttatagttcacaacatcatgatatgtcaggacttagtcagacattttgggaggaaaaccactagaccaggatgtgtgattaagttggacattcagaaggcctatgatactctggattgggactacctggaggaaatcttataagctttcacgtttcctaagaagttcataaagctgataataaattgtgttcgaactcccagatactctttgatgttcaatgggactatgcatggctactttgaagctagcagggctttaaggcaaggagatcccatgtctccttttctttttgtccttggcatggaatacttgtccagaatattgaagaaagcaggggacaagaaggaattcaaatactttgacagatgtagagatcttaaacttaaccacctttgttttgcagatgatgtgattctttattatcatggagacttcaggagtatctattgtatgttgcaagcactaaaattgttttcttgttcatctgggttggaaccaagcccttcaaaatcagcagtttattgttgtggtatggaagatagagagatccaaagagtggtggacatatcaggattttgcaagcaagagactcctttcaagtatcttggcattcatatatgtgctaagaggatttcaagcaaggagtgtgaaatatttgtggagaaaatgactgcaagaattagagtctggagctcgagaaacatttcatatgctggcagagttattttaattaactcagtcttgctagctattcattcatactggagccaaatcatgatcttgccaaaaaagataataaagaagatagaggctatttgcagggcttatctatggaagggtcaaagcacatcacaatgtccaagaaagcaaggggaattgactttagaaaggtggaagagtggaatttggcagcaatgtcaaaatacatctgggcaatagcaaataaagaagacaatttgtggattaaatgggtgcacaatgtgtacattaaaggggaagattggtggagctatcaagctccactccaagccagttggtactgaaaaaagatagtgacagccaaggagaaatccaaacatactatcaaattttagcagctgatgtgtgagcagaattttcaaaatttaaaggcctgcaatctgttcaaaaatgaaggagataaagtgcattgggcctcgatagtttggagtagaatgaacatgcctcgacatagttttttcttgtggctagcagtacaagataagctacgaacaagagaaagattatgcagaattaatttgattgcagatgactactgcttgatgtgcaggaatggcaaagagaccctagaacatgtatttttctgctgcaatattgcagcagactgcctgtaacagatcaagatttggctaaattggagggtcattacttgttcacttcagcgacttgtgagatggcttcaaaagatcaaggtaaatagcttcaagaacagggtgtatactgctgcaattgcagctttggcttacactatataacaggttcgaaatggtgtattgtgggaaggaaaaagtgtgaaaacaagtcaaatagttgccaaaacaaaatcagatatcttgtatagaatcaaaagggtatggcctaagaaattagtgccaagaatagaatatggtttgaaaatttgtaaaagagatacatatatacttgttgatgtatagattatttttcaggtctcatttgagatgctgttaagttgtaattaaatttttagagtaaatgataactttaagctgattcataaaaaaaataaaaaaaaataactaatttctgttaattaattataagatatttataataatgaatatatatatatttttattttaaaggattaattaaaagattttattttataacattatatatgatatatctatctacatgtctatatatataaatgagaatattagggagagtgatgatatgagtttctatctttctttttaatttttcaaaattttttgtttatttattttatagtttttgtcgattatttataaccaaaaatttgtagaaaaaaactattattggattcttaatttgtaactctcggtcatttatgtttatatttatgttttattattaatcattaaaatta

SEQ ID NO: 266766 - DNA, 1765 bp, Cannabis indica
tatgtatttgtaaaataatttttaaatagaaggcatattagaatcaaaacaacgggccatactttgcttttcccgagttttaatttgttctgggcttctctcaaaacttgggcctcgtgtcatagcatgaagccaagttgtgggccttagggctcaaaactgcaagcagatttggaaaataaccaaattttcatattgatatttgatatgtaacttttttttaaaacttttctattttgataaaatcagtagtgaaattaagtatcataatgattttttttctttcaaagacaggtttcaaaatttgctaaaagaaaatgtgtagttttaacaattttattcaaaagctattacaagttaatagaattatactttttagtaaacacaataattagatacaatattttgaaaaattgatgtgaaattattattaatatgtatcatttcttgcattatgattgatgaaaatattttgaaacaactttttttttttcataaaggattttagattactctatattgaaacaatctcatttccatagcaataattatctagtgcttaaaagaaataaattaattatacaaaacataatgttaaagactaccatttccacagaaatattccagcataccaaacaggttcctaagtgactaatctattaagggttgttgaaaatgtgttaatactatcaagagaatagtagtgtggtcgttttatgttatatttattcaactcactataaagattaaattataaaaatttaagtgtagcccgtctaattaggaataaaaaaaatagcaacccccaaaccgactattaattttttttccttttaatttaattgttacattacacttagttgtaataatgagacaaatatatagattgaattcaaatttaaatcaactactatagaataaatacattagttccaactttatattttataaatagtcacataaattatgatatatagatatatatacagtaaatataaatatattatatatataaaaattctcttaatggttgagttagtgttggttgattgggtgagttggtattaattttaacctgtccaatattaatattaggcaggttatatttttgtcgaatttttcaagtttgcatttttcgtcaggttatctcgatttaatttaggtagatttcagttatattaatttgaatagcatttctaaattaataaataacattaatataataatctattataaaaagaatattacggtattccattatctattaagacgagtaatcctcattccattcgaagtggatagccgtctccgcaagtcaaatttccataaaccttctatactcaattacttatcatgcatgaggaatataaatatatattatcgatattctctcgttaaatacattcccttttttctttttgaaaataaaatacattcccctttaggattagctcaaataattattaatcattatttcatataaagccgatagaaataaactaggaataattacataaggtatgattaataacaactcataaaaatcaaacactcaaacagaattacaatcaaactagaaataaaacaaaaacagaggaagcttaacttgaaataatatatagcagcaaaatgaatggattctttattgttatcagcatattacagcaagagtttcctaactcaattacagtcatcaatggtgtacaacacaattctctaggacataatataatttgagagataaagaaagagagaggattaaacg

SEQ ID NO: 266767 - DNA, 4594 bp, Cannabis indica
ataagttaggatccgtagatcctcaaatttcccttggtaatttcaaaagtcacaaactgaacgctaataaatagtaagttacaaaagcatgctactgctgtgttacagttcacagcacaaaactagagcataacagaccaccaagccattatgagcatagagctctcaatggccacatttctctgtaagcttcaaacaaaattgatcatgaaaaactacatctaaacgtttccctatagatattttctcaatttgttttctgagctttagctgagcgaccacccgatgcatcattgtctcttgagcggccatgtttccagcctctgttgtgtttacctcccctgtttaagcaaaaaacaatattaacaacaagaccacaatcagaattcgggaatccaaaaatgaaaaaccagacaacatcatatgataaatcgattgaatcataaattatgggtttttttctaaccttccacggttgcctttaaaatcccgtttgtcttgattaccgcggaggagtaagctccagtaatccttttcagcatcacctgagtacgtagcatagcaaatagcaattggcgaaaaaagttatttcaggcattttcaaataggaaggtaaccaataattgtgaaatgaacttaatcacagttaaatgttgctgcctaccagtgactggatctagagtagcaacgaagttcttcacaaccagaccaccttgttcagccagaacagctgcagcacgagctttctgcacagcttcaggttcgtcgaatcgaatgtatcctgattcttctcccatcttaaaatccacatacttaccacaacaaagaacccaagtgcaagaatatcagaaaaaaatgaaatcaaaagaaaaccaaaccaaaaagattcagaatgaaatactgtttatcagcttttccaaataaaaatttgaatagtagtttagaaggaaaaaaacggttacatggcacttggcaggataagaactcttaacagttagtacttaagatgtgagaacaaaaatgttatgtgtgcctgagagaattcaggaacctgagaggctaaaataaaaatagctgagtagatttctgagggaagacagagggttctcaagtaaaagaatagtgttaagaggaccataaactaaacaaacgaacaaaaaataaaatgggctccaatttaaatgacagagtttagtaattatcatataagataccttgacagtaccgaactttccgaaaacagccttcagatcttctcgcaaaattacttccatgttatctttgaaggtagcagcagcattagtcttttcttctttctcttcactctctgcaacaggagcctcagaagccttttctccgtctttaatttcattcccatctttctccaaatctattttgctatcaacactctccccttcaactttttcttctttgttgttgtctgtcttaacatcttcagtagcattatctccatcagttccagcattaatgctaccattggctggctcatgagtgccatttggttctgcagaaccttcagctgagatcctctttaatgcgaatgcaacaattaagccttttgtataactgtgatcatcatcaagtgaagataatgagattataaccagtaaagcatgagaatgtcagttgaccctcataaatcacgtcacaagaattactacttaccttgcttcgggggaattcttgccttttgaacttgcaagggaacgatttttctcaaattcctctgtttctttctctctttcggcatcaaaatccttcctgagtaggaaatgctattttagaaggcttctcttttatttatttcttggggtaaagttcagctttgttatagataaaactgctatgcttcacttatccattctaaacaaagaaaagataataatattgcttgcgaagttctggaacctcaactatctaattaattaaataaaacatccttaaaagtagagatataacccacatcagattttcacacattgaaaatctatttggaacaggaatcatcgaaataaaaagctaaaccacaaagtaaagattaaaaataaaataaagaccacacgactggcatgtgcagtggatacaagcaaaacttactttggttttaggtttaacttagcacctgcataatcaaaactttgcttcaaaatattttcagcatcttcctcatttgagaactcaaccaaggccgtgccacaaaaaaacctcttgtcagcaacatgacgaggaagcctcacactgttaacctgaaataatacaaaaacaaacccttaaccataatagatttagcaaatataggtcacaaacaatacacccccaatatccactgtatcacttttagtgatatcctaagagtagttgaaattccataaaacattaacatgaaacaaccaacaaagctatccaaaactgatgtattaaagtgaagcaatgcccaaacagatgaataattgctcccttttcaaaaaaaaaaacagatgaataattgaatatctctattcattgccaacaaatttctttcaaaatcccaaccctaccaaattttgagaattataattgttaaatttagtgccaggtgagtactagccttagaaaggctcaaactcttaatgatacagtttcaatttcttttcaaaaccacagtgagctataggcagaaatatttgcctcaacttcaaggaatagattatacaagctcctaagatactcaacttgaaatctaaccaaattgtcaaaaattcctcataataataagtaacatggacaattattaggattggcttgacctcaaggagttgacagaggtggcaaaacatgcattttctttctatcacaaacacacaagggattgcaataccttggcgaatttcccaaagaaagcctccactccttcctgcttcgtattgtgctcgaagggtgatacagccactgtcctactgtccaattgctctattaactcctctggtttcaccagttcattagtcctaccaacttttttgcctgaaacacataaagcaccaggaaaactaaacaaacaaaccaaaaaaaaaggatagttccccacaaatcaaaacaaaggcaccacatacataatgatttgcaaatgcaacaaatttgtaatacaacttaaactaaaatacaagcaacttaaaagtttcaaactaaagacaaagttaaattaaaccaagctcataatatatcaataaaaactcaccatcttcagagatctttaggaaagtggacattctaagagtttcggccacagccttcactgtatcttcagccacattgtctggcttcacatcccccaaatcgagatgtgttctcattcgggtaaacgagcatatcaatgccagactaaccactatatctcagtcaagaacaaccagtagtacacaaataaaaataataccttcaatcttaaccaaagtcccaaatctcaaaaacgaaatcctttacttgacacaaataaaaagaaaaaacttaatgataaaaatcagaacttttaatggatgtgtaaataaagctcaaacaaacacacacacacacacaggaaaaggatacttccatcttcgctttcgctaatggtatttttgagaaaattatctctaggaagattgctatcaccaaagtagaactcgacctgtatgtaataaaattcgagaaaacaagtaatattaaaattgattgaagaaccattgaaacaaaaaagagaatgaaacagaggcagtggaaagggagaagagtagtgaacctgtcgaagtactttcttggaggtttcttcatctaaggaagccatcgccagattggtacggtggaacgaaagagagaaagagagagggagaaggcaaagtacaaaggttgagttgaaagtggagactgggaaagagttactagggtttaggaaccgggctttaaactggaactagttgaagaggtcacacgtgtttagcataaacttagaaaataaaatgaaggaaattacccgtatactattttttttaacctttttttcaaatttacggtttgggtagttacaataagggtttttgtacgattttttgttgtaatttaggttgtagcactagttgcaataggggtttttatgtagaattctgtaaaaatgcaagaaaaaaaactattttgaagtgtaaaaatgaaaaagtccctaaaataaattatgggtcaagatggaaaatgaccctaaatctaacaattaagttaataaatgtctattttttaaaaaaattaacaaaatgtccattcaattaaaaatttgataataaaattacaattataaccttgaataattaagtgttggtatagttattttgcacaatagtatattgtttttatgtgcaataatatattaaaaaaaactaaaaggtagtatatatctataaatattttttttttgaaataactgaaaggtagtatatcaattaaaaattgtagtatattattttaatgtgctatgatatataatgaacgaaatacagaaattaaaaaatgtataatattagtttaagtttgaagtatagtcatatttcactaggaaatattgtttttatgt

SEQ ID NO: 266768 - DNA, 2724 bp, Cannabis indica
aaaaaaaaagaaaaaaacatgtattcattcataaaatatgacagattaaattttgacaagatgtgtaatatttataatacctcaagcttttcctggcgctgtacaagcttatcccttgcttgtgcagctgctcccgaggcatccttcaaaagaatggaaattattgtgttagatatattcatgaaattaaaccattttaaccacttttccataattcattaatctcaataacctcattctttcgatatttagctcttatctcttctgctgttctgagtttgggttttacatcactatcaccaccatgaaacaatctgtctctctctgtttctttatctgttcattaaaaacatcaattacatcatttaatgccagcaaaataattaaagaacttgaagcaataactttaaagcaagctattttacctttcgtttcattcttgtttttctgagatgaagatgagacgtgtagaggttcgtcgatgacaatgtcgtctgtataaagacagtagagtgagccacatagaaaaaagatgtcaaagacgaagacttttattccctttctgataatttaaggaagagatataggcggaacctaaattgagttgtatgatttcttggtcatctgtcagagctgtcgaaggttttaagaatggaggacttgaaaataaggtctctaaatgtgcatgaatatttttatgaagtccactaagatcagcattgtgttccactttctctgcttttaaacccttcatcataccacccaaaattccaggggtaacagcctgcggcaacagaacaaattattaacaaatgattatgagataaacaatcgagcttagcaatatattctgctacctgtttctgagttggagagaaattgagtgtggcatctactgaagctgcaagcactttattataaagacagggcaaagaatctggtatcctacaagacaagcaaactttcttatcattaaagtattttttatgtgcttgactgtacacaaaccattatcgttttcatataaatgtacaatcaagagaaagttacctgaggtcattttcatagctcagaacagatataaaagcaagttcatgcccgtttacctatagcattacacaaaattcagagtaactacaacatggagtggaaaccaaattgaaaatcattgtacttatacaaaataggtgatggagcaaaatgcttatgttggcaaactttgagtgcaactggtatgatctaatgagaaaatattacattagagcatgttaccttatggcaatatggctacagaaaacatctaagtatgacattgtattcggttcacagataatatttgaaaattatgaagcaattctcataatcagaaacatgaaaccatgatagtcaatatctcttaaagcttagtgtgagtcaaaatatgcataaatttcgtcttgatgataacctgccacgaatcaatttgttgaaactaaccagtgcaatttccccctgatcagtagagcacattgtcttgtccatattagtcttgtagttccatcttagaatagacattagggagctttctcccaacacttcaagatctggcaaagacctgttaaagattaagaagtaagaattagtcccagtagctattactttagacccaatttaaccaaatgtcatgtaaaattgattcatcaatttattaatttgctttatagtggaaagaaagaagctgacaatagaaatagaactgagcatttcaccttatttcaattactccagtttgataaagaacaaccaatccacattctttctcatctttcttcaatgttgtagtccagcaacatggtttcacaagatccaccttgtgaatagagtcattgtcaccctacagtaacaaagtttcgttgacaagggagatgaaaaatacttgaaccggaatgtatatacggtaggaagttacctcaatcatagaattcagagagtacaagtgcaaggaatcttcacaacacagcaaaataagtaggttcattaatctccgatcaaaatgtccacttctaggagagtgtttcaatccaacttgtgagagttcatctatagctttactactttcaggtgatttcgatgaatgctttccactgccaacttcagatataagatcaccatctgcacacaaaagaaaaaaaagagtcctcagacgacacaaatcaaagtaaatgagataaattatgttcaatcaatttagctgtatttacttacctatgacgtgcaatgaaattgccgtacaattctttatttgttgtaaaggctgagagcaaaccggatttccggtagtgatatctcttacactaatatgtgcattcattgtcatagtgaacagaacccctgattcagaatcactcggaattttggattgagagccctttggactcttgactgagctattagcatctaataatgatctaacatccaaaacttttagaggggaacttgtctcggatgaaacatcagttagacttaaaacagataacgtattaatatcaagcattgcgacctgaaaagaagtatgatgaaaagaaaattaagaactctctaacgtttaactaagaatagaaaaaacacaaaggaaaaaaaaaacgatagacattgactgtacctgcccacagttgaacccaacaaaacgtaaggtttccagaattaagaaaaatagtaggtggcatataggagaagagaggatag

SEQ ID NO: 266769 - DNA, 3479 bp, Cannabis indica
tgataagattaatcaattaataacaatttagtctatacaaatttgttactatgtatataatttgtatataaaaatgagaatatatttcatgtagttaaaaaaaatgtaaaagtttttgtaaataatttgttttacatataatataataaagttttataatgtatatattggtgtaaatttaaaatttccttttattaataaatgacacaatttttttataataaataataaactcaagtggtgaataaataaaactttatttaattagatttttttttttgaaataaaatttattgagttagattacttaagtcaaaagggtaagggtatgatttggtacaaaatccaaagctccaacataaccacacatatctatttaaattggtccttttctccgaaaaccaaatcaacacatatatttgtatattcccacatcgctgagaacaaaataatctctattattgtcattaattaagggattattatattttttcaggagaaaaaaataaaattattaatcacaatctcatccttaatcctctctatatatacacacatatacatatttttagatcaatttactctctctttattccatttgttccaaagaaaaaaaagtttaaaatcttttccgtgatttggaacagaatcttataatggtggattctcagccttttcttcccagctctccaacccttcccacctctaacggcgatggccggcggcggcgacgacccatgaaagggttggtggcaatggtttctgggttgttaatggttgttctcttggctgccattattggccggaaagatccacgtggattctttcaccgtgaagatgatgaagatcaaaacgtcatcggatcgttgtttaagtctaaagaatctacccatccacagccagagacatttcaacccgcctcctctcgtggagtatcggccggtgtatcggagaagacgagtcagttattctccggccaaaacccggtggcgtttccttggaataatagcatgttgtcgtggcaaagaactgcttttcattttcagccagagaagaattggatgaacggtattttttttatttttaatttttaaaaattaatttctaattaaaaaatatactagacatgatgaagtaaaaagttttttttttttttaaaaaaaaaaagaaaagacatggcgaacaaggtcttaattatttatggctgtaaaaagtgtttcatctttttgtaaatctgaaatcaaattcaacacgaattatattttaattctgactaataatcgttataattttgaggctcctactttttgggtaataattcaaaatgaatagtaacgtttatgaattatttttggtcaaaaagtcaaaggcaaggtgttttcttttgaaatccataactttcaagccacgtggcaattttggaatggttggcaggcctgcaaaggcttggaggctcggttaaataggaagcacggaattagttttaactgttattattatcattattttcccatgtggtctctaatttttttaatataattaatgtatagtggaccccgttatagtgattgtgttgtgttgctgattcattttcttttcttgccaacggttacctattgctgctgacctggaattgatgacttggcatctactacttcagatccaaatggtaagtcattattattttaagtaatgatttttcgttttcagtgtttcctaattgtgatgatgttgtttttttttttaaatggtaattgtgattttgtttacttatatctgatttgaaagttttcaattttatttatttatttatttgctgtatagtttaacttttcatgtcgaaaatcacatgatgatacaaagaaaataggaaacacaaggacaccaatcattgtcgttaaaaaaatcacatgtccacagctatatatgtcacattaatgcacgtttttttctattcaaacttttatatgcactaatctatatttatttttttttctaattaagatttttacccttatattttaacatatactaaatcttgcttcctgaatttagtaaatttaaaaattcaaggacatgtaactaggtatatatcaaagtctgggaacatgatttagtacgtagtcaatcaataattgagggaatttttaactgccaaacctcaaacaggacatgatttagtacatgttaaaattttaaaaaaaaaaaaaaattctaattaacctttaattttttacaattaacattaaattaagattttggtgtgatttacaaacaggtccattatactacaaaggatggtaccactttttttaccaatacaaccccaacggtgcagtgtggggagacatagtgtggggccatgcagtctcctccgacttgatccactggctccacctcccactagccatggaggcggaccaatggtacgacgccaacggtgtctggtctggctctgccaccattctccctgacgacagagttgttatgctatacactgggtcaaccaatgagtcagtccaggtccagaacctcgcgtacccggctgacccatctgacccgcttttaatcaaatgggttaagtactctggaaacccggttctggttccaccacccggaatcgacaacaaggactttcgtgaccccaccacggcttggttgacatccgaaggtaagtggaggatcatagttgggtcaaaggttaacaaaacagggatctctttggtttatgatactctggattttaagagctatgaacttttggatggtgttcttcatggtgtgcccggaactgggatgtgggagtgtgttgatttctatccagtgtctacttctggggaccatggtttggatacctctgttaatggggttggtgttaagcatgtggtgaaggccagtcttgatgatgacagacatgattactatgcaattggtacttatgatgagaagaatggtaaatggattcctgataacagtgagattgatgttgggattgggattagatatgattatggtattttctatgcttctaaatctttctatgaccccaaaaagggaaggagagtgttgtggggttggattggtgagtctgatagtgaacttgctgatgtcaagaaaggatgggcatcacttcaggtacttaaacctaataattaaagcattttccctataattttcaatggggtttttgtataattgagttttgtggtaaatctatttcagggtattcctaggacagttgtgctggacaagaagacaggttccaatctacttcaatggccagttgaggaaattgagagcttgagattaagcagtagagaattcaacaatgttgagcttaaaccagggacaatagtgccaattgatgtaggcacagccacacaggtcagttgatcaacattacataattactattctttcttttcttgattgctgataataaattcccatctaacaagaaaagtttgtcttataatgaa

SEQ ID NO: 266770 - DNA, 2402 bp, Cannabis indica
agtttagattctcatctttcaggttaagtagcgcaatgttagttttcatacataaattaatagaaaaattcaatctatttttctttttagaaaccaagctagttttatataattatcaatggaagacccattataataacataaacaaaattgtttacatatgtgtgtacagaaagagttggcaatggaaatgttttaagttggaaagaaagacttcaaatagcaattgatgcagcacaaggttagaaaattattaatttattatatcaatatagatgtgtaatgatttggtatcttattattaatatataaatttggtacaatatgtttttaaatatatttatttctaccttgtattttgtctcaaatttgattaatttcatcaaattgggttcaattatatatatgagttataaatttaaatttatttatttatatatttattatctacagataattgagagcagtttgaacaaattaataaaattttattaattatatttatgttcaactagggtactaaatatgcataagtttttacatataaatatcaaatgaacattattaaaaatttaagttacgtaagtttgattttgttagaatcgtaaaatgcatgaggttctatctcaaaatcaatttgtaataagagaagtagtccatatagatctaacatcaatccatcctcaagatggtgactattttttacttactaatctttcacggctcgatcacaagtggtactttggttcgcattggttctttttggctcactattctcaaatcaaaagtgactctttggctcttcttttaattatgaccaatttttggattttaaattggatttagagtttagtttagctctcatactatgttagaatattgtaagatacacggaattttatctcaaatccatttgagaatgagaggagtagctcatatataggtcttatatattctattattttccacacataaacaatgtgaaaataaattttaatgataaaagaaaaatgtagtaaaaaataaaaataaataaaataaaaatatttttatatttggtatgaaatgaaaaactgtatggaaaaatgtttgatttaacaaaattttccaaatcaattaacattaaaaatttgatttttttattctccacactttttttcctacaatttccttacatttttgtgtcctcatagacctcacccaatgtccaactttcaaacatagctaatttcaagtttcaaacttaattttttataaaaacacaagatattaaatttatattcccctttcttattaacaaagtaagaatactgatcaaatgcaggattggagtatttacacaatggttgcaaaccgcccatagtgcacagagatgtcaagacctctaatatattaataagtgagaattttcaagctaaaatggccgatttcggtctatcaaaaatttttccaactgatgatggtactcatgtatcaactgttgttgctggcacaccaggctaccttgatccagagtatgtatctgtacgtttaaggaatttaatggctagttataataatattacaaagtctctctaaaatctagtttgatggcttatcttcaggtactacattacaaacagactaaatgaaaaaagtgacgtttatagtttcggagctgttctgctagaaattattacaagtctacctattataagcagagcccaggggaaccaaactcacctaaaggaatgggttagtgtaatggtagcaaatggagatattaataatatagttgatcgaagactaaggggatattttgaaataaactctgtgtggaaagcagttgagatatctatggcttgtttagcacattcatccaatcaaaggccaaacatgaatcaggttgtgagtgacttaaatgagtgtttggctaccgaattggctggaaagaacaatagccaccaaaataattccacggaatcaatgaatgaaatgtactctatgaatgtggttacaccattgccaaggtaaaatgtaaaatatactaccttacttgattttatttccgcaatgtcttcctccattgccaaggttccaacctttattttagtctccaattattgtcaagtgttatataattgaatatgatactgtaaccatatttcaatttatttttattaaaatctgtactttataccattataatggctaccattactttgtttgtttgtatcgaacaacaacaacgcttgcctaatatttttttttcgtaaaattacatataataaatgttactttgcacatctatttgccttatattcggtaacattattattgtttattgtggacaatgtcccacatggaataaatagtagagaattgagtcatatataagaacatgggctactccactcattgcc

SEQ ID NO: 266771 - DNA, 2098 bp, Cannabis indica
tgaggaagcaaaaaaacaattagatggagtaaaaggagatctccgatccttgtacgttgactagcggttccaatacatcctcttaaaatataatgattttggatttggtatcagtatttgtgacagccctttttgcataagtcaaattcaataggtaaaatagatttgggttataagcttgccagatggttaatttctatctataattttaggtccattctttatctcaattacacacacagctatatgtatgatagccatttaaatgaaaccacgtagtaggtcctagtattagggttgttatagaaatatatagaggaattaattatatattcgtaccatatgattgtcaaataggttgtacgactcagatctaatcaagaaactgacgtcactttcttggtgaagacttggtatctttttggaataaaaaaaaccaaaacaaaacaaagcatcatattttgtagctaggtaggcggtgggatgctgccatggctttcagctgcaacttggttaggtgcagccccatcctatacctataggtatataacaaatatcctcaactagctagacttgagtttagtctattcatccactaataaaccaagtcctcatattgaaagataactaataagagaatattggcatgtatggattcagtggttgataattcaaactgttttattgcttttttacaattatatcaatagtaataatgagataaattaacgacaacgtaggtaatacagttcttaaaaataaccaatatctgttttccattaagtgctgcaagagaaacaccttagtaagcttaggtttccccaagtcaaaagaaaccattttctgtcttacttgtatttctttaccttactacttttctgctagaagaaacaactgtacactgaaaatgcaatagaaaattctacttcaaatctcatttgcctttatttgttcactatattgcagtttcttctataataaaatattattacaattgaaaaacaaaatacaaaatacacatgttcttgtcatgattacgcatttttgccaacttcgttggaatgcttcaacaaattaggcctgtatatttgcataccactttatgaatgattttcttttctttttcccgacatttgaaactttattattgattaaaatgtcataagtcatgccaatgtggcccccattttcaagttgcacaagtcgcagtcatgggatactggcctcacaagctaagggctataggtgatcattagctgaaaattacatccagcaactttttctaggaatctatacgtaaaaagaaaaaggtgatgctttggaatacacccatctactaattaatttttagaattcctttatcatccatcaatcatcaaaagaaagcaatatctatgcctatggaatcttccctttgaggactattcaactttgagtggtcctctctcacaagttggggtaggtgattatatcatggactttgttatggcttaagggattatgtttttacttcaatgacttagaagtaggaatattaacttgatattagagattattaaaacacgtattgctgtttgaagagagaactagagaatctacatttttaaaaaggagaagaaaaaaggtcggctgatctgcatgaaaagtaggatttctttccttttcttttttgggggggttgaatggaatctagaacaaataaaaattccatatagctcaaagtataagaaataaatgatatataagttggctgaattagtatttggtacctttagaaacttatgtggaggatatgcatgggaaattacttcttgtgtgattgagaagcctccagcagaactcataatattgaatggatatatttgctatgtgattttaagttgagttatgtgttaaggccatatacaaggtgctttcatacttgataacacttctgtggcttacatacgaactggataagataataaaatgcaggcattcaacattgctgatgtgatatttggaagttgaaagtgaaagataagaacttactaatcatttttggattgtcaccaatgtgaaaatctgcccaactttgatccatcattaaaaagttttt

SEQ ID NO: 266772 - DNA, 2951 bp, Cannabis indica
aagaaagaaaacaggattacattaaaggccaggccgcaatagcccaattatccaaattatgggcacacaagttacaatctatgataataaagttaaaagagcaaccatcctttaactaaacatgtatttcatatggaaacgatactacatggaagatattccatcatgtacatttgatctaaacaaaacaaaacaatggaatttacactatcaagttaaaaaaaaaatcacattaaggacatctttattactatattacatgaaacattatacccttaaaatctatacattttaaaggtacaccagtggtggttgtagtagtagaaggttcttgtttcagaaaaaaaaaaacaataaaaaatttagacacaatgcagaacaataaatttgcatattgattacgaaagaaattaatgaatgagaattagtggccaagtaaaaatgaagaaaaaaatctcctaaaaaaattaataaaaaaagggaaaaaaaagacctctttcttcatactagagttcaatttccaacatggaccaaaattcgttttttgattcttcggcctggaaaatggctacaatatgaactcccaaagtcccaaattccccttcggcctttaacttagttgaaaaatataaaacaattttcaaagcttaaagggggaaaaaatttaaagatactaatatgcaagggagccacaaccatatgtccaagaggtatacatacttttatctttataccttggatggtttttgtcagttgtcttcattatcatacaaagattctcaaaccattaactgttcttaacatcttctcaatcgttgcgttaatggggcaaaatataattgtttcttcaatatcaaactctcttcagacatggttgactcccaagagaactgtgatgaaggtagccagaaagaatgtagaaaaccatgcaggaaaatcgtttcgggttgacaaagatttcgaagcaattgcagttgtattacttgcaatagttttgttgctcctgcataagaataacagaacaagagaagcaattttagattggcattatggtattgagaacccaaacttttgaagctaaagttgtctcatgtttataagcttacccagcagtcatgtagagacaactgtcatagcctgcatttttgaaacatgaacttatgtgagtcaagagaagattttcaagtatggcacatttcacagttagataagttaaagctttaactagactatatcaaataaaataagctgcttaaaaacttctggtttttcatgtcgttttcacagattattgccttagcaactagtttgatgtgttagtttctttttttgcaatatttctgatacctaaacaagaataaaataaaagcaaagtgtttacatacttgggtccttgtcaactctaatcccagcacctccaaagctgcaagctatttcgctagccccattttgttggtagtagctgttaaatgcataagaagcatgagatgccagattatctggctcataacaaggctggctaggctggatagctgtacagtccacatttccagaaccacaagcccagtccagtgcgctctgcaagtccatttcagaggacttgtttgaggcgatgcaccaagtatttgttccatttgaactggtagaattagaccctgtagctacatccacagagccttttccagtgaaatccaggttatagacactagtctggtctggataaaataatccccagtttctttcagattccaatccgggtttcctgttctcattgaacaatgaaaatatatacacatcaagctcctctccagtctttgcaggagtaccagtattgtttatgacatggcgaatgagattggtattgtaagtttgagcattatcaggagtagcagccgtctccttaggagatcctttggaaggccagcctgtttctgtgaccataactttgattgttttgaaattcaaagccatgagtgcatagtagagagcatcaatctgagcatcaaacatgtttgtgtacaacaaaccagtatttggatcaattacttcagaggaagactcaaacaatgcataatctagagagatattgctagctgaatctctataagcatagtaaggataaatattaatcatgaatggagaaccattttctgcaagaaattccagcaatggtttgaggaaataagcatggctactattaaaagcccccgcggaaggagggaacgatctagacaaaactccaagggaatgagtgcttgagactctaatcttcttgtgcagaccggcctttttaagggctgtaagtacatttttcatggcagggacaactaaagcagaaacattaccagggctctcagtaacttcagcaccaacagtaatgtatgtaatctttgtagctggataataaggaaggatattgttcttaagccaagtgtctgcattggtttggaactgagagaacgatagcaagtccgaattggggactccaatcattagttcaattccagtgttggcaaaagccttgaggacttgaacattagagtcatatatcctcacatactttatgttatgaagtttaacaagctcagctgccttgtccggtacaggaagatcatcagcatttcttccatagcaaactccaacataacttccgctgcagccgtctgccaacaaaaagtttattaaaatcataaaacttactatgttgcctacacaaatcatatataaactaggagtttctcttagttttgtagagaaggtctttcttaattaacaaaataaagttggtaaacattgcatagcaaacaacctagttaaacatatcacatttacatgatcaaactttaaggaaacacagtttatgatggcaacatggtccaatctaccaactgagaaggataaaactctgcaattaaattctcttaaaacccaagtgtaatttgaaccttaaa

SEQ ID NO: 266773 - DNA, 2230 bp, Cannabis indica
ttaaagttcggggggaaaaattaataattagcttaatttttattcattccaactaaacaccacctaacctcttacctacatacctcttctttaatgtaggaggaaatattcaagccatggttttgaagaacatcatcgatcacttcattaccaaaattaagcatgccaagatagcatgttttcaaataaagaggaaattcatcccttattgcccttatgtcccagctgccaaaataaagagagaaaggatcaagagaactgaatgaaggctaagagagaaagagaggaattaatgattataaattaaggaaaatgattgcctatttcagacctttctactgcatttgtgaaaagttcaagctcatctaatgatccatatatgtcataaacatcatctattgctgttaatatgcaaacgaacttggttaagcctatcctgcatttggagaactgtggctcagatacgattcccatggcccacaaatagttctccaccacacgatctcttgcaaaaggtagatttttcttgaatcccaaatcatcccaccacctgtattttaattataattcaaacacgcatgtgcttttttattagtttcaacttttattctaattatgctttaattgactaagaaaagaataattagttactgatcggataaagttgtataataatatcattaattacttaccttcccaactccttaagctcattttgatgcacagattggaccagattataatccaacttagccaactcaagcaaagtcacactctttgtctcatccatttggtagagatcaatgaaattcctagcttcagatcttggcatcctccaatacagtggaacttccagtgattgtttcacttgcttaccaaacaaagtagtatcaattttcccagctgagaaatatcttagccttttggtggtgaaactcttggcttcctccaaaacattttcttcagccattccaaggtgtgaagcttcatacaaactcaaaattccatgcttgttactgcttaagctgtccaagaatttcccatctctgcctctaaatctgtcaaacacatctacattcaaacaaatatttgttatatatatatatatatatatatatatattcaattcttctgatatatgttattccataaataatttacgtatacctgagccaacaaataagccatgttgcctaagaatacgaaatctaagtgctgtcatgaagagatcattactagtagtttgatcattatgtgcgtaaatgaaagaaacagcttcttcaatctcattttcgaagtgatattcgagtcccaacctttggatagaatcaataagcttcaagagaatacaagggtcttttgtggttctaagtgaagtactcgtaacttgcttcaacttttgtagtcgttcagagtgtaactcatactgcaacaaaaacaaaattaattaattaaccttagttttaaattaaataaatatgtataaatatgttatatataaacgtatatatatatatatttgtagatagtactgacgttgtagggagtaaagaaagagtcgatatgcttattttcccaaactgtaggatggtacttagctgagcgtctttgctggggtcgtagtactactagtattgatgatcggaatcggttttttaatcttgtattaattgttgctgttgatgatgctgatgatattggctttagtggaagtagagaagtaaacggggaataaataatcgatgacattgatggatagagctaacccgaatcactcatccaagttttaattgctgataacatctaattatggcacaaatatatatacaagtcactactagtgctcgtgggggtgcttcggaccataagttttaaaagaaattaggtggggaccataatttttaatgattaataaaataataataaattgtcagatgaagtgtatacgttacatattgatatttttagtttcagagaagagaaagacagagagaaatgaacatgaatgaaaactaacttcattgaattaaaacagagtaatacaatgatgagaacctgcaactcaatagacaacaaccagcaacaaagcaacacaccagcaacaataatactcaaataaccagaacaccagcaacaagaatactcaaataactcaaataaccagaacacagtaggaatgattcaaatggtgagctattattgaattgaaacacaatgagatgctcttcta

SEQ ID NO: 266774 - DNA, 3110 bp, Cannabis indica
tacgtttaaaaatcacgtaatatgcctatgctagttagggtgttacagtcattgcatatcttgaggtacaattttcaagataagacatttaatgcttcagacagtgaagagacactccatcagtcatgtcggatcagtggtaaaaactgaacacgcgtcacccatccaatcagcttcatgactgaataagtccatgtgtgatcaaaaagctcacacgcggacttggggggtaaatgttatccaaatatctacacagggtgatgtggcatccacctgggtgacacgtggaaaagattatatgacctggatggaagattccactattgatgaaccatgcaggtgtagggaggttagatactcaaagtgagcagaagctggaacatccaagtagggcatgcgagaacacccgactagctttcaacatatgggtagctcgcataagctgaccagagaatgcgagttagatatttccagatatatatcccacacatctttgtgcttgtaaaacacaacaatatacctattcccatgagatggatatgcaatatcaaggaagaaaggcaacttggctagttttcaattttgctcattgtaattatagaaagtaaatagtttcctcattttatttcttattagttttgaaaaaccaattgatgtaattcatccctataaatagtggagtcatctcactatttagggaaaaattcatttagagaacacaaaatctagattcaagagtaaaatacttagagatcattgtaagagctagactattactatcatcaaggggccaaacctctataattttggtattttctttacttaatcttaatttatatttattatttaactattcttaatcgctttaatttaattcactgtcattggctaaaagcgaggtcaacaaagacttttgtctaattttccaatagaaagtttgacatagataaaaatttaaggggtataattcggtacatattaaattttagcatgatttagtacatatcaaaatttgaaaggagaacaatttagtacataaacaatcaccacgttagtaaaattgcatgaaattggatatgaattaatctttaaatctaacaatttagtagtttagaataaatttttaacgacttgaaaaagttcaaaagacataatttaatacattttaaaattcagaaaaaaattataattagtttttttgttttttttttccttctccaaattaccaaataatatttttgctgggtaaatgggggaatgtgataatcacgcgatgagaaaaacatttgagcaaaatgaaaaagaagcaccacactaccaattgcaaaccattcttttattttcttattatttatttaaagagagagagagaggggtaggactatgaatgatgaaagaaaatgtagcttaaagaaggaacacaaaagggtcctaccttattgccatagatgtggtccctaactaggaatattaggtcccacattttactacactttatttttaataataaataaaataaaataattatttttgtgtctcactcaaaaataaaaatgagaaaatgctcctaaagtggaattggcattggcagtagcagtggcagcccatatgaactgtttttcccagatgacacaaaacaaatataaagcaaaaagttaaagcttaattacaaacacctctctctctctctttctctctccatattctacagtagactaagagagagagaagaactagggaggagggtagagctccatagctcggctctactactactactactactcaaaaacaagaagaaaaactgcccactaaaagtaaaagcaggaaaactcattttgtttgttcattacttgagctctgtacaagaagaaggaagaagacgacgacccactacgtaatttgccaaaataaaaccgacccaccgaggttttttttttttttttggtctcttctttttgttggtgctgttgttgtcgttgagctagtgcttgagttgtacgggattttgccgtacacgattcgtcttcttcgtttcgtttggtgcgtttgtctttgctggttgtcttcttcattcgagcttgtgattttccttttttttcttctcatttatatatatatgtatattttgactgttttatttcttcactcgttcaattctcctttgctgggttttttattttaatgttgcgtggagatgaaggcttgaaatgagaatggggaatttggaattcttgttaccatttttgagcaagcaagtgggttttgctttttttgggattattgttattagtataacatacttaatctagggtttttacatctagtaatgttttactcatctctgtaatgtggttgatcaatgtttgaataaatatatatttcctttttttattttttattttttaaaaaggagagaaaactgatttttagttttgtgatcttgtgggttttctgggaacatcccaaataaacaaggttttggtagtttaaagcacttgtagtaatagaatgagtgagtgttttgattattattttataaataattttttatgtggtctttgggtataaatttgctacctaaacatttgactgatgatgtatttagaaacgaactatactataaacgttataaatttcctgttgttttgacttgatatgatccttgttatagaagtttactagtattttaagaagcctaatttcctaagatagtcaaatgggtagtgttttgttttgtggttgactgcttagatatccgtagatatatataattacatgtatgttgttgtgtggaatagttaatcaatatgatcttaagtggagtgttcccattaaccaacatcccattttttcatatgcagatttgtttgagtcaaagatttcttcatgcaaaactgagactatttcatggttaagggactatggagtttataccagatccaaatatgattcctgggaaacctcctattcttaatgaggtatcaaattcacacccacattcacatccacatcaacatccacacccacacccacacccacacccacacccacacccacacccacacccacacccatacccacattcacattcacatacacataatgcc

SEQ ID NO: 266775 - DNA, 2587 bp, Cannabis indica
tgtggtacaatggttgtaccctagtaaagaacattcttactcatttgttaagccttgtaaataggtgtatgggcgcctagatacaagttgatattatattatttgttatatatttttcttactaagtctgttgactcacagttgctacttccatgtgtaggtaaagcgaaggcaaaagctaaacaggagtgagctctgggcgagtgttcggtctcgggacatctggggttgtatttttgtagtcgctgtgtgaccaaattttaatatattttgagaatgtttgtaaagtttaaatatgggatcctgaccttttgtaaataaatatataaaacgatataaaatttagtaatttaattaaaattaatttggcatgattttcaaggaaaaccctttgactagcaaaggtgggacatcaattagaaaatcactatagcgtatctaagttttaggaagttacaatccgggagcgtgtaatccaaaggccaatcattaatcagttatgttcgggaacaattggaaacaccgaagacagcaacaacttgagaagtgactccaatcacttcaaatacatagatccatctaactccactaatttgtgtaatctaccccctgtcaacacacatgctacaccatccaatcacagaagaataggaggctaggccctacctagtgtagggatagccggccatgagcagtagcctagagtatggctggccggctaaggccatttcccctacccatgagtggctggccaaagccagcaatcatgtctaggcctagccagcctcgagcaagccctttcacagggtatggccagctagactttggtcaatttagggcagcagcccatccaaaaagggacaattagaaaggcctctacaacatcggatctttttgtgcaagcgcagttggatcagataagatacatgatcaagggcctagctggcctaaaaccttcagatcgtgaactggataggtcaaggggttcatcagtatggaagatgtataccagacgagaggacccattagcacacatcaagtacttctagatgcaacttgaaccttagaagattaatggtgatgtgcagtgtcggatcttctcaaaaaccctatcaaaaacatcttaacaatggtacttcaagttagctccaggaagattcaattcttggagtgaatttcccaaaaattctacaccaagttcttatcctcaacactgataccatcgtaactggaagatcttgttgaggttaaactacgaaaagccaaacctttgaaggattacgtccaaaggtttattgccgaagccaccaaggttaaaggcctaatagataaaattcgagataatgccatacttgtggcatccttccattgagtgacttctagaaagatatttggaggatctaaacgaacaatataacgagttccttgacagagctgacgactttatcaagctagaggaagctgtttaacaagcccaatcagggcaagtcaaaaatatgcagtctaagagtgccctacagccccaagacatgcaaagtgtgcaaacaggcaataaatattctgcccaaacctctattggcataaacactaggggcaagtgcaataacaacaactccaaaagaaacagtgtcttaatagagataaagtattgaggccttatttcagtaattatattagttcactgaaatgtcatttatatgtagttaagtgttttaaggataaaatacattgaaggatagaacaataaatttgtccatattcgatgtagaatatctatagaggatctttgactttttggagtcaaacaatggataattcatagcatatctatttcttggtacatatagagcgttctatataattaagagtgcaatttcgaattgatagttgtgtaaggaggaattaataagttaaagaatttacttggtaaattcaagttctacttattggaagcttgcatagataggcccatggtctccacacttgttgagataatactacttatagactcagttaattggttttaatttatcaattataattctaaaattagactatgtcttatttatgaattttcgctaagcaagggcttaattgagaaaaaagaggttttagggtttatttgttaattaagagactttgttaagtctaattaataaataagataaatggcaattttatttaataattaattataatcattaaataaataattttgacatttatagaattgaaattaaaaaatatggcataattgaaaaaaacgatatagttaaaataaagtggtaaaattgtaactagtgaggccgacatgtgtggccgaccacttagtgtaatttttcccgttattttatcttttttactccatataattaaatcctaaaccctagttgaaatactataaaagaaacatgatgctcttatgctcatgaaacctacatcaaccaatctaaacctagttttctaactctgtcaaacaactactaagtgagagtttccttctatattgatttcgaatcattcttgttgttcttctattaattcaagcctttagtgatagagtaccacgcccacacatagcaagtca

SEQ ID NO: 266776 - DNA, 3207 bp, Cannabis indica
aaaaaaaaaaaaaaagtcaaactaactaactttctcttaggcgtagactaacttaactgtcataacagaaagttgttgtctttagttttctgtggatgatcaactccacatgtgctttgtaggtttttcctgaataaaaaaaaatgcggtaggttcttttagctaagtgaaccgaaaatcttctctttaattttgatcccctttttgtcgattgtattgagtttagagggttgtgtttgaaaacagtattccaagttgtttattttgctttgcgcgctaacacacatatgccttaaatatgagttgaaccatgtttggctgactgttctcatttcctgagttacacagtgtctggagcctacttgcaattcttatcttgatttaagcgactcttcttctttttcttactatgcctttataagtctatcgaatcgatattcattcagctgttctaaataagttattgtttgtgtatattgcacttggttacatttttcacaagcaaggtaatgtaggttgaaaagcttgaaaatagaattaagctaaaaatctataaggctttttaaaataaataaataaagatgacatatctgatggtatatggatgttactaaaaataaaataaaataaaatgagaattttactgtctttcttgtttattttaattggtcatagaatttaaacaaatgtaagttcaagaagtattttttttttctccaataaggctgatgtaggaattcaattgagctatctggaaaaatcagacttgacataaaatattggcatttgtaatcaccatactatgttttaataagatgtttccttgtatattttgtgtgcttgcattcagcttcttacttttgttttattcaataggattccttagcttttatattggggttgagatgaataaggtggttcttcagcctatgtttcaataggatgtttcctttatattttgtgtgcttccattcagttcttacttttgttttattcaatatgattccgtagctcttatatttgggtttgagatgaataaggtggttcttgttttttttttatatgttttgttagagtaattgttatgtacttgttctattctggcatcctttctttttgacaattttccaattttgttgagaccatagtttgggctttatagatttagatgtaaacataagatattacttgaaatagacttaggtttgttctgttctatttacagggatgcaattggtgaattcttaggtcttttgtttagtgctatagttgcaagtgtgagccaaaaaaaactttacgctaaaatgaattgttcttgctaacattaacttcttaagcacatcctgttaaagcaagttctttctaatgaattttatagtcaacatgttcaaagtctcccctaaatctcatatggagttttctctaggtattttattctactaatcctgatgacagatacttataggcatcatagacgctggcttgctgagaaattgggaactattgctacgagcaaggagcttgagtttaccaagaagatactatctcttgatgctaaacattatcatgcatggtctcatagacaggtttgtgtctattactgttaccattgtgctttaagttacatacgataaagataatgttttccctatgtaacttgttcgcttttaaatgtgtaatgtggacataactggatataagttttgacaacacttaagatttgtttatatgataattgcagtgggttcttcaggcactaggagggtgggaagacgaacttaactattgtcatgacctcattgaagaagatatttataataattctgcttggaatcaggtatagtacaattactttgtgtgacaactacgtgctacgcatgaatttgcctataaaatggttaagagttacacagggaatttgctgtggcttttaattaaatttgtaacagtagttcttaacttgtgtaaagcttatttacaaacctcatgatatgcaatcttattttattcttaattattcaatgcccactatcaggctcctaagttttgctaaatattctttatgcccataaattttttctatgacagtatttaccataatagtgaagtatttggtatattcagtagttaagtctatcaaaatagaaactagagttacagttagtctcttttatttttaacattgcttagagttttcaatattctgttctgggcatattaagttggattttggtgggctaatggattttctgtatcttctgtgtgatagagatattttgttattacaagatgtcccatcctgggaggcttaattgctatgagagagtctgaagtgaaatataccgttgaagccatcataacccgccctgataatgagagttcgtggagataccttcgagggctttataaagatgacaaccagtcttgggtgaatgatccccaaatctcttcagtgtgcttgaaagttttaagcaccaaaaccaacagtgtctttgctttgagcacgctcttggatcttatctcccatggttttcaaccaaacaaagagttgagagacattgtcaatgcaataagttttccagaatcagattcggacttggcaagaacagtgtgcactgtgttggaaagggaggactctattcgagctgactactggaggtggcgcaagagcaagctttctcaagcatcttgatctttagggattaaggtcttgtttgtttcttatgattgtaattttactcaatagatgaacaatcacatccaatcttattactacaatagtatagtttgaaagatttctcattgatctatgttttcttttcctaaatttggataatactgactttgccgaacacaaagaaatatgcaaggcttatttgcacgtggttctcatccttcgtttgtgttgacaaattatactttactccctgttttgttttgcaaatcattgtccaaatttttatttttatttttactttatatatatgggtggtattacccattcatgaaaagttgagtttttatgcttaatttttctatctaattaattttttttttcatttttacattatatgatttgagattgttctatcgacttgaaaaaaaattaagaattttttttttaggcaaaaaaaaaaaagaattaagtttgacttaagtagtttgtatgtaaatatatttttgatatagtgtaaaaagtgataattt

SEQ ID NO: 266777 - DNA, 2467 bp, Cannabis indica
ataaaagaaaaaaaaagaaatccatactcaattcatactagaaacttttctctgtaagagtttgttcattggttcaaaattgttcaatataatgttccccaagttcccatcagagactagattcatcacaaccattactattgcgaaaagcaagaaatttgttccaagtacctgatcggactattctaacatacatacatacatacacacatatagtactcaaggcttagatgtatcagatctcactttgcaatgctgttaaaaggacaaatttccaccattggtataattcccgaaaattaaagtactattatgatattgaataatagtcagatttgaaatgagatacagttatgctctttaagttttctagcatagttgctgcatgtaaatagaccttgctacgtgaaacattctggacaaaaattaataaatcaatcctacttccctcttcctaagcctcaattcttctcacttctctctctctatcttctttctccatcttcctttctattatttcttattacttctctcaagcattttacaccagaaaatatagcttcaagattctaatttttcttttttaagtgttctgttctaagctgtgcatgtcatgagaaaaaatcaacctgaaaccgtatttatttacaccctaacattgcatatatcaaaacacattttaaagcaaaaccaacaaaaatctcatgagtcattcatataaattagcacacaaaaatttcatgcaatataacaaaaagtatgaactaacctttaattttattaaccaaccatttggttcctccttcgatgctggttgacaaggactggtcattgggagaaaagagtcagcacagaaacatgttaaagaatcgaacaataatagaaaacaaatgcagggtatatggcgtactagctttcgagagacacataaacttaagctagattaatataaaaatataaattatcctagtacattgtctaaactctaagtaaaacagcaggttaataagtgatgtaccattaaatgaatttttagcagatatgatattggatacatgggcaagagaaggacatagaaaagtttaagcttaggccaaacttctgcttcttcatttgaaaaaaaatgatgttaaattactacaatgttgattggagttttaatttcactttcacactttttttttaatagtgataataataaaccactttcacagttaataacttaatataactacaaaaaacccaattgtcagttacatttttcatttaaataaagtcttaattacaattctatatacagggacaaaaactacaattaagtaaagccttaattacaattctatataactcatctttaagttaaagggacaaaaactcttaagaaaaaacaattttagccaacaatttcaaaccttttgaatgccatactataaacaaaaattaaactcaaatttggggttacaaaaagatcttacaaagccaccttagcctaaagttcttaactttctaaatgcacgtagttgattattgagaacccatttacttttcttgtaagctaccgacatcaatcacaattgtaagtacatataataaaaataatcaacaccaatgcaactacatataataacaccaatccagaaaaaaaaactcatcaattggtcctcccaattgagttttgtcctaatcgaattatgaattttgaacatcaattttaacataatcgtcatgtaaaacccctaaattctgtcacaaacctaatcaagaaccctaaattaatcaatttccgaaactaaaatcttaagaaacccaaaacccaaatgaattgatgggagaatgtatgcatataaaggttgataattgaattaagggatatggaaggaagcttacgttgatatcatcaccgactgaattgatctccttgttagccttctggctgaaccaatatgaacccaccttgttcagtatctgatccatgttcgctcttgctctctctctttctcttcttcctctctctgaaaagatcgaagagatgttcgatgaagaagaagaagaagaaaattgcaggagagagattaatgagaaattgcaaagctggtttttcttttttaaataattaattaaaaatttgttgcgctgagcacgatcaaactttagtattcatcttcacccttcattttttctttcattaaccatacattattttttttgaaaaagttaccctctaaactatttcttttattaactttttttaaatttacgatttaagtttctaaaatagtttctccagtagttttcatgtttccgctaattacaataggagtttctataaaattccgtaaaaaaatcaaaaaaaaaaaaaaaaaactatttaaagtataaaataaaataccctattttaccaataattataatatttttctactattaaggaataacgtactattattgatataatttagagtaattt

SEQ ID NO: 266778 - DNA, 4361 bp, Cannabis indica
gaatttatacattaaacataatcatgaaataaatcatgtgaaccatgcaacataaaagaattttatgatctttacttattagtaaatctgattatattgaaatgggttttaggcacaaaacccaacattatcgtcggacgcaaacttgctcagtaggtacgtggtgagtatttagagatttacagtgattccaaattggttgtaaatcatattctgggagaatatatggtttaaggagaaaagatgatgtcatatttcagtaaaattcgagactttcttgcacaatttaaatgatataccatcaagcaaattctagagaagagaatgctaccgctaatgcacttgcacagttggcaagcaacacaatcatcgataaagcaaatttgatcccaatttagtttttaaaggaacctagtttcacttggatggaagaaattaagatattggatgacacaccaaactggatgactttaatagtagcccaccttaacaatggtaaacttctaagtcacagaaatgaagctcaaaaaataatgagaaaggctacacaatatttgatagtggatggtttgatatacaaaagaggtttccacatggctctactaagatgtgttacaaatgaagaagttccacgactcttgactgaggtcaatgaggtattgtgtggtaatcatattgggggcaaagtttacctaagaaaatactaaggaaaggtttcttctggccatcaatgattgaagattgaaagacctacgtgaagaagtgtaaaaaatgccaaacgttttctaaagtccctcgggcattgcccaatgaattgatataaatgttgaacttatggcccttcgccatatggggaatagacctgatcgagcagttgcctaaaggaaatggtggagtccaatatgcagttctagctgtcgattatcttaccaagtggacggaagttgaaccactagaaactatcacctccaagaaagttttggattttatgttaaaaacattttatttcggtagagacttccttaaaaaattgtttcagataatggaaagtattttcacagccagatgtttactaaattctacaggatacaagggattataaaaaagctactcagtagtcgcacacccccaaacaagcagacaggtcgaatcagtcaataagacactgaaggacactctaagaaatgacttgaaggagctaagggaaattggattgaagaattacccgatctactttggtcatacaaaactaatgagcagatgaccaccaggaaacccccttttgctatggcctacagttatgaagaaatgtttgcccatagaattagagcctctgtcccacaggagattgatgtacaattaagtggccaaccacatcctcctaacagagtcacttgatgaaattgaagaaggaagagacttagaaaacttaaagctacaagctcattagtaaaaagtagctcggtacttcaataaaaaagtaaaggcaagaaaattctttgtgtgggatatggtactcaaaagagtgttccttaacactaaagacagtgaatcaggtgtgctcgaacctaattgggaagggccataccaagtaaccgaagttacgaaattaggggcatataagcttggtcagtacgatgaaacatgaagctagttcttgtaccaagagattggaatagtgaacacttgagaaagtactaccaatgtaacatctctcttaagttatggccttatgtagagctgccgtccaaaggttgtttaattttattgatagagaattaattaattagagatttttgattgattagaagaaatttaatgcaagtatttttatgtggttagcgtattaatgagccttagtccacaagccactgctaattaatatagtagtattttacagagagtgtttacaccattttttctgaccccttcttcagaatatagttggggtatttatagccttatatagaaggagaaaaggttactattgttgcaagtgtggaagcattacttgcacaagttcccaagttcagataattggatatgtatgtctgtctggtaggttgtttgggattttcctaggtgtttaatgagataagcccttaaccttccttgattgatgtgatagtttattatgcagtcatcacaagactcatagatcagagtgtaattgctgaataatgttattaatgcatcaagcacgtcttttcagacccattcatagacgtcttccccatgttgcatttaatgtgcttatatcaattcacgtttgggatctaaccatcgaatttggacattttatctagctcctgaggtgagcataattcctgaattagcatggtgtgactgaagctcgaagaggggctcttggacatgaccatcaggttttgggccattctcttaaagagtttattttaataaatcttgacttttacacttttttgccaactgaatgactccgagattgccacatgtattagaaaagttcaagggcaacatttacccccaagtcttatttttgcatctttataaaatgagacttgctacttgcctcggggagtgatgtaaccagatatcattctgcacacgcatgagtcatttattatttataatcatttttctcatttttggcaaaacaattcgcttcttgcctgttcaatagagcccttctttaatttcactcttaggaaaatactcgactattgcaacctccctttgtacttcattttcctgccaagttatcccaaccattggattaatggaattttgatagtttgagccttgatcgttggatgattgtcgattagtattcgccctagaaggtctataaaatcccatgccttgtccttctgagatttttacccactcatcacttttcactcccaaagttttcctaattttttgccaaatctctagaatctcaagagtacctctagagtctcgacaacctctgcattctcttctgtatgtaagtttaaacttcttccagtttcaacttctgaactgttatgcatgtattagtgcgcattgttgttcttctttctttattattattattattattattattattattattattattattattattattattattattttctttatttgagttttgaatgttattgtaaatttcctttgaactgccattttctgggttgcattttctagcaacttttgctttatgactaaggtatgaatttataggcttagggtttgtaaaaaattgcaatgtttcccatttctttccctttcgttattcctttgttgtggctaggatgtcttgcacctgatgtatggcaacaggaatcgtggatttctactctgccgacatttggatggggcctcttcctagcagtcagggaaaccccattcccctttttgacttaggggttgatgagggggctaactattgggtttcttgtctttcaaatgagtgaagttcttcatgatcttcataggcacgttttctttggattcgactaggaaattctcgatttccattcagaaggtaccatgtcaaattctcaagtgcagtctaacagtgcccctgttggtattcctgctacagccacaatagcccagaggctcgtcccattggatgttgtcatgaaagccctagtaccctacaagaaatactcttgccactccaatggatgggaagctgatgagttacacttggtagtgctaggatgcagtgaataaagagtggtatgagcttcctcaagaatttattttctaagttccgcactacctggaacacaaactctggttctatacaacagcattccattacttgacattgtaaaatctttagcttgaccaactaaaacctcttctcgaagcttcaccagctctagatcaattaactgagcagttttaattctaactagtaaatccaattgcaatgtcaaattattaagttttcccacaacaaactcaatacctgatctgaccatatcatctgttagatgaggtgaaattttgatcatactagtcactttcttgggaccctttctactaagggaatttgccaccacattggcctttccaggatggtaaaggatttcacagtcataatccttaaccaatcccaaccaacgcctctatctcatattcaaaatctttctgagtgaagaaatatttgatgctcttgtggtctgtgtaaatctcacacttttctctgtagagataatgttgccaaatcttcaaagcaaaaactactgcggtaagttttagatcgtgagttgggtatcgttgttcttattcctttaactaacgggaggcataagtgataactcaatcgtcctgcatcaaaacacaccccagaccctatctggatgcatcgcagtaaa

SEQ ID NO: 266779 - DNA, 1232 bp, Cannabis indica
gagcatcattgttcttgtgacttgttgcagtatagctcatgactttatgtttgtaccatataacagtactactattttctatctacatatgcacatatatatattttgttgcctctcctctggccctccctccttttccatcttttttctcgagaagagaaagaaaagttaggggaaatggaggaagaggaacttgatcacttagtaagagaaatggtcatgtcatgtaagggaaaagtagatgcaattgaaatggggagggaaagtgatttgttcgagagtaaatggatgacagtccaaaccacgaattaattgaattgatgacactcactcactatacaaacttttctttcttttctttacctctacttttccttattcttcctctgctttttactttcgctctttttttttttttattattattttattattaaaacaatctgtgttgtgctgcacaaactcgaagagttaaaattttgactgcaatcgaagtaagcctttttatatacgttattattattctttttttttttttcactgaaaacgtttttattattcttattgaagggttcaaattatgtcaatggggcgagtatattatgccgcttttcttttagcgcgtggaaggtgtatattcactaaacatagtgaaaagccatgtgttatgggtgaaccaaatccaatgtgaaaacctgtcccatttatccaactgtaataatagaaggacaaaagttttaggcaaagaagtagcctaacgctattaatacatcattaaataattttattgttaatgccatgtcttttaacgagaacctgactgttaaacattattcacaaatagaaatttgataaagtcacaagaacaatgatgctctattttctattgttgtccaaaatgcctctcctataagaaaaactcattttcttttcccttcctcttttttctcttcctcattctcacttcaccaccaattttctctcttcctctctaaataaattactaattgtagaaaatttttgcactaaaatcttgtaacaaagatatttattcagatgaagaaaacaaaactggagttagattgtataaaatttgaggataaacaccaagtattggttcattttgaagaaaataaatgggtatgattttttttttattcttgttgttaatggttgttttgatgattaagaatattgtttagatgtttgatctgtgatttgatactattttt

SEQ ID NO: 266780 - DNA, 1203 bp, Cannabis indica
attttgttctatacttgttgtcacgttttaaatgatgccaaaatacaacaaataattcaaatatattattcttttattttttttttttaaatttataatttgacttattttagtagttgctccagtcatttttatatgagatgtaacataaattttagttgcaatttatatcttactatgtaaatttttgtataaattaaaaaaattatttttaaagtatatatatataaaaaaaaagaatcacataaataatttgttcaaaaaaaacatcataatcattaaattaattaaagattgtgacactaacatcatactcatcacaatgtgtggagcctttaattaataataattaacctcacatggctcatgtgccggaatttaattctctttgatttgattttaattactattttctgtttaatttattcattcttatattttccacgtgttatagtacagttactattttgtagtgatcataattcaagaaaattaataatgaaatttttgaacatgaaaaaattattcacgtgttttaatgtaatattatatgcaatgtttatgaagagtaataaattgatttgcctctaagcaatatataattttttttaattaataagcatttattggaataatttagtggggcggtctaaaaaggttcatatattcattttgtataatgattgttagagcatatttaaaattgattaaagatttgattggtacattttcttcctatccaattggtcaaaaaaaaatctcaaatttagattctaattagtgaaatgctaaattggtatgtagtgctaaaaaataacacatttttttttttattaaataaattgctctaataagggtatgtcaacaaaaattgtctcaaattcaatactatgttaaatttgtaacttttaaactatatgccatatttgaattttatctacattatacatcgatgttgtaactttttcttttttgatggaagaagttgtaatttatctaagcattgaaaatactaaaagtacttataaatagtgattgaaatatacaaactatccaataattattaattaattaaagaattattataaagttgtgttttgtaaaaaggttaaaatttgaccatttaagccaattgtgaacaatatctataacctttataaaaaagagaatgttgtaggctttcactagtaaattactaattaa

SEQ ID NO: 266781 - DNA, 1215 bp, Cannabis indica
agattcgtttcaaaaacagaaattttgtacatgtattgaggaaaaggtagatttgatgatgatgatctccattttcaaattgagtacattaataataaccatgtgtaatgtgttggtattattttatgtaattattcattatgagaaaatgcattaattggccataactttcataccgaaacttacaacttctttttctctccatgtaatttcaagagaaacaatggcacagaattaattatttctcattactatgagtgaatcaaatcacgtggaatacaatagttttttaagcaagtaagggtcaaaagaatctatctgcactgttgcttttgaaaactcctcgacaataccaatctcgataacaaagttctcaactttctggaacccggtcctggcttcagcacaccatgcttgtcactctgcaaagtggagcacgagctgcgcattctcctagtccccgagcaccatccaccataactgaactctccccggcgtctcttcagaagctcgcgatcaatcttgttaagaacctgatcgttcttcttgaattttctagcaaagggacggttactgagaaccatctttctataatccctgagtcccaaggacctgggatgttgctttggaggtgtgtcccaactaatgtagtgaagatcgtgattgactgtggtgttcttgtagtttcggtcgttgcatatgagggtctggaagtagccctcgggggaggacacgacgttggtgtagtataggaggagagtccttggaagattgtcccaccccattatgcaatactcggcgaaagatcttgatatgattgtccaagctgagcctgcattgcattctcatctcatcaactataacttcaaacacagcttccttttgctcatttttcaatggaactcaactagatgtacttagtaaaataattcagtaacatctgtagtgtaagccatttcccaaaaaagtcaagaaggtaagatggattattacttatattatgtcattaaaaaagcagtaattactggtggtgtggttgcagggtcttaagcagagcccactttttgtctgaagcctaaggttcaactccttaattattcccaatagcaggaaaacaaaaaagaaatggtaaattaagtagttccttctttttatgggcagacagagacaaacaagtcctttttcattcccgagaaaatgaaattgaaatggagc

SEQ ID NO: 266782 - DNA, 1313 bp, Cannabis indica
atttatgcacactcttacttagcataacaatttgatttattttgcaaagtctgaatcgtcatttaagaaaacaaaacaacttttattaaatcgtcactaaacatagaggttaattgttattttatatccaaaaccaaatgaatttggtttttttatttatttatcaatgcatacatagaattttttttttattccaagagttgtttatatttatttcaaaaatacaatctgtaatcatagaatcatcttattaattttttttgtgtatctcttcttccaactcttatgtacaattgtcaccaaagaattgaaaactcttccgcgtgaagcttccaccaccaggcttagctctgggtcttctagggctttattgcattttcctttccttcctacctctctaacatttattgccctaactgccattttctttgcatttaatacctctgtctgcgttgatgattaccgaccctttttttaaaatccaaactcaccttacatcaattaccgtctcttccaagaaattaattctgatggcgcatgttttaccaaattttatatgggcacaaggatctaatggtgatcctctcgtctaccgtttcagccctccctctccaatcaccaatttcaatttcttaaaacccctgagaataatcattacaaccctaatgatgctcacccaagatctagagaaatctcaacaggctgacctcgagatcccccgtcttccaaggaggctctctatgtccaggtactcatcttctctcctgcttctttgctatttaaagttttatcttcccatttcctccgtctttccatctatgcttctcaattacccattttcccaacccccgatcatggcttcctcctttcacaacctaccaagcacccttaacctaactgatgaagaaaatatcatacacgattttgatcatgtttcactccactcggagatccactccttcaaacttccttgttttcaagatcctcacaaccaaatccccaaaacctcttttgattaaaaaagctatccgcaaggcctagacacttcatttccttgttgaaatatcaaaataccactctgggtttttccttgccacctttcaatgcgaaggtgatagggatcgtgtccatgaagatccaccatggaattttgaaaatgcctaatcatcttcactaatcttgaaggtctggacactctgtcaccagaccaattctgctttgtgcctttatatgttcatgcccatcgcaccccatttggttaaaaatcactataacttgcccaatttgttgttgatgagttaggtgacctttta

SEQ ID NO: 266783 - DNA, 1613 bp, Cannabis indica
caaaaacaacagaagattggtatttattcagggaatagtttacctcttcttttagctgagtttcggctttcagcaaatgttcctcaagttcctttaaacgagattgtagagaagatttttcagcaatctcagccttaagctgttcattctcagcttttaaagcgtcaataatttccttggtttcttttaaattcccttcaagctggagaatggtagactgatgttcttttctagcattttgatatgtttcgtttagcatgttgttctcgtccataactgaagatatctgtgatacaaacataaaatttaatacataatggacaagagaatcaatttgaaagtgtaatctcaaaaaggttttgaacttggaaatttggtttatatgtaataaaaatcactaataagtaaagaatattttttgctaaacctgagactgtagtttctccccatcagaagtaagttgttgttttaaatcttctacattctttattgaactgcgaagctgttcatctgtttcgtgtttctcagcaagagtagtgtcaagtttagtctgtaaatcacggcgattacggttgcctgctcaatttggaaggcccaaagtgagttggtttggaaatcaaaatcaactttgccgcaaatgtcattgttagctcgtgtggtccttaatcaatagtaaaaagctcactctaaaaagagaggcacactttttatttatatgggaatagatggtgaagtggagctttggactaaatcagaaactaatatgattaaaatgaatgttgatgactcgacttttaattaagagaatcgttataggatgggctgggtggctagaaatcacttgggtcgacttttggaggctatttctattagtagaccagggcgacttgatcctgttattgtggaggttattggtgtgaaagaggcattaagttagattaaagaaaaggctattacgcattttccttttggtatcattattcaagaatgtaaggctcttttcttcttctactatcaagtttagatttgttaagtgcacttactgctaacaagattgctcattttattgatcgcagactcttattctttaccagtttatatttttagggagaggaatgcccctaatggtctattaatattgtaatggttgatttaatttaattcaataaaattctcattcttattaaaaaaaaaattctctaataaatgaattttaatggttccatacaaaaaaataataattaaacaagaagaaaaagcaaaatacatttcatgacatggatttataaattcataacattcaggttagtttaattttaaataaaaaataaataatttttttaactattttaaagtacagttttcttttttggttatttgttatagtaaataccacactaataataccatatagcaactaataagatgaacttaaatcgcaactaaaattcacatagtaatccacataaaaactaagcagaggcagagctaccgaaacagtaaatttgaacaaaattaaatttgtcaaataacttatgcaataataatttaagagtaatgtagtaattttgtaaatagtttaattttgtatttcattcctactcaccaaacat

SEQ ID NO: 266784 - DNA, 1950 bp, Cannabis indica
cattctgaattgtacacaaatttttaggtctttcaaatatgactaataatgtttattattaaaatgacagtctatattataattataataaatatattatatttttttaatgaattaaattatgtattatgatagtttaaataacttatttaatatgtgtatgtatgcatgcggaaagaaagaatatttaaattttatttttggtgcattaatgtaaattatttaaaatgtattttaaatatgtgtaagatattataatgtataactatttaaaaataagagtaaatatgcactcatagtacttggactattataaaaacaaaaaaaaaaatcatttttaatttagagaagacaaaaattactaataaataccaataatatctaacaccaatacaaaataatattttacaaataactagcaattttctatgataatttttaaattcaaatatataagatcccataataacacatagaaaaatagtttcaaagttgttggtgctttagcatttctcatagaaaaatagtttcaaaatatcactcccaaattttagctaaaatgttcattattattcttaattttacaaattcattgtttgtgttatatccataatttattttggataaaaatggttctcaaaataattttttttaattgataacaaattagtaagaatagtaatttattcactatcacaaaggctatattgcaattattaactacaagcaaaatttgataacccactataaatgaaacttgattttaaagattcttttagaatttagagtatactattagttaatcatcacataacatagtttcatttaattttagaattatcattaaaagcatgtaaatttatagtttaagcttgttttgaatatggtttatgacacacctttaaacttaatcatgcatatacagtttgtgtttttttatttttttaaaaaataatatacatagaaagtttttttttttaagaacagaaaatgtggaagacatttcattcaacaaaataagattacaaatgattttgataattagaggtatttaactaatctaatgaacaagttttttttttaaccataacaaataaaatttaaaatctgtactcataaatttgatccaatttatatgtaaatttcatggccaaatccattctaattcataatataacaaaaaagtcaatctaattaaatttgcactgtttctgaatgagttgattagtactttttatttattaaggccaaaattgttagtcttaataatttatcagtaatattcatattgttttaacaaaagaattaattaaagcacttaaataatgaaataaaatataatatttaaaacttttttatatatatatttatactttgtataaaataattaagagtaggccaattactttcaacataaaaatacatcagaaaaaaatcaacataaacatgatataaaatgtgcacaagtcatattttgtttttttttgaaaaaataatgtaatagtcaaaatctcacgatccaaaaaagaaagatgggataaattatatgattctctattattttggaaaggtcaagcctgataattggacacatttaatgaatgttttaaaaaattaataaatattacaatgataacaatatgtattttattttcgatagccatcatttaaaaactctaaaattaaacatatttaattaaaagtaatcttaagacagatgaacgttaaaatggtaaaacacgaagattacaattaattcaatttagtccaatttttttttattataattggattacatttttataagaaaattacattctacacttattttattttatttattctaattttacttttattttcatgttatttaaacatatttaattaagagtaatattaagacagatgaacgctaaaatggtaaaatacgaagattacaattaattcaat

SEQ ID NO: 266785 - DNA, 3146 bp, Cannabis indica
aaaaattattaaattttttcaaaccttgtattggaatggtcttttcttccattttaaaatggaatagtcattccactaaaatgatagaaaggtcattccattggaatggtattccaatgattttaaatacaaccaaacaaaagaatggaatgaaaattatttcctttccattctattccatttcattacctccaaccaaacgccatcttagagaattaaattatgtcgtcagtgtgaattcaatgttcggccattgttttgaagaattattactttgttagtgtgatatttgcgttattttctcagttgacctgaatactatcttcttctttgttatctgtattgaactattgaagagaagcaacctagtataatttggctttattgtctcattttgtagcctcagctgtcaccatatgtaggagagatacctcggagtaatttccaatttgattttgagcttgagaggaaaattctcgctgaagcagagaaggaaaaccagaactgggtgaagcttgggctggaaaatcttccatcgaggactccagcgtcaacatcttcatcatcttcggtggtatgtcatctttattgactttcattggctcattgcttttcatatttgcaatacttttcttcaatggttgagtgcatgtatgcaattttcagaaatcagtggtaatttacttgcaaaagaatatttaatatattgcatatgtttggtcttacattcataagaaattgttaattgaataaatttttatggcagggatccatcccagaccctaccgttgcgaaatatattgcttcagggctgagtcgagaagctgttactattgccgtggggcattatggagacaattccactaaggtactttcttgagttctacaactatgctattcctattgttacttggtagcattttttatgttattaaaatgtggtacaggatgttttggtctctagtattaatatcttgctctggagccgcggtgctgagaaacacccgatgatgtgttttgtttactatttcaggttccagaatttgtcaatggatacaatctcttacgagagatgggatttccatccaagagcgttgctgatgctctaataatgtatgagaatgatacagacaaggcactggcacattttctcaacggttcatcttgagttatcctacactggtgaattagagtgatgtggtgtattggtaagactgttatggcgaaattgtatggacctttgggttcaagtaccattgtacagcatataaaggtttcacataagtttttgtttgctgaacgaaaatcaaatcccatgtcgttgtcatagatatttgtgttttttggccatgaagttgtatagatgtctttcactcagtttacaatttatgtatacatctatttataatgtatttttgatgttgatctttatatggacgttaattatttcttctttgcattaactgaaaactgtataatattgaatcataagctgttcaacaagttcttaataacttggttcaatcagatttacttaccttatcagaagggagggattgcaatcatttaaacttgatgtcttctataataatgtccttcagtcttatatttacacaaaaggacaaattatgttgatcctttaattacagagcattttcagcttctctactttataattaaaatacaccatcaaactctaatttttctattatactttaaatttttatattataccaattatttttttcaaaaaaaataagaaatcttaaaataaaaaataaatttaaatgtttctagattgatagtgctcactaggaaagtctagggaagtcaatgtggcaagtttgcccaactgccttggggaaagttatggtatatttgacataattgatgattttatgagaattaattgccattacactataattatatatataaaaaaatctttttatattaactattttttttttgtaattattaattattttatcaaataacacattaaattttttatgtaattgctactttaataattatacaataacttctaaacacattcttaatttgtaagcaaattaatttttttttatgtaattattactttaattatacagtaacttctaaacacattcttaatttgtaagcaaaatcataatttgaaccaccatatttattgtgttaatatatttgagttagttgtgaatttaagcccatattactattagtgcccaacaccaaaaggagaattttcacatctatacttatacaaacaaataattaaagttttgttaaatataaaataatatacccaatttatttgtaataatatctagcataaaatataatctatatttaaaacaaatatatcctaactaattgaatatcctaaatcactcattattattaacattattcttataacaattatttagtacaataaatatataatgcgttttggtatcagattattccatttattaattatccatgtaatttacacaataataatatgttattatggatacatgtttttttgaaacagaataaaagcatctgcattaaacttcagccaataaaatgacattaaactcaatagggacaacactcccattgacaatacaaatatgattagaacataaatagcgccaataatccatcttgttccctaatcgtttaacaaaagaaataaggacaaatttgcaagtaaacgtttacaatatgagattattaaaccaataggagcagtggcggaactagacgacgatataaggagaggccaaataaaatgtattttcacttaatttttttaagtatatagtattttatagatcaatataaaaagttaattaactttatacaatatatataaaataatgaaaaataataaaggacaccttatagtgccaagtgctataaaaagtgacatatccgttattagtgtaaaataatatcgagtcttaaatattttaatttaataaataatataagaaaccgctaactacttataaagtgtcatattaatatggtattagataccataagaatacatatataaaagatacatataaaatatatatatcatacaaaattactattcaaaaataaattatattaatcattttttttgtcactttttaccataaaat

SEQ ID NO: 266786 - DNA, 6898 bp, Cannabis indica
gaataccgtaaaaaatgtaaaaagaaaaacttaaaaagtgtaaaaaaaaagggcagtttatgtaaattttccaaaaaaaaatccataaaaattaaaaaaaaaattccaaatatttggaattgggcctgtcaaatttggaattggatcaaggtctcataagagtgttgggccttattgggccgagagtgcggtcttatatgaatgaatatgacgtcagcagaaagaaagtaaggggtagagctggaatatatatagaatagttatctttttaatttccaatcccaataccaatcaaactatatttatttatttatttgtatttaaattgtagaattatttttatatttatttaaataaatataaataagagagaagagaatagaagaagaagaagaacacgaagaagattttagagtgtgtggagttgagttgaattgaaatcggaagctcttagctatggcgatgcgtgatcttgttactggtggagctgcttgtgctgttcctggctcttcttcttcctccgcaaatcctcttggttctcttgccaacgctcttattggttcttcctccaagactaaggttccctttcctttcactatccacacttcaattccaattccaattccaattccaatttcaatttctcttaataataataataattgcaggaaaggttagaggagattcctacgtcggctcagggtggttcttcccagagacccttttacgaccaaactaatgaccaattgcttcaacttcctggctctgagtttgaccgtccattcctgcaacatggcacccaggtttgaattttaaccctagcaatttgatttgttgttgttgttttaattttgagtttttactcactgcacaaggtattttgttcatattcagggatcggaatttattggggcttttcgctctggtgatcatgctaatcttgcagatgcctgggatgaggtacaagctcctcatcttactcctcaccacagagatattgaattccagcatatctatgaccgtggtgctgttcctcaccttcaaccaactatggaaggtaattcttttgcttttcatgtttgtttaaattatgagtgtgaatgaaatacccatgaggagaaaaaaatgaaattcacttgtttcgaacaaaaagtaaattgacaattatgtaagtaggattagtagagagtgcttaaattgtcatacctcattattctcacaaaattgaagcaaaggggtttgggtttggtcatgtttacatgtgtttctcctcctccttttgcagggccaccacaaagagtattgtcaagctttttgcactcatttgttgagagtggtcggggtggaatacctttccgtcctgctccgctccctactttaggattgtctcaaggagacaaacagtgtatccgtgatcgttccagcataatggccagacacatttttgctgataagggtgaagaatttattaatgcacaggtctgaaacttattcttcttcagttaaagctgataagttctttttccattttcttgggtttcgccatttttaacttcatcctcatctgtttgtattaaaccagttataagtgaacactaaactcattagtctgtctggtagttgtttggaatttgacaacatgttttaattttctttcatatttgtccaagctttttagctgccatctttacattcattgtttggaactgatatctgttggccccatttatttgcttctgattacacttgttccgttttatgtatcttttttctttttttctttcattagaaaggcatcgtgtcattttcttcctcacgactaactttgctcttgtaattttcaggtgaatgcccttttatcttctttagatatagacagcaatggtcaggttaaaggaccttttcctgctggaatacgagaactagagggttattggaatgagtcccaaggcatggcaaaaccaggtcttccaggtgcagatggatgggttactgaattcagccagaatcgtgcagaacttggtgatcctaatgcttgggcccactcctttgagcgacagcatggggccaatggatgggcctctgagtttgagcaggcaaggaagtgtattttttttgttttgaattcttttttcttttttgcctcatctttatccactttccctttgattgactctttatgtaatattgtttcaatctttcatatcagttgcattgatgtgcgtagtgcacaaattggttagctattgattgttgtgttgcactttcatccttttgaagaattataaaataggcatccgtatattgtgtttcattttttaattttgttcacaggagcaatctcagttgacgtcgatggatcatatgggaggggtaaatgttgcaaacttggctgctatggagcaaagtcgtatgcttgctaatacattagctcagaacaatgatcctaaatttcaggtttgtaaactatgttgcgcttgcactattgactttatggtccccttatctatattatgaagatgttcttctgcgtgcatttattgctttgaactttaatctatattgtgttttgtctttttgagagtttgtgatgatatgagtattgtgattaatgcacttttggttgattatgattatgctcatgttgtcgggccattagtttcttcaacactcatctttcaagatgtttgaagaaggaaaatcaatgacagactattgtttggattttggtacttcatttgtatcgtctattataatggtcccacattttaggttgtttatttataatattttgattcatgaggggtaacttaagtggttaggcttggcttagttaaaaaaaattacaaattatattttggagaaaaggattatatctttatagattaatggtttaagtgatctagcatgcaaattcatgaacaataggcaccatttgcatttgaacaattagtgagtctgattctgtttcaaaaaaatataataataataataagaataataataataaaattagtaagtcatatcagttatactaattgtctttttatctgatataactaagcgtcaaactcattgtttatgcagaattcaaagtttcttcagtttgtgtcaaagatgagtcgtggagaacttaatattaatgataatcaagcatcatcatcgggggactgggcaacagaatatcaacagaagtacaatgcgggtcctgcttgggctgatgaatttgtatgtatattattgtgcttacttcataatactgatgtcttgagaaacttcttattttgtcattgaatatctgatttgcataattgcataccaatttaatgtagcgcatgcaattttcattttacatttttcactaactacattacagattaaagagtaaagaagcccttaatcccaattttcccctctatttttcatatctttggacttcaattttcatctgtaggcttagctgattccccgtttgttctgagtctacttggcattagagcttttgcgattcttgggctgttagcatttataatcttctaaagtttgtgtggttactcatgtgattgatagatgctagtagtgaccttgttaccctacttgtgttatttaatttgttcctaggatgtagaattatatttgctctagtattcactacattctatattaccagtccttgaaatgtcttctaatattataagtggggcctaaatcctcacttttcccttaatatcaaagcaacttattttgtaagattttttattcttctaaatattgttaaaggtgtttgtcaataatcagtcccagctctattagttgactgaggagtgatttatctccagtaaaacttctgtaaactgatttcttgaggtttataggcttctcgtggagctgatcgctgggtgaatgagtttgcgtctggtggagaaaagcatgcttcagctgatgatcagtgggtggatgagttttctaatttgcaaattaataacgagtccaatgactgggcagatgaatttgggaagcaagttggtgaaggagcttttggggagagctctgctgaggcttgggctaatgcttatgatgagtaagtactcctgcttttccatgattttttatcatagcaatattggaaataagcaaaagaaacgtaatgcaatcaattactacttttaatagggtagcctattttattgaatgtagaagtgtgcttctctctacttatttttcatcaccatcaccattgcctttttttcccttttctgttgaccatgatatttatctagtagagggcatattgatatttatttttcattagtttattccaatgaagaactaaattttttagacttagttgttgctagagtctaaagtttgaaggttgtacttgccttggatggatacttattggtcattataaaaccaaagaacttatataataactaatttttctttctttctttggaaaatgtgatttgtatctatatgactccatatgtacagttacctgaatgagcaagttacttccaagcagcggtcggatgcttctagaggggtctatgtcttctctgatatgaatccctatgttggtcacccgaatcctttaaaagaaggtcaggaactgttccgcaaaggccttttgagtgaagccgtgcttgctctagaggctgaagttttgaaaaatcctgaaaatgctgaaggttggaggctacttggaatagcaaatgcggagaatgacgacgaccaacaggtgattctacactacttctgtattttaaatgacaaaatgcctattgctagaaaatatcttgtactctaggtttacagtaacatatttttcttgaaattcaatgttttcaggctattgcagctatgatgcgggcacaggaagctgatccagctaatttggaagtgcttcttgctcttggtgtgagtcatacaaatggtcagtagctttttcctttcactttgtatttttaccaattgctttatttgttaatgattgattatgtattgagagccagttaagttggcggtagactggaaatatatttctaagtattttgttactggtagaggacaaaacgagtatgacttttaactccgtcgaaatgtttcttctttctcaatatgcagagttggagcaggctgcagcattaaaatatttatatggctggttacgtaatcatccaaaatatgggacgcttgcgactcctgggttggctgattcattgtactatgcagatgtatgtgttatctttttgcattaattgttatccatagtagcaagtagtaacataaaaatgcgtgaaagtcatttaaatatctaagttcatacattaggttttcaaggaaatcttctcgtgactattcatgtcaatttgcatgaatatgaacataaataatgtaaatatctgtgtaaacattagtgcgatttctttgtgctgcttgtaggtatctaggttattcaatgaagctgctcaaatgtcaccagaggatgcagatgttcacatagttttgggtgttctttacaatttatcgagagagtatgacaaagccatcgaatcctttcaaacggctttgaaactgaagccacatgactactctctttggaacaagcttggtgcaacacaagcgaatagtgttcagagtgctgatgcaattttggcttatcaacaggtaatctttaattttaatccctcatatactcccggggtaataactaaatgcacgatttaactttgaaatttatttgtatgtaacatttgatacctatacttctgatagtctaaatcataatgagaaattatgttaacatctacagatacagataaaattcatatttactagtgttatgatatattttttttctttttggggtcgttactaatgttctcaactcccgcctcttactgtgtttctaggctttggatttgaagcccaattatgttcgtgcttgggcaaacatgggtatcagttatgccaaccaggtttgttcctactcttttgtcccttctcgactagtggtagtattattatatgtttgtaaaagacatttgcctatgtatagctactaataaagctgatttatcatgttttggtttctcttgttggtacttatagggcatgcacgaggattctattcgttactatgttcgtgcgctagccatgaatccaaaggcagacaacgcatggcaatacttgagaatttcattaaggtatgacaagaagaagattgcctctcttataattgtcttaccataagaagaagattaacacatgtcttttgttgttgttgttgttgttgttgttgcagctgtgctgataggaatgacatgttagaagcttgtgattcccggaatctcgatgttcttcaaaaagagttccctctatgataaacatatatagatatatatgtatggtttaattgttagtattagaggaggagattaaatacatgggagttaccactactactaattggttgagtatatagcaaaagctagcaagggcaagcaagttgggctatattattagatgaataagaagggtcccctcccaatcccatgtctctctcctattatatatattattattatcattcatcatcatcattaatacaaatcttttctttttctttgatttatactatagttaaatttgttgatggacacaaacaatgttgtatcatgtgatcattatgaatcatgtttataagagagaatgaaatgaatccgatttttcctttattagataattataagaataaaatttgatgtgaggtggaatggaagtaaaagagtgatatgatattgggatgtgagtaagccacacacacacacacaccaaaccaaagccactcacttacacttagtactactgagtatagtgagtgtggtaaata

SEQ ID NO: 266787 - DNA, 5731 bp, Cannabis indica
atgacaaacctcactcacctctaaaaccctggcacacgaccaaacacaagagaagaagacagtgaaaatattcgaaaatgggaagagcggctctctttcatcttctgagatcacagtccaagacccttcgttcatcctcctactcaggtttcttcctattatttactattcatcactctctctggggctgtgattctctgaattaatttttgttcagttcaatctttggtctatcttttctgttcaaattttcaatccaggttttagtttcatgatgatgatgataagtactaactcatcgctattggaaattttttttttgtttaattttcatttttggaaatggtttatttatgtgacttaggtttgtgccaaattatctgaaatctgaaaatataacgcaactaacttggttactcttgtaccagggattcatctttacaggtcggttccaaatcgattgaacagtgaggcaactttgagtccctgtatccagatcaatggtttccagaaaagatgggcttcacgagccactacagctgaagacaatggaaagctcagtattggcccaagaaaagtagcagaagatggggaaaatgaaaaagactctgggattgtctactatggaccaatttcttcgaccataaagaaagtaaagcttttatcactttcaacatgctgtctctctgtatcattaggtccagttgtgacattcatgacatcacctgatatgaatgtgatcctcaagggtgcagtggcttcatcagtcatattcctcagtgctactaccactgcagcccttcactggtttgtgagtccttatgttcacaagctgagatggaggcctggttctgatacatttgaggtggagatgttgtcttggttagcaacttacattcccaagactattaagttttctgatattcgtcttcccgagacaaatcggccatttgtgacgtttaaggccaatgggaacttctattttgttgatgcagatcactgtcataacaaggccttgttagcaagattgactccaaaagcaaatccggagactggattcaaaaatttgtgatttatgatgttgatgaatgaggaatatttatgttattctatcacatcataaatagagattttggcattttgagatttataagactgcataccttaagtataggctgtttagttaatggtcattaagaaacaaaataattttggttgtgagatttttcctcaacactgaactacactttttcttttcttgcaattacaattctttcttttgtggctttctattatgtaatttcccggtttatgacttgaattgtgcactattcattcatttcatttgggatcactcttctatattttacttgatctttaatttttactctttccaatttttatttctcaaagtggagggcctaatgtctacccctcagatccaccaaagcaattatgcagaagtgaaataagtcctttttttatttctatggaatggtaatgaaactttggttaaggcaattatacagcaaggaatgcatggccactaaaattcagagcttgtcatgggcatagcaggcttagtaagatcattgtttcagattaaataaaaaaaaccttagcaagatcattggctatggtgtgttaatatatctcatttttcaagttctttttcaaatttgcaactttaatttataaatacagtatataaagaaaaatagttgaaaaacttaaaacatgcatcaattatgatcatccggcagcataggacaaagactaacaccgttgctgctaaacaaaattcaaccaattgacaagatttgaaagaaaaaaatgacaatagctgaaaagacagaaaaaccgtgccaccgtctatcgagcacccagttctgagaacggctgcatgacgacgatggtagaaactttttatatgaagcgaaacagacatctaagactccattggaaaaacaagtaaaaagaacccatcggcaaatactgcctttgatttcagtaatgttgaactgcacgattcacttcttcttggcagcggatttggtaaccttggcccctgaaggatccttcttctccacactctttatgactccaacggccacagtttgtcgcatgtccctgacagcgaaacggccaagtggggggtactctgagaaagtttctaccaccataggcttagtaggaagcattttaacaaacccagcatcaccattcttcaaaaacttgggctccttctcaatctccttaccagaccgtctgtcaatcttggttaggatctcagaaaacttaacggcaatgtgactggtatgacaatcaagaacaggggcgtaaccattgccaatttggccaggatggttcatgatgataacttgagaggtgaagttagctgcctccctcgcaggatcatccttagagtttgaggcgacaaaacctctcttgagatccttgacagcaacattcttcacgttaaatccgacattgtcaccaggaccagcctcctgaagtgcctcatggtgcatttcaacagacttgacttcagtggtcagtccagtgggaccaaaagttacaaccattccaggcttgatgacaccagtctccacacgtccaacgggcacagttccaatgcctccaatcttgtaaacatcctgaagagggagacgaagaggtttgtctgtgggtctcttaggctctaggatctggtcaagagcttcaagaagagtcgggcccttgtaccagtcaaggttggtggatctctcaatcatgttatcaccctcaaacccagagatgggaataaatgcaattttatctgggttgtaaccaaccttcttcaggtaggaagaaacttccttcacgatttcatcataccttgcctttgagtacttcggggtggtggcatccatctgcaaaggtaacaataaagcaaattaataacagcatttccagatatacaagcacaatgataacaaaaaatatatatgtaatacaaaaacttatttataaagagtattaactaccttgttgcagcaacaaatcatttgcttaacaccaagagtgaaggcgagaagagcatgctcacgagtctgcccatccttggaaataccagcctcaaaaccaccagttgtggagtcaataatgagcacagcacaatcagcctgtgaagttcctgtaatcatgttcttgatgaaatcacgatgtccaggagcatcaatcacagtacagtagtacttggtggtctcaaacttccagagagcaatgtcaatggtaataccacgctctcgctccgccttaagtttgtcaagcacccaggcatacttgaatgatctcttgttcatctcagcagcctccttctcaaacctttcaatcacacgcttatcaattcctccaagcttgtagatcaaatgaccagttgtggttgatttcccagaatcgacatgaccaatgacgacaatgttaatatggagcttctccttccccatgatgtaattttatctggtacgcaaacaattaaagatgtccgaaaacaagaatgagaaagctatttccaaaatctgaaatattactacaagcgtaagcataggaatactgtcgaaaatgattctgatcaggatgattctcataatgaaaggacaatacaggagaaaacctagtatcaagaaatttgttaagggtgtatagtgtacaagttacctcaattatccgtggattgttatgttttatcatattatataataacaatatcataattccaaaaaaaaaaaaattgaatagaatgcgaactacatatcatcaagtaacgaaaattcctatatcttacctatataaatatatgcctatctaacagaatttcttatggaatatttttaagaattcagtatagtttacatgtcaaatactaacaacaatgctaaagagatgaaaatgaatgaaccataattgttcacaacttctctaaacaggttatcaattggtagctattcaatgaagtattgtccattttggttcaaaacttctctaaacaggttattaatattcaatgaagcattgcctattttgcttcttctattaatatatgtaggaacaaatacaaatgggattaccatgaaagaaacagaaaaattttatttgaacaaaaacccgaaaaattatgaaagtttcttaagccctggcccttacgtttcaaatgaaaaaagattgaaaacaaaacctccaatgattattaacatatattcatactataacgtttcaaatggtagtaatatacacaatttgcaaatcttagaactacaaaacatgataaactaattatgacaatggagatatctatacaaaacagagagaaccacttgagaaaattcaaacaagcagaaaaagtttcaatcgtcctatctttatttgaatcctcattagcagcctcaaaaccgtaatgattacagaacttacctgtatttaatcgtctatctgtgaaacaaaattcctcctctccgatctccaatatccgatcagtcagtgacagaaccgaagaaagccaaagaagctatgcaatgactttagatgaaaccctaacaaatgtgacttcgttttataattgagcttaactaatacatactaccaacatttttctttattttctattattattagttattatcacaactaatttacaaaatattagctacaatggacatgtattaggtgatttttcggtaatacttttcttttttaattttttaataataaaaataaaaatagaatttttatttttaaaaattttagcaatctataaccgtttttgttgtttaattttaaaaacaaaaaataaaaatatattctttaaattttatttttatttttattttttattttatttaagtcggatttggggtcgagtcctgatacgggtctgggggttgagtctagggctaggtccgggtccgcgatccaagtttgggaccaatttcagggtctgagtctgggccgggtctaggatcctgggtgtgggtctggggctagggctgggttgggtctaaggtccaagttttgaccgggtttgaagtctaagtctgggtttgaggactagggccgagtttagggtccggggtccagggtttaaggctaggtctggggttcggggctgggtccagagtctgaggccaggtctggggccgtattcggggttcggggccgaggtccaaggccggaccgggtcctagatccagggctaaggtcgggtcccgggtccgtagtacaaggctagggccggggctgggcctgaatttgaggttcggggtgcggggctgggtccaagtttgggtttggggtcaaggtccgagtctgggtctgggtgcgaggtcgggtttgggtctaggtccgagatctaggtctgggtgtggggccgagtccaggtctgaggtcggggtccaagtctggatttagacctgatcggagtccaatatatatatattaagaaaaaaaaaattgtttgaaaaaaataaataaaagtgatttttgtttttcaaaattttggttctcaattaaaaaattaaaaagtaaaaacaatttcaaaaaatatgatttttaaaagtattttcaactttttaattaaaaaactgaaaattaataaaaaaatgttacaattttaaagaacattttgtttcgtgcttttgaaatatatatatatatactagcaaaaaaactacgtgcgaggcacgtatactaaatt

SEQ ID NO: 266788 - DNA, 1503 bp, Cannabis indica
taaaatttcacaaagttccaataatatttatctcccaaaattaaacttagatatttacaatacaaattacacttaaaaaaaaaagaaaaaaactagtgtgatttaagcataggaaagaagataaggcacaagagacgcagaaagaggaagaaaagaaaaaggagtggaagtggagctctttacgtggttttctttctctaactctcctcaactctcaactctattctactcatgaagtttctccctttcttcatcttcttatgttaagcatggcagcagaacccgcttttgtaagaaaatcaactgcttcagccacattgctaacttcaaaatgcagtaaacaattcaaacgcaagacttgctcttcttatattcaactccctttactttattctgctgccagagcttcatattcaatcgatgatgacaagaacaaggtctacaaacaactgggtcagctccactttctctgtttaatgggtttgttttgatgttagaattgtgggtttttattaggtgcctatcacctgtttgagattatttctcattcattattctctgtgtttagaacatatttacttatcgggatcctctcttttgtttaatgagaatgtatttttttaaaatggtacaaaataattgataattgagtttaattttcattatcttttattataatcaacctgaggaacaagtgcaaataaaatgtaagtaatgagaaggtatgttaacaatgtaatgagtttgatcttaacatttcctagttaggcttttattaagttttattttgaaaaaataatcatctgaatgatattattttgtatcagttataaagatggaaaatctgaattgttatttaaggaagcagtgcataatcgataattttttaaaattcagggtctaaaattttatttacccaaaaagaatgttctttggtggttatatatggttgtgttgtttacctagttctgagttttgttaatgggatttaaaggttggttttttgaatttgttttaggattatttgcattgaaaaggaagattgaagaggctgttttgagagctgaaatgctggcccctgctgcacttgaacgtgaagaagcaaaacgaaataaacaggaagaaatgataagagcttatgacctttgggatgacccagctaaatctgatgtcattcttgccaaattggctgatagtgcaaaaattgttgatgcccttaaggatttaacatataaggtgataattcatgcataggatgtttcatatatgttatgatttttgtcaataaaacagtctttagaacttgtccacatgagttggtgaactctcttatatgttaatttgtatacacttgttgtcctgattttctgtttttggtagcaatactttacatttttttgcaaatttgaggcattagttaaatcccaccgttaaatgctaattggattgtcactgtgtacacctatgtatacgtggcatgtttttattggcttcaaaatttta

SEQ ID NO: 266789 - DNA, 2791 bp, Cannabis indica
tttattttctaataaatacttttcaacttttaatcatgtaaagtagtatgtatataaatagagaacaacacaaatcaatctcatattaaaagtaaatattattgatcactatttttattttttatattataaacaattctctcttatatattttttaaaatagattttcattttatttgaaggtctgctataaaaatacacatagagattcattcaattgtggtgctcctttaataatgaaataatatatatatatataaaattagtgattttttgttatatttatgtacttttaatattcaaaatatttttagtattaagttgtaattctattatttttatgtgtaataaaaaaaaagttatattttgctgtcctaacaaaaaaaatatacttttagtgtgaataaatttttttaaattattatacatgccgcacgaagtgcggctttgttcactagtataaatatatatataagcctatacaaatattatccacacaaggaaccagaaagacagagagagaggtaaaggatagagagaatggagaccattgatatttatgatctgttgagttctttactgtatctcattctcatcatttggatattgattcaaggcttcaacttattagcattctcatggtcatggagcaaaagttgtccagtaaaatctcatcatcaacttccaccaggacccaaaccattccccataataggcaacctcttggaacttggccacaacccacataaatctctagccaagctttcccacattcatggcccaatcatgagtttgaagctcggccaaataaccacaattgtagtgtcttctcctgaaatagccaaagaaattctccaaactcatgaccaactcttctccaacagaaccgttcctgactcacttcatgccttgaatcaccaccagtatggcctcccatggattcctgtctctcctagttggagaaacttcagaaaaatatgcagctcttatatgttttctgttaaggctctggaaaccaacaagaatttgaggcaccaaaaagtacaagagcttttaggctatgttggtaaaatggctaaagcaggtgaggccttggatattggtacagctggttttaacacatcactgagtttgtatccacaacttttttctcccttgattgggctaatagttctagctctaaccatgatggtggtgatgatgccatggccaaagagctgaaggacattgttttgaatatcatggaagctgctggtatacccaatttggcagactactttccatttcttaagatagtggatccccaaggcattagaagaaacatggcttttcagttcaagaaaatgatgggcttgttcgatcgtatcatcaaccaaagactgcaattactcacagaatctagtactgctactggtcttatggatgaaagtcatgatattttggataatcttcttaattacatgatgagtgaagagaataaagaacataagcttctagacattattgcaattgaacatttcctagtggtatgtatctaactttttcttaacatatacagattttgttaatatgaaattaataagatgttggtagtgttgcaggctctattttcagcaggcactgatacgagttcattaatcttagagtggtcaatgactgaactgcttaaaaaaccagaaattttatggtaaagcccaaatggagttagacaaagtaattggaaaaggaaaccaaatgaaagaatcagacataacaaggcttccttacttacaagccataatcaaagagatctttcgtttgcacccaccagctccatttttaattcctcgcaaagctgaatctgatgtgaaaatctgtggttatttggtcccaaagaatgctcaagtgattgttaatatatgggctatttcaagagaccccaaagtttgggacaatcctaatgagtttattccggagaggtttttagagtcaaatattgatgtcaaaggcagacactttgagctccttccattcggcagtggccgcagaatctgccccggcttaccgttggccatgcgaatggttgatttgatgttgggttctttgattcactcgtttgattggaagcttgaagatggaattgaaccaaattctattgatatggaagagaagtttggcctcaccttgcagaaagctgagccattgcgagctatggctaagcttaggatgtagttctctgtctcttgggaccagatttgtttgcttaatataagtaataatattacattaaacaatgctaacacaatcttgtattgtgtatgcattttgcaatagaactggtaccaaaatgggacaacaccctatctgatctgttatcttcttgattataatatagactagtaaacataaccgcgctttgcgcggttttgtaataaaataaatataatttcaagatttttattttgtaaaagttatcggtgatatcatttttattttgttaaatgttaattttattaggttctttgttttacaaaataaatcatgatgacactttgagattgattttggtcaaatatttttaattatggtcctaaaattttctttcttagcctctctagctaactattgtgacccaaattttcatctgaatatatttatattgtatgccattttataaaatatattggattaagctgtcattcaatagtggtcataggcatagaggaattcaagtttgaatccttctctctcaatgtgagaaaaaattaaatttatacatttcacactatagaaaggcatccactttattaga

SEQ ID NO: 266790 - DNA, 2567 bp, Cannabis indica
agagagagagagagtcatatatagagagagaaagcagagttagctagaagtacctcacgagagtgacgcaaatagcatttaatatacataaacctaagagagtaagtatatatatatagttttggtgcttataaataaggataagctcaagtactatatatatagattattagttggtgtataagaactgaactggcacacgaacaaagacgctcaaatatcctctctctctctctctggtctaatccaaaagaaaaaaaaaatatgtctcacatcgctgtagagagaaatagaagaaaacagatgaatgaacatctcaaagttttacgttccttaaccccatgtttctatatcaaaagggtatcaattatattatatatatatatatatatgtgtgtgtgttatgactaatttctatgaatatgaactatatattgatttatttatttgtataaatatacagggagaccaagcatcaataatagggggcgtgattgaattcatcaaggagatgcatcaagttcttcaatctttggagtcaaagaaacgaagaaagagtatgagccctagccctggtcaaagccctagaccattactactattacacaacacaagtagtcctagtactaatactactactaatcttgagagtcctttgggaatagaaataaataataataataatactaataataaggagcttggagcatgttgcaactctctgacggcagatgttgaagcaaagatctcaggatccaacgtgctcatgaagataatttcacggcgaattccaggtcaaatcaccaatataattagtgtattggagaggctttcctttgaggttcttcatctcaatgtcagtagcatggaagacactgttttatactcctttgtcataaaggtatatatatatatcaatatattaattatacgtagaaattagtttgattgtctcaattcaccactgaacaaaactgtatagtagtacataattatactatgctccagctataggagaaattaattaaattaatcaattcgatgcaactgtcttaaaattattgaagatatcagtaaggtaatattatattattatcttcgaagtcaggtaaaattatagggtaattcgaacagccagtatatatatctatatatatatatatatttttatatatatgcgtaactcagggtttaagttgatcagtttcaataatatatatcatgacttcgaagatataaccgatgcccaccattgataattaatattatatatgtgagtattacttagtttgtttatgtaagtaatatatagtacactaatttaatattctatatatatatatatatgagaatttctattttattgtaaattaaattatatatattaagttataatgaaaaagaaaaaatctagcttcaagatatactgatatacctctatatagtaataattttatatgtgatcatcaaagaagcgaaggtatagtagcaagactttacgttcatttaaatatatttacgacaagaaaatgatcactaaactattaattaattgcaagttaaatttaaaagatatgtacgaagatataagaaatattggtggcttagctatattctcacattttgatgcactagccagccagccatatatataaatgtatgatatacggtgcctcatatatatggataatcaacaatatgattctatcaaaaaaaaaagtacaatatgattatgtttccctaaacatgatgataatttataatgtgtatatatatatatatatttatattcttgatgtatattcttacttaattacagatagggctggaatgtcaattgagcatggaagaattggtgcttgaagttcaacaaagtatccgttcatcagaatcttcatacaccctttatacacaaatatagtacttaattattaattcgttttcaggtttcatcatagccagttataatattattccagcttttttctttcttatatcaaaaaatatatatgataattaatgtttaggattaaatgtacgatctgctgttgagatgttacatttataataaacatgtgttacgtactatataattacatttaaatttttaattagatttacaaatgattgtattagatgcatgtgatttttataatattgaagcatatattataacccttagcacacatgaaattgtatatatatagcatccattatgtaaactctttacattactgacatatacgtgctgataatttactaaccattgcatggcatgcatatcaagtctcaataatatttattttgttttgtttatctaaatgtagcaaaggctttgttgtgcaaataggagtgtgtacgtaatgcatcgggtcgaatctgatttagctatgatctgaaccgctttaatgattcgctttgctctactatatattcagatcgagtctgatcgaacccctttttaaatatatatagtgttttttttcctaaatcattttttttaaaaaataactaataataaaataataattttgctttgagtgacatacatatataagtggtcgcat

SEQ ID NO: 266791 - DNA, 2991 bp, Cannabis indica
agagagagaaagatatgcagtgactacagtgcaccgcatatatgctgtgcactgtagacaaaacctcaaaatgctgcaagaaatgcagtatcgttagagcaaatatgcacggtatgtatatattgatatataccggctccttggtgttgctctaggacccttataattgtaatatggttttcaaaagagaattgctaaaaagtataaatgttaggcaccactagtataactctaaggaaaaatattattaaataatgttagaaaaaatgtaaaaagctcgaaactccttatctattttttattataaagaactgttttcttatgattgaaacttacttttttaaatttcactctctattttaataaaatattatatttagaaagcataactaggataaatgctctaagacctttataactaaaacatggtttctaaaagagaattgttaaaaagcactattagtttctagcaaccaccttagtgtaattaaatatcgagtctcgtataatttaaaaaaataatttttaagtaatattgctaattaattgtaaaatactacttgtaaaaggtactagacaccaataatatttaatatttttttttacataaatatatagatactgaaccgtaaatttgagtaattcttttttttccattttctctaaatttgataactttgagtacgacaatcaatcacatgttagaagaggcatgcggacaacagtggcagcagcgccaatagttcccaaaattagttggccaaccacacacacatacataatgccctttccaatctcaccttgacttaatcatcatccttaccacaaacccaaaaaacactctctctctttctctttctctttctctttcaccaaaaaataaaaacaaaagctttttttttttttctgtgtttatttctttccaaactcaaaaactcagcttcctcttcctcaaaaaccaaccataaacatagtagaagaaagaagagaaaagggtatatatatatatatatatatatatgagatggccggcactataataaatccattcaaagatcaataccattcatctcaatctttcttaaccaaaaagctcttaccttggaccatatattgtattcttcccatagctgtgtttcgcttatacttttaccctcttaaccttcctctttcctcaatagatcaattccctaattcaaccccaattactataaaaccttccttatctcctccttctcaaggtattttgattttgatttttgggctattttttgttctttcttttatatctaaacaaaagttggtttttttttgtaggaaatgaaggaactttaaatgcaacttcttcttgtgattacacaagtggcaaatgggttcctgataaacagggtcctctgtacaatggcacaagttgtggaacaatcaaacaaggtcagaattgtacctctcatggcagacctgatctgggttttctccaatggagatggaaacccaatcagtgttcaattccaaggtttaaccccaacacttttcttcaactcattcaaaacaaacacatagcttttgttggtgactaccatggccagaaatcaattagagtctcttctttgcatgttgtcaacagtctcaactcctaatttaatctacaaaaatggtgaagatagcaaatttcgtagatggaatttcccttctcataatgccaacctctcaatttactggtcaccatttcttgttcaaggagttgaaaaatcaaacaatggtccaaaccataataagctttatttgaatagagttgatgagaaatggggttctgaattaggtactatagaccaagttgttctctcaattgggcattggtttcttcatccagctgtttattacgatcaagattctgttattggttgccattattgtcctggtttgaaccatactgagattggtttctatgatgttttaagaaaggccttaaagaccactcttaatgcaataaagaagaaaagtgaagaagctaaaggtaaacgaatcgacgtcgttttgactactttctctccttcccattttgaaggtgaatgggataaagctggggcttgtcctaaaacagagcctgaattagaggaaaagttggttgaaggaatgaatggtgagatgagaaatattgaggttgaagaagttggttttgctaaagagaaatctgataaagggtttagagttgaagctttggatgttactaagctatcattgatgagaccagatggtcatcctggtccttatatgtatccatttccatttgctaatggtgtcactgaaagggttcaaaatgactgtgttcattggtgtcttcctgggcctattgatacttggaatgagattttgttagaggtcatgaagaaatggaatctgggtcaatcttgaaaacaagagttcagttacgattttctgaacttttacatgtaccaaattatgtttcgaaattcttctgaattatagaaattgttggatttagagatttctttctgtcaaattcttttagtacatggagaataaaattagacagaattctttgagttcagaagagaagaaaattcttcatagtggcaagaatgagctcttcttatgtgatgaagatgaatttaggaaacaattgggggagtttttggaatttgaaatgatttttttgtgaagagatacttctgacaatggaatttaatggtggtgccaaagtggttttggacctttttgattgattgatctgtgaagcttattacaatggcctttcaaaaattatatgaagtagagaattttgtaattgctgtcattggcacttctgctgtttttttgtttgaatcaagagtttatatacacatgtatattatctatatatgaatatataatgtgtgattttttttgggctgatttcgtactcggttcctgcaatttgacagccttcacatttttgtctcttgaggaatttgtttggatgtgttgagaata

SEQ ID NO: 266792 - DNA, 3514 bp, Cannabis indica
tctagttttttagcagtggtgattgtgtgtggcctgaatttgataaactcaatgcttagaattcttttggctgcacctaggtcattcatctcaaactcactattaagttgttactttaactagtttatagcagatttatccttacaatatacaataaaagacaaatctaattaaggtattaaacacatggatcatgtttactcttgataaaaccaattttcctcatgaactcatcaaatttcaaattccattgcctaggtgctttctttaagccatataatgacttgttcaagagacaaacctggttgagaactcgattgtcatatccctctagttatttcatgtagattttctcttccaaatcaccatccagaaaagtagttctaacatccatttgcaccaactcaaggtcaaatgttacagacaataacatataagcttgattgatgtttgcttgacaatagatgagaatatgtcattaaaatatatcccttctagttgtgagaaccccttggcaattaatctagctttgaatgttgttcattctattcttggaatgccatattttttgcctgaaaatccatttgcaacctatcaccctatagtttgcaggcctaggaaccaatatccaagtcttgttcttcttgagggaaatatttcttcatttgtatcttttaaccaagctttaccattcttctctgtgatggcttcttcacagttggtaggttcatcactctcaatttcttctgcaatagctagtgcatatgttataaactcagcatagccatacttgtcagctgctttaatgcctcttcttactctatctcgagccaactaataggtacttaatccaccttgagttgcatctatgtgtgtgtcagtttcaattttttttgcatcatctggtggaacttctataatttggcctcattggatggccaaatccacctcaaacttcaagttatcaccttgtgactgtgatgtacttgttataacttcctcctttgacttcatggccatttcatcatctctatataccttacaacaaaacatatatacctacaataaaaaataaaataaaataaaataatattattaaaaaaatatgtatataccatattaacaaaattatatacaaccactactacaaaacaagtctttagagacacttttttcagcataataattaataactgacgccatagggttgaaattttttggaagggaatttgacgccacttttggagtcagttatttgaaaataactgacgccatgacttccaagatcctggcaggcacatgacctgccagatcttggcaagagcatggctggccagacctcaacctgcacacatagcatggtcggccatgcctcatcctgtagatgtagggcctgccaacttcttcctgacaggacattgatgtgcaaccttcatccatggacagcaagccaagctacaagttgggccttgacagcccacgaagatgctatgaaaatatctactttcaaggggcaatttggtcatttgtatttattaatttaatatataaatatctcttattttatttgtaaattagggtttaagttctcctatataatgagtcgtaactcaaccctagaaaggctaagtctcatttaagcctctaagtcattagttctttactctaagtctaaaaccctaatcttctccctctctctctcttctacacgcccaaaggggctttctctcttcctctctctcacatgcctcaaaggccatatctttctctcattagagatctgcctattgattcatactttgtaaccttaaagagagttatattagatcccacctacacctatagtgatttgaatagtataatctctcggtatcaatacaactaaactgggagtaggtcattacccgctaactaagggagccaaacctctataaatatttttgtgtttttttactttataattttaattgtgtaacacgtggcaaacatcagtgttaatatgacttcacaatcggttggtcactttttgaggttaacaaagcgcacctttactactaagaaaacttttatatatacattattaaaaaaaaacatttattgtatataaatggatgaaaaaaaaatggagacttttaatataggggtccttgtgcaatgaccaagctgcccaatacttaggtcggtcctgtctctatctctctccttccatcccttcttttttcttgaaaaaattacattgtatacccattatgtacattaggaactataattttgataagttatatgaagttatatttggcagtggcactttaattataaaacaaagtgtttatcaattaaaattattttgaagttatatttacttaatgagtaataaaaagaggtagttttgagtttatctcctccttctttcctctctaccaaacatagtattaggataatgaaagggttaactagttacctccttagagtaattagttaccttatactatttttcttattttttaactgcttttttaaacttttcaatttttttaaaaaaaatcataattttgcaaaaattgtataaattcaatgtgagagtgccacttgtcagttagtttatgttttaagttaaaaagtgtgcttcatctaatttctaaatgatttttttagcttttacattgtagtcttagttaaatatatgtgaagatccatagtgattattattacaacatgaaattattatcacttcatatgaatattctaaatcttggattttggaagtcgatgtggggtacgttcaccataacctgcaaaattcaaattcatttcaaacttatgtgagcaccaatatatcattttgataataactttttaatataaatatgaagtaattaatttattaaattcaatgggacattcaaagttcaaactggaataatcttgcttatcttatataagattgaacttgtagttgggttacacttacatacatacaccttggtatcaaatcaactatcttttcattttgacaaataccaaaatcaatgaatatcactcccatataaacaaaaaggaaaaagagaggtatgaactaaattgggcctaaaaaatgggctacatctcagtcttcccggtgctgtgatatccagcccacatcagtatttgcggaattgggccgagaagaggtgaattttcatgtcgttttctcaatgtttgtaacttgcaatttgcaagtatagactatagttctttgaaccaaatatgctatattaatattaatttaaacaaaatgtgagaaaaagattcattaaaagtctataaataaacagtgaacttaagtgagaaaatgcttcaatttcaaaccttaattatgagcaaataaataaggcttcatgttcttattcataccaagatttcataacccttttggttaacataacaaacaaatacaacagaagcaaaagaaaaccattctttttttattatttttttcttgttttctttgtttgcatttaacatcataacacta

SEQ ID NO: 266793 - DNA, 1399 bp, Cannabis indica
aaagccttgtaagttgtaacatttgcaagttaccttttaggaagtgatgatggcaccattgttctcacaccaatcttccaacttttggggtcagcaaaacaagttacaaacaatttaacacagcacaagttttcagctcattccggttcagtcactgccattctttcctgtactagattatgcaactcccagatcatttcatgctcaacggattcaacatgtaaattttggagcctcaaccgaggtcccatctaagaaccgtggttttcccttgctctgttctgggaatcactgtaaacccatcggaatcatatttttacgccgcgggctcagatggatcgatctacaaagggtcaatcagaatcgggaatagaaaaattcccagtaatggaacagaggaagagctggtgagatgggctcagaatcatcataacgaagcaatcgtatctttggcaatggtgaataacggaaggaatcttgtatcggcttctgaatatgggaatgtttgggtttgggaatctgaaaatgggcaagtggtttcgggtcttgggaatgagatgagagttggaataagtgacttagtggtggcttcgggaattagaagcgggaaagatattgtgttagggaatggaatgggacttgggtacgagcatgggtcgtttgggagtgaaagggttaggtgtttaaatgtgaaggaaacgatggaaatggaagacatgatggcggtggcagagaaggatcggagcagggcaattggcatgttagagtccgccattgctatgtatgagaggcttttggagcttattcttaaagaagccaaagaagctgctaatactggaactggaagtagaacttgcactacagaagttactaaacaagaaagagaaagtgatacataattacacctggagaaaattaaactgttaaccatatttgttgaaaaatattagtttaactcattaatactatattattcattagtatattattattatttctccttaaagaatgtcttacataaaatgaactaatgttttattttttattttattttctcagttgtttatatgaaaatgacgcagcctttttgtcattttttaagccaattatttcttcaggcctcacttctttctaaggaaaaacttcacgtaggcctaagacatgcataaactttaaacaaacgtaaataattttcaaaaagaaaaattacaaagaaaacaacgtaaggtatttatacagtttattttgttcagaaaatatagtaaatataaaaaagacaacttatcaaaaaaaaaaaaacaagacaaatatagattttatcatttagaaccatgattcagtcaccaacctttgattttggtttttgtctttgatatgattatgaccttgaaccgattgc

SEQ ID NO: 266794 - DNA, 4600 bp, Cannabis indica
tttatttattaagatatgaatttataaatataaatagtttgttacttttttttttcaataaatcttagtttatttaaataatttattagattgtcaataatttttgtttgatttttcaagatacgtgtttataaataaaataaagtttaaaaatattttataagaataatataattttttaagtaaaattaatattttttaattaatttaatatttttgttaggtttttttttttaaataattttcattattttttcaaaattaatagaatattataattgccaaaaaatagaatattataatttttaaaattattttttaaataaaagggagcaaagttcatattaatcaaagtttagggaataaaaatgctaatttttaacggtaaagataatagaacctaacagaaggggcataattatgtaagtactatattttagagagaatttttaaccagccgtatattttaaggggcaaaactaagtagtgccgaaagttcaaggggcaaatatgctaattattattattattattatttttctaaatataacacaatttgctttgcttacgttttaggtttagtcaaactcaaatttactattatttagttaagagtattgctattaggcattagtggtgcttaacaccttctcaacatgtcgcgttgcgagtggctagcgatacttcctaaaagctattatattaaattatgtgagacccgatacttaatttaactaatagcgatattgacacataagaggctattagacacagctggtgccttttatcatttctctttagttaaataggacccctagttcttttcaaaaaaaaataggacccctagtttcgtgtgggcgagtcccacccaaccaattccgggtttttaaaggcacacggggaaaggtgcgcccctggtttgcgtttccgttatcttataacaaaagaaaaggcagtttctaaacgacagcgttttgttcctattatccaaacgactctccgcggctgttttaagctttaatctcacacggtacggtagttaaccttttataaggaaatgtcgtccatttctactctacttactcgtagctcacacactcaaaatcctcgccatgagaagatccgcaccttcgattccccgcataacatcgatccaacggatccattcccgccaagttcatgccccattgccggcaactcctatcatcgagagtcacaacgaaatccctacattcggctctttccgtaaatggatttcgggtatcctggcgggttcgggtctagggtttctctattggtcgtcttcgtccaccgattccgctttcgatttctttaacctgtcatctatggctttcgctgactgttctaccgtcaattcagattcagaagtgacgttgcagaatcacagtccgcgttccttgttacagaaactttctactgcctgcacatagcgctagttatattttttggaggtaaattaacattaaattctaatatttaatttgtaaaaaatatacatgtttgcgttgctcatagatagagatgtatgtatatatatatatattaattttttattgcagaagcgtataggaggaaggttttctttaactatgagaagcgtataaggttgcgaagtcctcctgagaaggtattttatttccaatgatatatgtgatgtgtgtaagcttaacttaattattctcagttattaacatcattagttagtctgtgttatgatttaatgataattcttgtttgggtatttaggtaacttgatttcacgttaatttttagtttgagatattccaaaatgtacttgttatctgctgtaatatggatgattatgaactctaagaatacaaaatgtgcaattgcattttacgttgattgatgaacaatttagttgaattcaggtcttttaatatgtgttcatctcatgccaatgtgttgttgtgtcccttttcctgaaggtttttgagtattttgcttcgtgtcgtacttcggaaggagaaatacttatgaaacctgctgatcttatgcgagcagttgttcctgttttccctccatctgaatctcacctggtcagagatgggtatctgatgggggaaagaagttctggagacatacggtgtgacccttcagaactttttatgctatttgatgtaaataatgatggtcatatttctttaaagtgtaagtttccatatctttagctttttttttttggtgttttctattttgactttaatacattaacatctctacaggtacatttttttcgtaacactgcttagtctcccagaatcaagcttttcagtagcattcaaaatgtttgacatcaacataatgggtcagtctttactctttatttgtatttcttatatgaagatatcatataggtgttatttgaaggtagtgcatccaagaaaagattgttgtaaattagtctctccctacctacacccaccatgacagcagtaacgtagcaaataggagcagcttagagcttaattgttcttaaaaaaatattgttttgacttctgctatcgccatttgtcttctctggttctagaaatgatgagattatagctaaaccagaaccggctgaccttgctaggtttagattatggtggtatctagtacttttttgttgagtgtttatttgtatttagatgaaatgacatgatgctgttgtattgtttccatagaattcaaacgcatctaatcgtcctctgatgaatgaattattcacatggtgatagggagatagacaaggatgaattcaagaaagtgatggctttgatgcgagcacaaaacagacagggggctcaccatagggatggacttcgatttgggctaaaaagcaatggttcggttgaaaatggaggcctcgtggagtacttttttggtgaaaatggaactgaacgcctgaaacatgataagtttgtcaaattcatgaaagatttgcatgatgaagtaggctattctctttcctttcccttgattattcagaagtttgaattttcatatgatagtaatgttcttggtttcgtatagaaaatattcttatgaagttattattattatttttctgaaaaataaatataacctggtttagcttgagacaagtcctcccgaagttacagaataaaatttaacgcaaattttggtccactaaaaccctagaccttgatggcctaccttctcacagggaggggagtagacatctctcttattttccctttcagtctctaatgaacagctaatgctttgtaagccttctgcaaatctccctgatcttcttcctatggagatcgagtggaatgaacctcttgttctcgtaaacattctttacagcagccttatgcattcgtgatatcaccgtcaacacacgagcaatccaaacttaaaagcctcacaaccttaatcttggagagcttgtttagggcaccgccgatgaccttggctactggaaggaaaaggagctcagccttgagatccctaagcttgttcaaaaggtcttgttcttctgcctcagctggtcaaccttgattcttgtcattgctgcttttttttagcttccatacagcagctctctctctcactgaaattggaaccctaacaatcagaggggttacgtagttgtgctagcctctcctctatggtaattttccaaatactatcaacttccccatttaagaaatattgaaattcttcccactgcaagccctctgtccttaattatagacacccagtggactaaatcaactggtggtgtccttgaatacaactgagaagaaaactccccaatattaaagttagtacatgatctctccacaatttgataagagttcagtagaaaataaataacacagtagataactcgaaagggaaaaaagtccctaaaacagtaaatgttattgcaatttatagagaaactggaatagaaatgagttaggacgtattcttattagttcacgtgtctactttgaactccaatttcttgcgcaaaatattcaacgctcttccgcgccaagagtaacaaaatggcctcttctgctgcctttttcctcaaacaacggcctctgcctctgcctctgcctctgcctcatctttgtgaataatatactttaatgaaacacgtgttttggggcaatgttctggaattaattatctcttaaagaaaattattttttatcataataaagtgccctcacggtagttattgagatcttatgtctatgacactatattttgaatcatcaattttctatgacgtgtgtagttggtatcaaggactcgtgcattattaggtgaatctgtttaagagcaatacaactttctgtagctggagtaagatggcattcagtatttgtgcacgtatgtgatgctgcatgttttcagatctcattgaaccttatgtggttataaatggtgtttaacctgttgaaataaattaaaactgaaagtggaagctaattggaacttaggcacaagggtgaactgaatgccagcattcttctatatggaatttttcggtgatcagttttgtgaattctgatatctgctttcatatatgaatgcttgaaaatccattata

SEQ ID NO: 266795 - DNA, 5471 bp, Cannabis indica
gtgttgagcatccaaaacttaattttttttaccaatgatattctagaactccaaatccatggaattcatcatattcatctcatttaacatatttttttctcattttcaattcacattatgaattttaccatttaaacctgaaacaagtagaaaacaagcataattctgtacaaaatgaatataataagtttcagcgcacctctaaacactttataaaatataccgaaaactagcctatcacttgtcgattgtcttattagacaatgacaaaggtatataaatgtcgggattgggcatcatgattgtcttattaggcaacaatagatgagtagatgtcgggttagggcatcaaagttgtcttattaggcaataacaaaaatgattactttatgttagatatacttgtcttattagacaagtacttgtgtattatggtttaattatattattttgattggttatctgtttgatatgtatttatatttacttttcttgctgagtctatgtgacttacgggtgctttgtagtgcaggtaagggtaaaagaaaactagggtagtcacgagatgattgtcttcttcgacaaatgtacatatcgacttattcgacttgtatggtcgagttgtcggaagatattttgtgatgcacctgatgtgtattatgacttacttttgtatacagccctttagtaaaatttttgtaataggggattccccaaataaatttttagtgatgtcatcctgttcattgctaggattttgttttggtaaagtttttactattatcatagattttattaattgttaacttattattacaaaactatgtttcaaaaccacacacttagcgtccttaagaattagagcttttcaagaaaagttgccgatttcgcaccatatgagaagatgattactgagcttctgaaagttggcaaggataagcatgcactaaaagtagtaaagaggaagctcataacccacaagagggcgaagaagaagcatgaggagatgcccaaagttctccgcaagatgaggtaatttcgaatgaacttgattattagaataattctctaaggatttctctacttgtttcttcagttgagttagtttttagccttataacattgaatttattttaatcacactattattgggaaattgataactctgttgtggttgtttttggctctctgtaattgaatttgtaacatggttcaactatccattatgtagtgtaaagattgatttgtttttatgtttgcttgcagatctggtggagttactgagaagaaaaaattataattcttttcaagttgtatttgggttatccttagaatccaagttcctttgagattttgatacgaggcagacttcattaaaatatttgttagttaaagcgagacattaattctagaaattatgtaatgtgacctttagttttggttttgtagtgtttttttgacaattatgtgtggccaagtttggttatagttttgaatttacacaatgtctttataattatcaattgtgtctctaaactctagttaacgaatcttacgttagttttaactaaacaaactattaatgttcaacatttcaagtgcatcacccaaaaaaaaaaacatttcaaagtgtcgagagactgttactccagtttgcgttgtggattacaagttcacatcattccaatttcaaatgagccaattttaaacttttattatgtttaagagcttctactatgatattatatagtgtggctttaccaaactcaatttgtgagacgtgagaaactgttccaagcctcaaaaacatgttggaaattgttcaagcacattcattcgaaactaaaaatgaaaactaccatggctcctagacaaaaaaacgtaatcaataatcataaattggctattgtttagtgaaagctcttgtgtttgaaaaaggtccatgttaaaatagcttaaacaaatatttcttgaaaatatttatctacctacctattattctctaccattgcatttagttgactggtagttttgaaactctctatactcttatcatgaacttaccatttcatctaatggtcttttagtcatggagaattccacaaaaacactcccagaagcccaagaagacaatgatgatcatgatcatgattcacccacttccacagaaatctctacaaatcttcttcatgctgagcctgaatatcttcatctacctaagttgttggccatggaagaaagtttgaatcttcttcagcatgaaagaaatgaggcagtcactcgctattcggattcaatcaaattcattgctgaactttccagcgaaagggattctcttcagaacagaattcgagaggttgaagctgtcacaagagagaaggaagccgatttcgcaataagaatggatgaggaagtgagtgaaagaaaaaagcttggaaaggaaattgaaatttacagggagagaattgaagacatggaaatgaagagagagcaaagcaatgagattttgtttaaatgctttgagtctcttcgatcggtgaatgtgagtttggaaaggatcataaataatgtggatggagaaaaaactgatgataaagatgtcaagttctctaaatgcataaatgagagtgatttcatgtgtttggaattggaattgaatgaggaactattggctgttacaaggctcactttggaggctgaagaaaaggtgaatgaattcaaagaattgagaaataaggagaagagggagttggagaatagtgtggtgagtttgacagaggagaatagagataccaacagtttgctgagagcagccttgttggagaaggaagctgtggagaagaggttgaaggtaaatagcgagcagaagagagttgcccttttgcagattgcagaacgaggtttgcagcgtgttggtttcgggtttatgatgggaagtgggaatgttgagcaatcactagagagtttttcaggaacaaagtcagatagtagtgagtgtgaagaagaggttgttagcctggtatgtactaagactaccttactgaaagttaattaattaagaatggccaacaccaatttcattagcctataactgtaactagatgattggcctttgagaattggttaagtggtgaaactatttattactgtcattttgaaattttcttaataggcatcaactgtagagaggataatgaagaatttacggctcgaaatcactaagttgaggcgatctttggaagaatctaggtatactctttctagaatgtgactgaaaaaaaaaactaagaacagttttatctgttctaataattccctcctttgagtttataacatcagctaaacggccaggtcagacaccgagcggttgcagagtcttacggacaaacaagctcaaactattgaagaaaacaagttatacatgaaggagttggaggaaagagaaagggtgctgactcaaaatgtagttccttgactgatcaaaatatgttatggttattttgctctacattcatcaaacatgttcttttctataccatactaacttgtttctcattttctatgtctggaaaaaaaaaggttgaggaattcctgttggaaattaaggaaattgaagcagaggtaactagatggagagaagcttgtgaattagaagttgaggttgggaaaactgagattcatgaacgcgacaaagtggtaaaattccattcctttctttgttagtattcacttagatgattactcagtcatagagaaccataaagattaattgtttgaaactgtgtaatagattggcattctgaaacaagagttagagaaaacaaaggcttctttggacatatcaaatggcaaactaaagctgaaagaagaacttgctgctgcagccatggctgctcaggctgcagcagagaagtcgttacagctagctgacagcagatctgcagggctccgtgaaaggatagaagagttgtccagacaactagaagaagcagaaactcgagagcgacatagtcatagggtgagacatatatgctggccatggcaaattctcaaagcccatgcagctaatgtaaataacaacagagtgcgagatgcacggcgcatgataccacaaatgcaagcatttcatcattaaaatcttaaaattcatattgtattttcgttcaagatccatctttaattatgttagaacctcatttttatatttattcaatttaaccattgtctcatcctcccatcagtaacacaattgctttatagtactgtaaagaagaaattaacacaaattttactgaaacacttgttcaaactgagcatatgatgcattagatacataaatgtgtaaatagttcagaccaattttgtaaacacatggtatacaatagtaagtaaatacatggcaaccatattgcctcgatctcttttgtgataaagaaaatctgatactcttttcttgcattctcttttcaactggttaatcgaagagccttccaacttcttgtttcatcatgaacttgatctgaagcaaaaacatcaacttagatataaatatatttttaaataaattcctacagattaaaacaaaatttagtgagttatgtatgtataaaaatacctgcttagctgtaagtccaatatctttcaagtcatcaatctgaaacaaatattagcatttagtgttacctcatcgaagggcttagcatattagaattatgcacaactgaagcacttacattcttgaacggctctggagattcttgacgaagttcaagaatatatgatgatcgcttctctccaattccctaaaaaatatatgcatttgtgtaaattatgagaatgagaatgagatttatataaatatatatatataattaattaaaaaacacacagcatacctttaattttttcaattcctccctgatgataggaaaaacacataaaagaaaacaacaatatcagttacaacattcttgtactacaaattttgctagtaattatgaattaagattatatatgcggttagaaactcaatttgagtacttacttgtcagctgtatttagaactcttaaacattctttaacaacagaattctgcacaaggaaacaacattaaactaaattacttccggaatcttcaagaaataaatgataactacataaaagaatagctgttgaattgaatgttgtggtttatattatttacattatatgaaaatgattgattgatgaaaatatcaagtcataccagttttctgaaaacatcttaaagaggcaactattctttggaaaatataagccaatgtatgtaaaataacacatttggtttaaaaatatataatgaaactttcatatccctagctaggagagagaggtaagtattataagttataactgatctgaaaaagaaaaaaaaaattcatagactaatttttatgtataatataacagtctaaaaaacatattagattaat

SEQ ID NO: 266796 - DNA, 948 bp, Cannabis indica
ttggtacatattaaagtttagagagcaaaaatctaaactagcctaatatataattctttataaaatttcaaaaggaagaaaaaaaaataataaggattatagtgaattaatgatatgttaatgtgtttcactttattatttattattgaattttcattaatattatgagtaaaaaattcaaataaccgtttgcgaagcgcagcatgtttcctaattgataattaaacgggctataaatattttgttatttgcatgctcttgaatttggcttacatcgcattgatttggtgtattgatgtttctaattctaactatgtattattattacatggaaaacaccaaaagatgtcatcagcatatgattagttagtgaatcttaattaatacaaatacaatgctgcttgcatcattgctttacttaagaatgtcaaaagaggtcccataatacatgtacagttaacttactcaacattttacttcccaaatgcatccaaattaattaaaagcaaatgtagtgtattgctcatctcaagcaagcatatggaccccccaactacactatagtctatacataaataaaagaaatatataaatataaatatatatattatattatattaataaataaataaaaaaagtactgtaaaacggtgaaagacccactatcgtcctggttccagagtcctcttacagtctttatttatgttgaaagtatggtggtggagactgcagagcccggccaaaaggaccagcagcaatccctttccaaggattttttaaaaataaaatcccgacttttgttccccattgaccacctcctatatagccacattgaccaactactacatttttctggagtgctattattaattactacttcttagtaaatctcccagcgtttgaaaatacaccatggaatatttttttcgtaacaatatttataatatt

SEQ ID NO: 266797 - DNA, 3901 bp, Cannabis indica
taaaatgagtgggccttaggcgcaggcctagcctgcctatacttagagtcgaccataggacctattacaaagtctcaccactattgatgataaagtattgctattagacactatatttgtcaacacaatacgaaggtattactaattttttttatattatttattaaattaaattacgtgaaattcaaaattaatttataatactatacttaataccataataagatgataaaataatgtaatgggatctaataatttatttctaattataggatatgatagtgtaatttagacaccactaatttaaaccataattgttttgaattaataataatttaaacaaggattacattacataagaaatttgaaaatgcataactagaattgggtagtaaatatgtagtaggatcatataattcattcatttaattaattactatttagccattattgctttcaactcaatcaccaaatccaatatgaacttatcttgaattttcttgtccaacaaaaaactacgccactttccatgattcaatctcacagtcttaccaggctcctcatcaaaatccaccattatcttcttcaaagcttcataaatatcctctttcccaaaatacccatcctcatctctcctattaacttccacaccagctttcaaatccaacccaatcagcttcgagttcataaactggtctcctttaaatggcagcaaagtcaactgacaatcgttgaccaaagcttcaacaatggaactaaaaccagagtgacagaggtaacacccaacgctttcgtgggcaagaatctgctgctgctgcacccacccagagtgcactacacctctgtctttcactctttccttaaaccctttaggcagagctcgttctagctcggttccggcgtcgagattcgccgggaaatttagaaccaagatgaatggtaatcctgtttgttccaatccgagtgttagctctctgatttgattgtcgtcgagaaatgtttcgctcccaaatgagcaaaaaactacagattttggcgggaaacgactgagccaagtttcccatttttcgtcgagctcgccggacggtggtggctccgggactaggggaccagtcatcatgattggttttttgtattgggttttcatgaaatttagatatggaccttcgatttctttgcaggttttgtatatgatagctgagcaaccagttaagccggaaactactctgtcgaaaactctccggtcaccgtcgaaggttcgaaacatgaacaagtaatctctggcttcgaaggttttgagacgaatttcagagctttgaggaaaacccaatggaggattcttcagatcttcgacggtgatttcttctccttctacgccggaaagtctggccggaactgtaatgtaagcaccggaaatggcacagaaaacagagaaaaacagagtcttgatacccaattctgaagcaagagaaggaagccagtactgagcaaaatcaaagacaatgaaatggggtttgagatcagttagaagagatttgatctggggttgcattagatcaatagctttgatgaggtttccggcttcagatgggggaagatcggaagttccggcagttgattgagtgaggccatgaatggatgggatttgaagaggaatgatttgggttttgggagaggatatgagtaaggattcgattcgtgaaacaaagccaggaatggtgaagaatgagattcgaactccatgagaggaggagagcttgtttgagagttgaacaaatggacttatatgaccaaatgcgaagaatggaaacattactaagtgaagttcatcactaaaatctttggtcatctttggaaatataatgtcaaaattgccaaatttaagtagagagtttagaaatatgtctatctatatataaatttaccaacacacttaatatgataggtaggtaatgcacttttattttcatgataggggaagagggtttggtaggtagagtttccaaatgaagaccaaagtgttgccatgttggaggggtccaacctccattctttatttctcatttccccccccaaaaaaaaaataaatgtggaggtttccaacctccattccaccaagtaactaaaataagagtattgttattagactagcacccctttaaaggtaaaatcttataattaataagcgatattttataatagttttgacattgttattaggactcttataattgattagcgatactttatataagttattattttaaattatatgagactcgatatttaattgtaccaataataatttaacatattgaaaggtgataaacattactgatgcctttcagcaattttttttaaaataaaattatttagaactcaatatttaattatatcaacaataacacttttagcaatttctctttataacacctttatcaacaacaatgtttttttatttctcttttagcaatttctcctaaaataacaatgtaaaatgctccttcattaaataagctaattataaatcaaaaaatttagctcatgaagagaagccttatttatttaagctataaatattatattaattttttaaaaaatatatgtgggtgatattattatatttatttttaaaataaataaaatatactacaaaatataatttttaagtcatatagagaaaatataaagaagtttatgtatagtataatgtaaatttatgaagtaaaattaaaaaaatatagtttttttttcttatgaaaaattcatttttattaaccattaacttctcttaccaaataaggtaacaagtcaattaaaacacactctaaactaaaacgacgatcacactccaaactaaaacgacgatcaaggtataatatagaaattttagtaaagttatgctcacttgaccaaacaaaaaaatcatataaaaaaaaagatataattttaatgtggtaatttttagtaaataagaaagtactagtactttagtaacaggccgtgggaaccattaattatgggataattacactacattttttttacttttatactctagtactctagtatgaagcactttacactgaataagatgtaaagtagtgtatgtgagtgaccaagactttgaataagatcgttggttgaggatatgaatgtggcacttattttttcctattcaacctaattacaaacaaaaagctctgctatgcgctcatgtcaaagtgaaaagggtggttgaggatatttttctcactcattgtcaatcattggccactgcaattagcaccacgggtgacaatttaaattaggtcaagtaaattttacattaacacgatatgagattttgtaagtttaacacaatatgaaaaccatgtgagtcttgttcgtatcaaactaaaataaatttaaaaactccacatagtacgatcatactaaaaaataacaatttagcttacagtacgttaataagacacgatcgaacacaaaattaaattttatgaatttggcatgaaataaaatttatgcgagtcgtgtttgcgttttataaattttttgtgttacgggttgtgtttatgtcgacaattctttttaataaatttaagatttcaacatgcacgctgacaaaaattattacgaccctaaccagaagtgttcctatttagactctttcttctctcttatgtgttaattttgttgtttcttaaattctctctaatctcttaactagaatgttcataattttgtttttaggtggcattagttcatagtaatagtaataatgaataaatttattacattgttattttttttttaatataatgattatattatattaatagtaatataaaatttgtttacattatttataggtggtcattagaatataatgattattaca

SEQ ID NO: 266798 - DNA, 972 bp, Cannabis indica
tactaagaagagagaaaagagggttttctttgtatagctcagttcaaaatgagaaatgcaaaaaggacatatcaaataacaacaagggtcatttcaataatacacataagggtcatatttttttttgtaacaatacattatttttataaaaacaaaccatattccatgttgtcatttataataagtactattgttatatactataagcgcatgtttccttgtaaaaaggaattgatttaaaaccattttcataagaattggtttagaaccatgttcatatataagaattgattcaaaaccatgttcatagatgaaataaccatcaactagtgaatataaaagaaccatcaactaatgtgattattgactgatacaccacaaggtcaacataaagacctagtgctgcttcctacttggttcaaaaacacattacacaatttgtagtagtatgcagtattgaattattttttaggctttctattgttattattaaataaatttatttacataataatgtaaaaatttacatgtatatattgatatagaaattaagaaaagaataagcagcttagatccaccggcatgatgaggcccaccaacatcattacacaacacacacacggcccaacatttgaatttaaatgacccaatacctcgggcccaccaatccaagccagctttattcaaatgcatatcttctaaaacaaggaggaaagctaactttccatgttcaggaccttaattatatgtatattacgattaaaaagagggaggaagaggaaagaggaagaaatagcagaggcagaggcagacattgtcttgatgtatcaagcaaaatagcagaggcaactgctaggcctcaacactgtgtgtgcagtgaagagtggcaaaccacattgttagaagacatgtcctcctctgtccaacttcacgtacgactggtttctccttcatcaaaaaaaaaaaaaacga

SEQ ID NO: 266799 - DNA, 1245 bp, Cannabis indica
atcatcaacttgatcgcgatcacacgatcatcacgaatctgtacatgtgtatattcagttcctttcaactttttctttcttttttaatttatatgatctgattaaccggtctaaaactaaaatcatgagatgttcataaatcataatcaactaaaaatgttattatattgatgcacacaggtttcaccagctgcagcaacaacacttttagagaatgagccaatcaaggttgaggagacaaaggtagaggaatcatcaccagccgtggcagctgagaccactgaagtagtagtagtaccagagccagaagtagaagaagaagagaagaaggaagaagaagccacagagacccttgaacaacctccagctgatgagaaagaggtagttgttgagaccaaagaggcagagcctgtaaaggaagaacccaagccagcagaggaggaacccaagtccacagaggaggcacaagaagaagccgttgaggaagaagccaaagaagccgagccagaagccgccgccgccgccacccctgtagcagccgtggaagaggaagctacccctgctgtggctgagaccccagtggaggagtccactgaagttccagttgagaaggaagatgcatagataaatagatatatttatatatgtgtcaaaagtcttgggtggtcatatttttctcttcttttatttattactagtttactatatgatggcattggatatggggtttagagtttggaagctgcagttatttatttattattaggagcacttttatcggatgagtaaatatatgcttaattaaaaaaaagagagtaatggattggtgacagtggtgtacgaattagaaaccccttatcatgaattaggaaaatgcatgctctattatgaaacctctgaaggagtgtgtgaggtctatataggttgggtgatgagtatggatctttgtttcagaaagagtagtcatgagtttgatatggtgtgattttctttggttttgaataaatggatactatttctttatttttgtcacattagtttttttccgctatacaatttactatttgctagtttggacatcacttccctaataaacggcacgaatcaattattttagttttaccttccactatctttaatttaaacacaccaaattattaaggtaaaaagtttaatttgtatgtaaagcaattagagtagcattggagcagcttttcctccagttttaactttctaaaacaaatt

SEQ ID NO: 266800 - DNA, 1442 bp, Cannabis indica
acggtcaagaaagctcagcaagtgagtagatgaaaattaaggggctgcttacctaaaaacgctaaggatgaggataaagatggatttaatgatttgaagtgtgtaatgacttgtatagatctggaatgaaaatgtatagatagcaaagtgtaagattagtgatataatagtttgtttggagcaataaaattcttattacaattaaaaaaaaaaaaaaaatactctaataataataataaaggatggcatatttaactgagttgaaatgtacatattatattataaaatggaatatgtatttaattgatagataatgaggttacaaacatgataatgaagaatatagtaacaacaagaactcaaataataattcattaagataattaaagcaacaaagtatatgcaatgattaattatatgtatgatagtagtaaaacttgccaacattatagtgataagtatgatgatcatggtgactggtagtgtgtggatgagaggagcacgaataattccattgttattagatgatgaaaacactctgcaaccagctgcaataggaagtctaccaattacatcacatttaccaggctcatcaaggacaatgtcttctagggttttctcagccctggcctaatgatgaatttaaacaccccattagggtttgtgagagccttggctatatggtacgtgttaccatcatcacaagagaagaacacattcacaccattgagctgtggaagcagtggtgggttgttaggagggtttggtggaggaattccacatgatcttaacacaacaatctcaactgtaatctttggcattacattagtgactaaggtgggaatagaagtagttggagtaattatagtctcatcatgggatttggttattgagctcattgtaatggagatgagcatcaaagacaccatatataaccattattattggactttttgaagtacttattatatgtatatatagctagctaggtagctcggggagcaagttttcttttctttttgtttgtttgtgatgatgagtacttctatttataacctttttatttgattgattaattaattaatatatgttaagcattaatattaagtttaccttatttttgtgtttgtcatcgcgcgtgggatgcaccatcaataatagatagcaaaatcttaatttgggtgatatttttgttgatcgtatgcacgccatgtttatagctccatatggctagttgaaatttatatattatatgtataatataaacaagagaaattacctcatatatagttcttttaactctttttttcaaatttacgatttgaatttttaaagtagttataacgctagttgcattaagggtttctatatgattttttattgcaatttaagttgcagtgctagttgcaataggggtttctatgtagaatttggtaaaaata

SEQ ID NO: 266801 - DNA, 3635 bp, Cannabis indica
tatatatatatatatatatatatatatatatagacattgacccaagatgcttaactaaatccaattctttttggttaaagtagagtttacaatggcaaattggatgcatactgaatgagattatgtcaattaggtccaaaaagtgagggtcagctcaacaccgttgtatctacaattgttcggagaagaatgaaagataaataattaatgtctgcaaatcattgatggattatgacccttggatttttgatttcttattatttttattttgtgacacaagtttgagagaaaagataactacattgcttaaataggaaaaatatgacattcattacgcagtgaatcaaacgctacctgctgtttaagagtagctaaactttttgtatgcataggagattgtggtataactccattggcgggaggaatgccaataagtccacacagaatgacctggagagggcaagagtaccaaagggaaagttttacaatttaaaaaacaggtaatgtagtttaattggagtgggaaacccaagaagagcatcactaaagtggtactccagaaaagtaacttaccagaaaacccaaaagaagaaggtcatagtgatatgaaggtggtttcttcaaattgaactcttcctgttgagcaagttgagaggccacactgtgatcaaagtagtaaagcactgcaatcatagttgctggtatgaatgctccaactatatataatggaggaacttgcaccatctcctgcacagctaataaacatgagttcctagcagcaagcaattaaggctctatcccaaatgattcattagatgacaaaagagagttaactaaaatatttggctaatttagaccataagattcacctttatgacagtccaattcgagtatgcaccaggagaccatggattgggactgaaaagccgtcttgggagtcctttagggacatcattaacaggtatgtaagataccgcagtccacacgagcaccataagtggcactccataatcagcaataaatccccgtagcctacctaaaatgacaaaaacacgtcaatagacgcacataacactttccctctctttcaagctaccaactgaataatttagtatatcaagtcaaagaataagcttctttatcctcattttgaccacaaaagaagtgaaaatataccctaagaaaagtcaacttagatttctattttgtaatgtgttttaagctagacttgctctttgttcttctgaaacccaaacctcctcgacttaccagaaccatagcgccacgatctagctttacggcttcttagtgctgttaggagaagcccaaaagataaaaccaatgcaaacatcccatttccaaatctccacgaaggttccagtacggtttgattagatttttccctcccaggtacaccaaactcttcaacaactccctgtacaagtcaaaccaaaagttgaagctaccattagaagaaaaattactttatattaaaggttccaaatccttttattcaaaaactaatcctgtcatttggaattgaatataataaagcaatactcacccttatcgcctgttgcataaaaagcattgcaattaacataccaaataactctccagcaagacgtgtaaacctattgattattgagcatgcccccaaaatcgccagcaagaagagcaagagggatgtccacacacacaccctgaataccaaacaaagtggagggaaaaaattgagtttactgacagattagtagtacttcagttatatcacaaattgacaaatttagtgtcttcaagacataccatcctgtccatgccagaaaaagttcctgccccaaatcctttctgtccttggcaaagttgaacataaatgtatacatcaatactgtgggctcagccacccctagtatgagcaagggttgtcctccaacaactgagtggataataccacaaagtgctgttgaagcaagagtttgtactgcagttagagctccatctgtgacacatgatcaaaaaaagctattcttagcaaaactatcactgtaacagcaactataattggacaatcactataaaatcataacaaagaaaaaagctttacttgtatctctttccaactgttccccaaatgatataactggaattgcagaagcaaagaagatgtaggttgttggagccaagattcttcacaaaaatagtcaaaacttcagtgagtcatatattacagtttgttttaaccacaaagttgatcaattttagatcattgttataaaggagaagacaacatagtagcaacatgttagtggtgttagaataagaaataagagattaacaaacctgatacccgctcggaggccaccagtccagtcttgtttgtagcataaaagtcttcctctaaggtcattttttatccctcgaaagggaacaaatgtttcttccattagcaagaagatggaagctcttccttgctttgtgtggaaaaaaacaagtagacaggtgaacaaatgattgggagattctaagataaagatccaaattccaaggagctcgagaggccaatataggtgttttagattttcatagtcaatatatgtaaacaaaactatggcagagaaacaatgacttctttatcatattgagatttgaaggttggcgggaaagaagaatgtgaatccattgattcttgaagtataacagaccctttgaggtccttaaatgaatggttaatatcagtggaagaactttacattgcaaagaacttgtaacaaattgggtgtatatggtatgaagaacaaaagaatagattaaaaatgaattgtattgcttggatgccttatcttagacaaagcaaggaaactagcgaagggaactcatgatagtggattggattaggaagctctgtgctaacgaaacaaacaaacctccataagttcagatcacaaggctagcgttcaattatgaacaaggttagatccatcacctctcttgactcaaatcaaaaaaatccttcttctcatcattaactacttcccaccaaaaaactcagcactagtgaccaaacatagaaacatgctaaaaaaattcaattacatgatagaatatactagctaaagttgacacctttgcctttcaaacttcaaactttacaggtttcaaaaacaaggaggagaaaattaacggaaacccattatccagaactgcatttggaattatttagaacaaaattaagcaaatgggcattcacaaaacacaccaagaagtttgaaaccgaagaaattgaacgaggaaggtttacgcaggaaaattaacgagaacccatgatgaaatcataaaagggactgtttaaaactgttttgagtaaaagggcattcagcaaacggaaaagaaatctacaatgcttaagagaatattacattatttagcaaacgtcactctttgaaagaacaagacacagaagaagaagatgaagagcaaggataagatcagttacatatccagagcctgaaagcaaagggaaaataaggtgcgtgtataaggaaacaccaaactcagatgagtttctgacaactgaaccaataaacgagaagaagcagaggaagaagaagtagtgaatcagggagatttctgtgaac

SEQ ID NO: 266802 - DNA, 2228 bp, Cannabis indica
tatatttatacatatataatctcagcaaaattatgacactataaagaagaggagggctaccctgtacctgttaactgaagtgagtgagtgttcatactactgatgattctaattgattcaaggtagctacatggacatgatcgctcaattcgcgacccttggtttcaaatgggaagagcagtacactgatccctgaaagaaaaactacaatctcaaaaagaataaccgcctcagtttgatggcatccgtgtattaatcctattgcaacaaggggacatgtcattccaccaattcttcctactgagctcgcaagtccaacacctgatgttctgactgaggttgggtatatctacagttcaaattattataaaaacagcgaagagagttagtatttgtatgaacttaacaaaatcgaagtaatcgtagtgaacaaggggcaaagcaaagcaactttgaaacattttatatatttttgtgtcaacagagcacacaatgggagtaaagctaagcagctttgaaaggatcaaaaattaaaactgagaagccaaatactatagttatttctcaatcacaaaagctatcaagtattgtatgaacttaacaaaatcgaagttaaggacagactaaacatagagaaaagaatagcaagttcaaaacaatgtccctttcctgctgagtttgagtgtttaataaagctttaatataagggattcccatgttagatcaaagttgtataatggtaagtatgacaaaggcaaaagaattgaataagagtaaaaaggaaaagcatggagtagccagtttctcatattttcatcttatgagaaattgaagaaacatcatgatattaatagactaagatcccatataagaaattcataatttacctctggagcatatatatagacaattgtaaaggttgctgtgatacatgtgcgagctccaaacaaaagggccgtagtcagattctgcggctgatggataaccaaaggaaaaagaaatacgcaacacacaaaaaacatggttgacattgaacgtttacggcccagtctatctactgtgaaggcagctatgagaagtccaggcaattcttcatggaattaaatgcaaatattacttaacaattttgtagcagttcgtaaacattttcttttgcataattcaatgatcatgactgttagtagaaagaaaggaaaaaatggtaattaagtggcagtacctgcaaaactagtgatgaaaatatctctgtagttgacatcctgtgactttgatgattgcaaattgctttggtaacatttactatgtccattattcaactcagatgtcaacagcacgaggccgtaatatgaaaaagcatttccaaaaaatacaaaccatagaagcaaggtagacctaattaatttgggggaaagaagcactaatagtgatgaaaatgcccccgtcttagtatctgttgtcttagaaattgtgctttcaccccccacagatggcagtaaacgtgtatcttcttcttctgatggagtattcttttcctgtagctcaatttggtgatcagatacaagaataccaggagggagcttggctttgttcattcttgctattttttccaaaacattgagtgcttcagccgttcttcctttcgagcataaaaatcgaggtgactcaggtgcaacccaatagaatagaaggagaagggacgacggtatcgaagatattgcaagaagccacctccaacccagtgttggcatgacaaactgtaaaccacacaacatttcaagatcaagatgcaaatcaagtgtatttattatcacatatgtgaggtaaaagacttgttgaaattgactaatttacttgcaactgaaatgattttggttgcatatctggtaaatttaatggaatgacaaaacaaagactccaacactctccatttaatagcaattcaatttcaaatttttgtgctcatatattttggtacgatgattcatattcatgtagtaaaacattaacaagtatttagagtataatatatggctatatgagaaagttagtttaaaaagaaaacatcaagttaatataatgaacaatagaataagaagagagtagatggaatgaaggtaaaaggaccttgaacaaaggcgaccaatctaataaatttgtgaataaggaactaaaaatgtaacacataattttgttttctgaaaaggagaaagaggccacttgtcttagac

SEQ ID NO: 266803 - DNA, 3456 bp, Cannabis indica
cctttggtgcaaatagagatttactcaaacattgcataccccccaattcccctcaatattctatatatactattgtattccctccaaaacactacccttaatacaaagactcaattaaccttttatttaatatatgttagcacaccatactaatcctaggtcctaacaatgaataacgcagatgactaggtaatggttgcgatgccttgatagctggaaagtaatgtctggtgattttttttgtttgactactataatatacatgagaacgatctgcaataatcttgatatacatctaaatttatgcacttaaagaatgcttatgtttttattatattttgtgtagctgttcaacagttggagctattattatgactccacttcttaccaaacttcttgctggtcagcttgtacctgttgatgctgctgtaagttcaccgtaacttaattattgcttgaatttttgtattctaaatccaatatacagttgacaaggttgaattttagtctaacactagacaaaaaagttcgataatataatctcaatcccacaaccaacctagatattttatttgtcgtagttatgaggagtattaatcgtctctatccttgtttctccatactttttaattcacccaatgggagtcttactttagtcctgcatgattttcatagcaccaatctgtaattaaggaaaaaaagtagtttgtacaaactattaatatttatatggaaattagtctggacatccaaattgtaacaaaaattccacatcagtggagaagtatggggcatgaatcttaaaaatacttctatatctagtatttaatatgtgttatatgaaggttttaatgtaattactgagtaaccagtgtcatatatttcaattttagaaaatttgcttttactctgtctgtgatgtttcttcctttaagctatgcagggtctggcgatgagcaccttccaggttgttctagtaccaacaattgttggaggtaactaaaaggtgtcaatacttaagtacaaaaagcattcattatcagtgctttctgcatctaatggtttggtttttattcctgctctttccggcagtgttggcaaatgaattcttccccaaattcacttcaaaaattgtgacattgactcctttaattggagtgattctcactacccttttatgtgcaagcccagtaagtttgaaaagtattcatagatgccttaattacgtttcattgtagtgttatagaaggatttccttttcatcaaatgaactaactagaatatttaaaattcagattgggcaagttgctgaggtcctcaaaactcaaggaacacagctaatattgccagtggctcttcttcatgctgctgcatttgctcttggttactggctttccaaactatcattcggggaatccacttcacgaaccatctctatagagtgtggcatgcaggtaatgaaccatcttatattatttgctcatgatttccttctaaactgtcactgttctgcaatttgccactgttactatgtgcttgaatttgaataaattatactgtctttgtttctacatgttaaaaagttatgtccacataacttggtgtgaagaaagaattaatcattaccagttgctggttgggtgaccagatttatatattagctaataaacacaaaactactaatgtacttgtttttatattggaagaagaagcacatcagtaaatgcaatactttccatcataaagagtgaaatttcagaatcatttatgctcaccatatgacacgtacttatgaacaggataacaaagtactatggaagctaataaatattattcaattcctcatcatttattatcttatatataaacaaaaaggcattatcaatacacttgatagaatatctagatttttatattttcatcatataactagcattttcttttcccaacttcttgattttactagcagataactaaatctaaagtggctgttattatattgaccttgattttttttattattattattatcatttgcagagctctgcattaggatttttacttgctcaaaagcattttacaaaccccttagtagctgttccttctgcagttagtgttgtctgtatggcggtaagactcatttactacccttcactcagaactcttttttctttcccagctaattttgattgcaaataaccactaactgtaaaatataaccatgtcctttacagcttggtgggagtggtcttgctgtcttctggaggaacagaccgattcctgtcgacgacaaggatgattttaaggagtgaagatttctcttgatgatatgttggtttaagagattttacacttctcattcttagttttttctttatctttttttagaacatgagtgaaggacatagcttttaatgattcgaatatcaatgtgggctgttttttcttatgaaaattttcatgaatgtgttttggagtttccttttttctgctttgcttttttgggctcaattcatatttaaaaattataaagttttctattatcagcacattaaattaatcatgagaatggaaaacatgatgtatattttccatgtgctcttctgggaaaattccttgcaacagatttgaaatctcttcccatattttttgagatttgtgtgatgcttttcctctgattttttctttttctgaagtcactgaataaaaaaagtttctgtagctaaataaatggtaaaaaacaaaaacaaaaaagattaaataattacccatcatgattgaatttaaagtaataaattttcagcaggcagaaaaaggagaagctagccttagacttcagttgggtaattaataactattctaacttatttaatttcaaaatctagatagattttgtttacagaatatttgaatttatgtggcaaagaatatattttctattatttggttggtttaaagaatatatatatttatgaactgaagtaataaaatgtgtggaaaagtttaatggaatttcattctaatatttttccaagcagacaaaattgagtgggtctgtctatctatctctctattccttgggtggtgatttgaaaggaaatgtatggtgttttgtaatttgacttttagaagtcaaataaggattgcttttttgcctttgggcccaaccactcatttattaataatagcttcttcttcttcttcttcctctacttatttcttagtacacctaacactgatacagatagtgatgccagcagggatccatggtcacttgcataacaagtttcaaattaccaaagcaatgattcaacaatttcttcattattattttactttaaaactcatatgattgaatctgattggaggcccctacatataagtatcctactatccataagtgatccattttatgtgtacaaacaatacaataataatacatctttcgcttctaat

SEQ ID NO: 266804 - DNA, 2431 bp, Cannabis indica
taaatcttagagttatcaacgatattctctaattttttttttaagttatataggatatgctatttaattaatactaataacagtatgacactaaagagggtgtttggtaccaataatactccttagcaattctatataaatatatgcttggtagagtgtagcttaattagctgtgaattggttggaactttttaaataaaaaagacattggaatgtggaaatgtcaatttaggtttattatttttatgagacagataagatgggttcacaattggtactatgtctatttatatgtatgtaatgtattcactttcttccttgtaatttccttttctcattttttggacataataatcaatggaagcttgagattattatagttggtgacttaattattaagtggctaccataaattatatattcatgaatctatcggcggtgtcctattaccattactccaccctaatttcaagacgtgttcttaattgatattcatttactattatgctattaagttttgaataatcctacaggtcgtccagtattgggcaaaaaaaatttattaatttttttttttatgtatagtggtaaatacttaaaaatataattatgtaatttttttaataaaatgtttaataaaatgttgattgtagtatcttaaaaaaataaatataaattaagtatttttttttaaaaaaataattatattttttaataaataatagtaaaaacacaaactataatatttttaaaaataaatttggaatttttttattaaagaattttttaggcttgtgtaaggagccttaacgagccttggggtgggttcctacgtcttcttgttgttgcatattttatgagtgttaaagaatataaacatttctgtcttctgccccatttttgagttggtcctcaatcctacaatacatattcttaaggagatgtttcggtagacttttatctgttttggtatttaggaaaatttttcaatttctttttctcacgttgtaattatttaagatggtaaattttaaaaaaaattttaaataccaaatgattttcctcaattactttatatataaatattttagaaaaattaactacaaaattatttcaaatactaaaatgaataaaaatgtattagtacatctatttcgtttggttgtatatttcatcaaaacaccaaaccaaagataataactagccaatattaatgattaggcaaacaagataaacccaaattcaatcatgaaataaaatcactataattagatcagagctttataatataggatggtaataaattgggtgttacaacttacagtataatgcaatttatttattagataaaaaaaaaatcattagtaaaaaaaaaaaactacatggtagagccttgtgaaatttcttgtagtctgattcatttgcactcaggaggtaagactttgaatcttgatgtgtctttacaataagaataaagcatgagctttcttcttgcccaatccatggctgtaacttgttgtttcgaaagagtggcaaactcatgtccctcaactgggtccaaactcgaagggttgttcttcttagaacacaatgaaacactatcattttgtttcgaataaacacacccattcatctccatttctgtaaaagaagctgtaaacggtgcgtttttgtagttaactgggtattttccaccatgagttgcccactgtgaaccatcccatatggttgcatatactgacatgggttttaatgggaaaacagcattgtttcgaggaaattctctaactggtacattgtcaacgaaaaacctgaaaattttcaaatgggtatgtcttaaaaggtgatatttttagtgggaaagttttgatttttgatttttaatggtattttttcttacactatgtgatgactattccagaggatgctgtaatggtggtgctgtgtagttgggtcaaaccagaggtagaatttctcttctctacctgtgttaacacttccatttgcatatacatttgtttgaaaaatccaatcttttctcctgtcatgaccaagtaattctatgtctatttcatcatgattgtgtgggaaatcatctgcattagacaactgcaatttacccaatttttctagttagaatatttagtgtttgttttgcatgtgttacatatgtcaaaataaagtctttattgaaaaaataaagaagggaaaaatacaagtgatcatagcttacataaaaagccactacaacaccagaagaaagaccaggtggtagtttaattgcagcactaaagaatccatattggtatttgtttttagaggctaatccagaacctgtaccaaaaccagaaccaagtataagaaaattagaaagaaattcagataaagaaaaagaataatgttagcttaatttaaaggattttacctgagg

SEQ ID NO: 266805 - DNA, 2470 bp, Cannabis indica
caacctcaacctgttgttgtagagaggcttaacgacgccgttcagcaacagctcaacctcgagtctgtcaagactcgagcttccagtctcttcaaatccattactcgcattctcgaagactttgacctatatgctcgcaccaacacctctccaaaatggtctctctatctctcacgattcgcttttgttttttcaatttctgaatttcgacaaattcaattttggaataatttgtttaattttcctctgagattaggcaagatattatggggcagtattcgatggtgaatcttgagttattcaacattgttgatgaaattaagaaggtttccaaggcttttgtggtacatcccaagaatgtcaatgccgaaaatgctacaagtatgaacctttttcccagcttttattaatgaaagtattctttttagatcatattcttaagtgttaaactttctacttttggattttgtagttcttttcttctattttctcacaaagatttgccaattccgaaattacagttgaaaaaagttaatgtttttagctttctgtatagcttgaatgtagacttgtatattaagttccaagtgttgttatcatttagttaagctatcaaagttttgaattgatagactagatcatatgtgattacagtactgccggttatgctttcctccaaactgttgccggagatggaaacggaggataatgcaaagagagatcaattgcttcatgggatgcagaatttatctgtaacccaacaaattgagaagttaaaggtgatctgaaggaatttattgagtattcacttgttcgttttccatccatgtttctggtcaagatagacatctttggcttttacaggcaagaattgatatgattggagcagcttgtgaaagtgctgagaaagtattagctgacactcgtaaggcctattgttttggaactcggcaagggccgtctatcgttccgactcttgataaggcccaagcagcaaaaattcaagagcaagaaaatttacttcgagctgctgtaaattatggtgaaggtactcctcctccctctctaactgtttcggctttcaacatcaattttttgtcagtatattagtttatttacatattaaattgggtttggctaggcttaaagttcttatgagtaatgagggtagtttgtgtttgatgactgatgttttaaagctgtggattcttgcctaactccatcaactttttgtatgatatgtcttgatggtttaaacagttcagaatggtcttagttttgtttttgttgtcttccatcttcacattaacattagctgtgatttttcaatatttacatgtattgtaatttaagataatgtcatccttacaatttatgttgcttacaagtttattgttgatttcaggtctacggttgcctggtgaccaaaggcaggtgacacctacacttccagtgcatcttgtggatgttctcagttcaggtgatggaatgcaaactttctctgattcatctggtaataatcagtcactgtttcaaacaggaatattgattatgcttgctcattagatttcttcaattaattttaagcttgaacactatttcttgcaggtatgtaccataagaatacccctccctcagcaaataacttggctgctcaaagccctttgttacaggttggatcataggcttcctcatgaaatgggttactcttctatgagaactctttgtattttttttttttttttttcctttttaaattaaaatctcttttgtccacgtccacccattgccagtctgttccttcactaaatgctcctgttaaattgtgcttcaaatgcttgtttggatccatctttcatgaagattatattttaatgctcttcatgtagtgttatttttaaatcttgtactaaactatgtcaaacaggcatctgggtcacaacttcttggaagatcagctccatctcccggggctattagtgctacaaatttcgataacacaacaacatctcctcttccatatgctaattccccaaggtctaatacaaacatgatgaataccccatctcctcaacaacaaagtcaacagcagctacaacagcagcaacaacaacaacagagacagaaaataatgcaattaccgcagcagcagcaactaacaacttcttgcttcaacaacaattttaggcaacaatctacaatgcatggattgggacaggtaagataatctctacaaattgtttttttttactttgtaaacattaacttttgggatgaaacttcttaacctagcagttgaagaatataattcagtgattacaacctgtttagctagactaggggctcttgatattcatttacaagttttgtatcttcttccttgcatatttgagatagattttgttttcataaccaactatgatcatatacttatgacttatacaacttgcagaaccaactaccccaactg

SEQ ID NO: 266806 - DNA, 1373 bp, Cannabis indica
agcaccacttcattccatgacaagttgttaattccaaattgctaactctagataacttgcatcggattctatctcacatggacaacaccctttgtcctattgaggaggatgaggaaagccacaatcaccttttctttgagtgtgtttattctaaataggttactaattatattttcacttggattggcaagagctagccaagacattttgttacttggcaaagttgaattgaggggctgaagagaggtcttagttgggagatcattattgctactttggcagtcatgtttatcacattttggacaataggaatacatgttactttaaaattttacatacagtgttactcatccagtcaatgtgttaggtctatttttttttttatgtatttttagagtttattttaatgtatttttttttaatattttatggcttcattgtttagatttatacttggtatttgttttagtgtattttttaggagaaatatttggagatgttttcgcttattttggtgttcaagcctttttgagtcaaaaattggtaattataaggaaaaaggaaactccaataatgtttagttggatttcttgttgccaaattggtcaaaatgtgcattttcagctcaaaaattcgtggtctatagtcaagagtcaagagtgtgaactttctaaaaatagagtaaaaaatgaagaaaacgggaaactgcctttgaatgtcgcagctcagcaaggaatgttgcgacattgtctgctcgttggaagaagaaaagaaagaggaaattgagaaactcgtttagaaagccgcgactttctaagcattgccgcaactttggtggtttttgagaaactttatttttttcattatttaaagagggttgatggctagttttgacatcatttgaacttggagaatttggagcataggaggaagactaggagcaaaagatacaattggaggacttcaaacaatgctctatatctttttttatctctatcttttatttttttaattgaatttctattgttttagaatgacttttagtagctaattttcttaaaggattattatgtgaactacttgagtttattttatggattaatgtaattcttcaatttcatcttcttctcttaattcaattctatgcaatctgtgttattttgcaattattgactgaccatctataattgttatcttgaatttgaatcaaacttctgaaaagtgagatttgaatatgctctgattgtatggatgcaaattgattaaggacgaaagtatctaaattatttgtatgattttatgagttgctttgtttaatactttctttgtgattaaacttttttcatagaaactaggtggatgttacgtgtcga

SEQ ID NO: 266807 - DNA, 3557 bp, Cannabis indica
atttttacaaaatacagggttcaaaattatatttatccttatttttattattatatattgaatgtgtacacttacatatccgatgagggtgatgccgctcttttcgtaataaaagcctctgcttttctttccactaataatctccaatattaatgtgccgaagctaaatacgtcagatttgattgaaaataatccaccaaaagcgtattcaggggccatataaccgctacatttgcagaatattttatttacacaagaaactatattgaaataattgatatacatatggttttaaagtaaagacttactaagttcctactactttgtttgtatttccttctatttggtctcctccaaaactcttggccaggccaaaatctgaaatttttggattcatctcttcatcaagtaatacattactagctttgagatctcgatgtataattctcaatctagaatcatgatggagatacgaaagtcccttagcaattccacatataatttgaaagcgcttaggccattctaacagtttgcctcgactttcatctgaaaattttgatttgtaattaggaaataaaataatatgttggtgaagatatactacatagaaacaaagtcaaaaaaaagtaaactctaaccaaattgaaatagtcaaggcttttgttgctcatatactcataaattaacattttctcttcttcatgaacacaacaaccaaaaattttgactagatttcgatgttgaagcttggcaattagtttaacttcatttctgaactcgtctactccttgtccagaccacattgctaatctcttcactgcaatttcttgaccttcctccaacgtaccctaaaattatatgacatttaataatatttattgttattttaaatttgtctctcaacaccaaaattaaaactgtttttgcaagttgggttcatggaaggcttactttgtatacaggtccaaaaccaccttctccaagcttattgttctctgaaaaattattagtggccatactaatttcatgtaggtcaaacaatgggagctccaactcttcttccttccctttatttccattattaataacgtttctatctgtttttgttttccaatatatgaaaacaatgacattttagtgacaatcacaatacttagaataaaacttaaatgttatccaagctaaaaacatcatagtaacatagatgaaaaatgaagagtagagaatattaccataaaattttctccacttgcaaatgtaaaacccaattaaaatcatcccacaagctaatccaattacaatagctgtaattatcactgctctctccacaaccttaggatcatcaactcttgctttctcaccaaagaaaaccaaatattaatgaattgtgataaaagaaaaaccatttgaactaaaaaatttcaaaaacaagtaatttgtacctatttctgaagccgaaattcgaacaaacaaatcttgcccacctgaaggaaattgtctaatatcataaaggtttccaaaccagatgacacaaccactaccttctcctctaatatctgagtttgtataagccatacaagaacaatttctaaggcatttatccttacactcccttagattcatacccttattcacccatgtatattgagtatcaggcaatttcaaaccagaaaatttcaaaaatccatctttccctttaccatggcaactcaatggtttacttcttacacaccctttagaccaatccattgaattccaatcctgtagagacttgggcttaaaaccttttaagcattgacatattggattctctgttattatacactctgcatttgccccacattgtccatacttgtcacactgatctctaggccctgaatagtaaggcttccaaaatttctctgtttcaatccatatcaaacgttgacgagaatttgttgtttggtttatgacaactttggtgatcacagacttatttttaaggctataagtgtagtaaatttcatcatcagtgtaaacaaactggtaatcgtaaagagtgtttggtctcagctcaggacacccactgtaacgtaggccattccatggaccagttcgataaaattttgtatacccttttcgaagaattggttcagggtatgtatggtgttgatcattgtactcaatcccataagtgaaatctccattacaaggatcatttaaactcttccatgatgacaactcccaagtgattcctctcttcaaatccagtcccattttcattccaggcaaaaaagtatcaccagggtagtcaaagctttgccacaaatagttgtctttgttctcatctttctcatctcttacaaccaagttaccattttccaagagttgaagcaatggttcttgggcttgttttgacaagtttgtagaccaaataacactcttgttattgtgtaccaaaagctcaagatttcctgtgatgtttagtgtaaacaatccagaggaatcgttgatcggtttacaccggtttgcgacccaaactactgtggaatctggtatgtttcgataccagattcccagataacgattgtttgaattgcctggggtgaagaaaccaagttcaaaggttccttcacttgaaatcaaagttgtgccatctctcataaattgaaaaggtttaagggtatcaactacttcacctaaggttggtctaaaaacaagaaagataaatagaaaagaaatgaagcccatgattatatctagaatctatagttcatgtcatgagagacacaaagttaaactctcaagtctctctttgcttctctctttctattcttcacttagtttttagtaaagaggttttgttttccattgagtggtttgtgtgctataactttggagagaaaattgagtagttttgacttgtgtgtagcgtaagtatttgggagttgagttgagttctcactttgtggatgagtaataaaaagtagtagactttgggggagtttgaaaatattcatagatgaaaatgatgtttgtttcttcaagaaaagtcttttcttcacaattttgttgacttacaaaatgaataaaaaattttaaaggttatagaattttaccagttaaaaattcccaatatctattcacattgttgaaatatagagattttgccaagttttattgtcccatgtgtgtgtttaggcttgtgtgtgtcatcatcacgtatgtgtcaaatatatagtttaaaataaaaaattaatttaaaatttaacaaatctattttcttatcaattattgttatattaaaaaaaaatttaaaattagcaacatgtggtagtgttatgacaataacacatattgtgttaggtacatagtataaaatgtagaaaagtcagcattgtaaatagttcagatagaattttttataaaaaaaaaatacctactcttccatctcaaaaacaccctattcaatctaactcacatctctctctttctctctcattgtaaaaggccaaagggacccagcctagacctctagagaaaactatttttattaaggataaattcatcagtaacac

SEQ ID NO: 266808 - DNA, 4832 bp, Cannabis indica
ggggtatgttgagaatcatacaatttcttggctctaataatatgttaaaaaacccaattaacaatgaatagagtagctcatgttcttatatataactcaatattctactatttgtaacatataatatgtattttatactaataatttactacaacaaatattaacttttcatggaatacatatagataaaaaaaatgaaaaaaaaaaaaaaaaaaaagggatcgtctatatctttggaggtaggtaggtgtaaaagaaaaaagaagagaagagaagaaatgtcatagaaattaagaggtttgaaagttgaaattaataaactacgctaccactttcgtgtgaaattcatgggaattacaaccaaactgtagtgaaggccaagtttttcagcataaagataactacgggtgaaaaaaaaaaagacgtttcaatttcagagttaattttctacaaaattataagtaaaattctttattgtcaagtcaatcaaatcctaaagctaaaaaacttgtatgtgaaaacaaagtaaataattttctgcaactttgcaaaaaaacttctcatagatgtccttgattcaatcattcaaacaaaatgatgaccaaaattatatatatatatttatataaaaataaatagtgttcaaaacttcagatttgaattgattatcaaaacacctgaaaatatatgaccttgagagttaatttttggactaattaatgttttataatgcatagtagttctctgtacttaaaatataccatttcaatcaacagactgaagaacaaagtagtataatgataacatagaaaatatacatatgtcacatcaattctttttttaataattaaaaaaaataaagaagaagaaaagtccattgaactgtgttataatgaatttggctaaggtagtattgtctcaaacagaatcctgagagtttgtgtaaatggaattaggagagctgaaggatattctctttccattattggtaaacatatgcataaaatattaatatacagatagagactgagatataaataatatatattggatagatatctaagccaaccagcttttgtcttagttaatgtttattattaaatttacattgtcatggatttcaagctgatggcttttatttatttattttgaaagcaataatttatttatttattatttttaataccaatgaatcttgaagaagccaacttgggagatttttaaatccctctttcttaccttgtctgacaaagaaagactagtgattttatttggattcatttggcattattttaccaaggaatcttccaatcacatgagacgagaagataatggcttataattgtttttataatcttgtctaactcggaattaaataacttgcttgtgttttataaagtattatgtatctataaatatatatatatatttatattaatcagaagttggtgatatactctttgatcttatatgtttcattttgctacttaatattattattagagttttgataagttggtagcatatatcaaagctcgatatcaacattatctttccctaagaaaataaatatatatcaacattatcacaatattgtgacttggataactccaagattaatttcataatactttaatataaggatgagtttgatcaaatccaacttggttcaaaattagccctcatagaaatatgagttttgtgatcctgagaataataatacctcatattcataatcataatcataatcatagcttttgaggcaactagaaatcagaatatttctctttttcaataaagcatggaaatttaaaattgttggtaatagaaactttaatcatgcatctcctaaatcattgaattgttaactatgtaaaaataatagtggagtgaaattgattaaaaatcattgcttattataacaaggtatcaactttatgagaagcaaaccaaagccaccagtgtaagttgatggagtgaaaagcattgctaatttttaacaggtctattgatttatatatacattaatgggtaattaaatagaaaaattaatcataaaaattcaaaattttctaatattacccatttatggatagtacccattaagaatacactcttataaatatatatttaaaatattaaatgttaacattcttatgagaccattattgacttagtccactcttcttctgctttggctaaaatttccacactgttcaattccatgtatttggctctctcatatggctttcttcaacttaacaagtttgagtaaaaaaaaattattagtagtgtttagtaccctcctatgtgttaatatcactattattggtgcaattaagtatcggtacctataaaatttaatgtaataacttttaaagagtattactaaccaattgcaaggtgatacgtctagaaagtattaagcaccactgatgttcaatagcaatactcaacttctctattttggtctatttgttcgtctcaaaaacgagcaacagctcgagctacaaatctctgtaattgtttgcattagtttagaacaacattttaatgagattgttcaacagttttagtattcaaaaatcagaacatagaaatatcatgcgtgcgttaaagtaaatttagatttgattggatgaaatttacatatattataagagaagatttctaattttgattagtctccttctcacatatccctttaccaatctgggaaaaaaaaactactaactgctctgataattaataattggacagcattaaaatggagcacttcctttttttttttttttgaaaagaatggagcacttcctttcaaagttacaattttttattaatgaaaaatgaacgggtaaggttgttgcatgggtcatactcaaataaaggattacaactgctagtttaaaattaattaagcaactggctttctaatctcatttgatgaggatggtattatttctatatcactatccagccacttgaaattaattaaaaagattacatcacggaccataatccactctattactacaatatgaagaatgtccaaatgtatcagcactgaccatataaatatacataaatattaaaaaataattatattactaatctcgccataacccacatataaggaaatattactatcattttattcaaatgagtgattgaaatagtaggccaagaacacttgtacttgaagtttgtttaaataattattgaatataataataataccatattcctcaaattagtgtcttgtaccatatgatttaagatttaagaaggattgttatgcaaatgacaagggaaaaaaatgtgaatataatttttaatcaaacaacttgacaagcctattcaaaattaagtcaccatatttacagcaaatttcaagtcttggcctttcatagtgttttgataaaagtttggagcacaatgttttgaagaccaggacaatccaaacgttgctatttcttctttattgcataaaggtatctttctcaaagatactttgtaaataaataaattattaagtattttgtcaagatggtgtttacttattaaaaaatgcaaaattaaagtgttgttagaaattaaaaatgagtggtcaagtaacttgctcccagatctgaccagccctaagtagcacctaagctaaattaaatatgttccaaatagaaagtctcatacctaacatattctcaaccaggccagtaggaatggtgtatctttttctttggagaaaaagttgttgtactacaaaatcttggatcaactaaattggattgaaaatccccaaaatatttgtaggcatttcattgatcagagtcaacatatattttcgtgactaatttatcctaagcaatggtgattaaagcaatcagtgaccaattggcatcaaggctttatagaaattgatttaaaagaaatgatgtgaagtaaaagtcttaagtcagctgcagattttgcatggatttgcttatacaaaaaaacaaatatcaacatccaatgttcaatgttcaatatctttatattattcaagtaagtttatagaatgagaaaattgcattatgtaatgtccttgaaaatgcatgagaaaccaaaccccgcaaagaaagctatctaaagaattcaattacttctaccaataagcttgtgttctatttatatggtcatattacaattagcacttactcaactgagttttgtcatcattcaacgaaatttctaagctaattaccactaaacaacacaacctcaactggtcattctttctacatataccttatgatttactccatgccaagtatacacataaatatatatgttatagatatagcttccatcagcatattcttactgtgcttacagcctttatcaatacaaatactcttttaatttaataaagtgagtgccaaagaatctaccttcaaaatttctcaactcaaaagctgcatgttggggtcttcgtttgttcgatatcagtccaggtccttcaccagcttacgtgatgtcaaaagttgggcttaatcttctgaaaaaagaaatcaaaatcactcagttactgcaacaatgaacaactaaaactctttctctagaaacctaaatttgatttgtcatatattacaaagatatccaataaaaatgaatgcacatataatactttactaggaattgagatccaacagtaaatggggtgttataaatataatccatacacaaacataaataaataaaagcacaaatgtatcgagaacaacaatcagttgcgacatactttctatgttcagccaaacaaatgatgtgtaatctaattactgtcagtttgggac

SEQ ID NO: 266809 - DNA, 2007 bp, Cannabis indica
tttaaaatataaaaacaaaaaaatctctaattatttttagaatggctcgtctaactaaattatatgtgtgaaatattacttaattataaatttaatgattttggtattttgattaagtaattaaatgaatagttgatgtaaattattttagggaagtgtcacttgagtatctaaaaacatcaataaacatggtgaaaaaaatccttgaagttctcattactaagcttggagtgcccatagaggagtcctcagagattattgaagctatgattggtctcaaaatggtgaacatgaattactatccggcatgccctaatccggagctaaccgttggcgtcggtcgccactcggacatgggagccctaacagtgttgctacaagatggaattggtggactatatgtgaaaattgaaggagaggaagggccatggatggagatccctcctatttctggtgctttggtcattaatgttggtgatacattacaggtaccttgtaactatatcaacctttccaaatttagcaaaataattaattggatttactttgagaaattattatcaaaattatattttgtattacagtataaattatagatatagtagtagattttttaaaaataatttgtttttttttatactgagaagaacttttttttgtgaagaaaaatgtgaaattattaaattatatttatagccactaaaaataatttattttgcactcatataaaatattgtttcacttcaaaataatatgttttatgtttggcacatgggtaggttatataaataggtgtgtagtgtagttatttataacctctcacaaatttttaagatacaattaactatttatagtgtcttatatgcaacaaattatattttgaagtatagtaataactattttacaaatttttatgggtttttatataatttgtataaaaatatggttgtttttttctttaaaaaaatttattatatggaaagaataattaatgaaaaaattaaaaaattattttcccataaaaatgaaaattcccaaactattttgatgaatctaacctattgattaattaatcaaattttagccattggtactaacattttagctatataataagaagtgtaatgaaaacaaaaacacttcaactattcattatatttcacattcaaaaatcttctaaattatagtattgtcaaatattatagtatttttgtaaacatgaatattgttggttgtatttttgtgtgtttatatatatagataatgagcaatggaaggtacaagagtgcagaacacagggtgagaacgacaagcaaagaatcaagagtgtcagtcccaatattcaccatcccaaagccaaaccagaagattggacccctggctcaggcggtggacagagatgggtcccctcgctatagagaggttctctttcaacattatatggctaacttttttgggaatgcacatgatggaaagaactcacttcagtttgcccatattcattaacaacatatacattaatttgtatgggctcagtatttgagaagagggggttttcttcttcttttttatttatgtgttgttttcgatgagtactatacaaatggttaattctatagtatattcttgaaggagttgtttggtatgttgtataagagttgtgttgtattaaataataaataatattatgtttggataaaataatgtattgtattaattattacgattgaaatttttaatacaatatatgttgtattatttaatagataataaatagtttgtattagcttgtattataatattcataaagaattcgggattaactacaatctctgacccggacctgaatccgaactctggacctggacttgaaccccagacctaaactcgaattcagacttgggagctagattgggacccgaacctaggagctggattggaatttggacccggggctcaaattcgaacttgaacccgaacccgagacacgggatccaaatcgagacc

SEQ ID NO: 266810 - DNA, 8198 bp, Cannabis indica
gcaggggtagacttaggagtcatgcgcccaagaagatgttgaagtgtaggagattgagatgggtgtggggtagattgagacggtacaatagtggcactcgttttgactgttgtatagttattgttgttgttgttgtggctgttgttgttgttgttgtggttgttactgtggttgttgttcttgtagttgttgttgtggttgttgttactgttgttgtaatggtggattggttaacggtatgttggatgcccccaggtccagggtggaagacttgaccctctttgtgtaggaactcggagaagtccttcatccctttagggggaaagacaagcctgtctaggctgtcatcagaaccccccacatttggtgtggtattaaggattattccttccgaaggggggatgtcctgtaaggtctgctctcttagagtgataagatcttcagaggcctcttaggaggtgacataatccttttctccactagcggaagcagaagggcctggaattgcgggtccaatcttagtaagaggagcgatctcccaaacatgcgatgatgaggaagttaagggaggacgagtttgtgggtcttggaagcccttgtgtttattttccccttgcctctttcttgggagttcctagccttgtccatagcagctgagatatggttgctctaagacttcaacatcacagactctggcgtatctacacatgaagcaacaatataagtaagtaaaatagacaattacaggtcatacaaatataagaaaaatatcaataataggaagagaaatctagtaaagaaacttgtgcgtgggtgcaaccattcagtaaaatgctatagggtttcccatgagcaaaggccaaaattcccctatgaccaatgaagttgccatactccttaaattgagcagagacatagccataaaagggtccactttaatagtgtccgaaggagttcctggatttctagggctcctaataatgtggtctactctatctaagtaatccttcatgggttatctatggcgatttatgcctaacaaatatttgtcaaatcctccctgatccctccagggcatgcaactcagactgggggtacggaggatgcaaaagtgcctattacctcttcccaaagtactggcacccagagtccccacattgagataggcagcggtaaatctctttgagatctcttcttcctaggatagaggatcaggatggcgtaacacccaataaaagtaagggttttatcatttttggccgcattggtgattataactgccaagttagtgaattgcctccttcacttccttggttagtcagattatagaaattagtgaaatttaaaaagtagacaaaactcaaggtaaatcattagaatacctagaagatgaaagcttaaccgaagagacgacaccctgctagtaggaaatcaagaggaaaagaaccagtattctcagaggtcaggagtgcgctctgtgtggcaaacagggcagtaagaatctggaaacttatctagtcggaagaaccccaaccttttcctatctatcctcatgggattagcctttacactatagaagtaaaggatctccttcggggaagggacctctagcttgttaatctacaaaacacgtaccacccatccaaaagcctacatgatgaagggatcagctggaaagggcaatcccaatttttgcaatcagattcgcaaaataagttctcatagggaggtgagcgtcactggaaatgtgggaccaactccatgcactgaatccctcaatactaatggaagcagattctcccattatagaaagtttgtgccacattagtccagggacattgtaaagaccaacaactttagaataagcttgtaacatccctaagatcgaaagcagttggctttctgatccattttctagatgaactcattacgggcctttgctggcagaggagttttgaccccttttttctcttttccacagagaggtctttctcaacagtgggttcattttttttggaatagtttccaaggcccccccaggttgaaatgttaccgcatgagcctcagtttgatcctgtcccaccaaaatcctttcgacaggtggaataagcacaccctcgataggtgtagccgtgtttgcgagaaggtcttgattcaagttcattgctaccaacacaaaaaatgaaggaaaaagaaaaccttttgaaacgaccgatggatggaaggaaaacaactaccagactaaggctctgggtaatctagtatctcgggacacaaatgtaaggacaaagtttctttcgtacacactaccctgctatttgacacatgaacagtcctagccctaacctaaacaaaaaccttttgctctagacacgaaataccaaaagttcagacatggggttaatacacttacttgtcgaatcaggaggtatgagtgtcgtgtcaagaaagcttgcttgaaagctccaaagctagtcaatgtagcagtcgtagtaaacctgaaaatcaaacacttcccttaatgaagaactttactgatccagtcaaaggggtgcgatgtctggaaaaagttctgtgtggatgacgagtaatcgctgaatcaaaccctctaacgcttcttgcatccagaggttggttggaaaagaaaaaaggttgtagagaaaaatatggagctttaaatgaagaaggtaaaaagaacaccaccagaggcaatttatatttcaaaaagaaaataggcctatgaaagatcaacggtttagattcttgcaataaatccaacggctagggagatgagaagtcacgtacgatcgacctagggcccatgaaaacgtcaaggtgattctctacacgtcattcagtcgccagttgcattccactttttttgttaaacacgccttgccacgcgcggaaagggacaagcaagacttttagaaatgtcgcgtgattactacgcaagagaaagtgaatgtcgtatgtaccctcggtagaatatagttcatgtgggggtgtgtccgcaacttaaatcattagcgcgtgttaatggtcagcaccgagaaagatagcaagctcatttgattcaaagaatctcaaaagcttgggggtaaatgttatccaagttttcgcgaatgagacacatggcgcaatcggattgaagaatacaacagcgactagaattagtcaaagttaccaagaaaatgaaagtcccccggacctgggaggtaatgggagcatatgacctctgggagtaacttcctttagtaaaggacccggagcgcgatagaggtctcgtagacgttggccacatcagcgtcatgcaaaggtcgctccatagataattacacctttttctgacacatggtcagattttgtcctccatgccaggccatggtagtgcgcgcacgcacctttaaatatactttttgcccaacagcctggttaaagagaatttcgtaaaggagagacctttgcgcgacacgtgtcttagttcatacaaaaatcctcacagcactgtacgccacacgatgaagaaggttcttactaactaatggtcaaatcgtcttttagcagtactagccttagtagcgtgtgaagtacgaaatcctaggtaggtaaagggtatgccctttaccccctgtgagcctataaatacttccattcttcttcaagcaaggagagaacattttttcatctatagacactctgctaaaatttctagaaaactttctctcaagaggaacagagaaactcttattgaaaatacttgtattacataaaatatctacccaaagaggccaatataatggactcgtgaactaaggattatcaacgtttgaactatgtaaaaaatctgtttgtttatttcttattttcttgagctctaattatattcggttttcgtaaaattcgatcaataaatactataaaaaagtttaaatttgaaaaaatgcgataaaaaacgacaaacttataagtgctatatttttataattttcttttaaaatctcatatattatggaatattcacaaaaagtaaaatgcaacagaaagccaatttaggaggtttttatggtcaaatatgagaattgagggttaattgtttgtgagatgacatttgagttttggttttcgatcaaggcaaatacgtcgtcgttacatcttgttggaaagagagaaaaaaagagttgaagataatattggtctgtatctccctcgctacttctggcctgtttccccaaaaccctcaacgcactaaacacataacaacatagtgtgcctttctctctctaaaagctcaacactcttctctctctctcatagactgtaagtaaaacaaacctttgtactgatcttccccctttgcctgagtattcaatatgtgtagtatttgtctaagtatgactgactctattcaattttcgctcagcgctagaagaagacaacaatcccaacttctccaatgtccgatccctccgacgacgcttcccacatcgagaagctctacgaatttggcgagcgtctcaacgaatccaaggacaagtcccaggtccgcattaatataagttatatatcttgtggttccattgttttgtgtaatctggtttcaattaggcctgagcgtatttgctcttgtttgggtttttctagaatgtcaaggactaccaggggattattgatgcggccaagacgagtatcaaggctaagcaattggctgcccagctcattcctaggtttttcaagtttttcccggacctgtccggtcccgccatcgatactcaccttgatctgatcgaggaggaggaacttggggtcagtatatcattttctattaagggtcgggaaaaaaaatactagaaactaaaaattcccccttttaaatgttggggcagtatagagagttgtttgaatccctattacttgagacgatttgtgtgatatcaaatatttagaatcagagagcattgaatttgttggaacgatgcattctctgctgtttcatatgggccttgcttgttatttcaaaggtggtatttcgttattataggttcgggtacaagcgattcggggactaccccttttctgcaaggatacgcctgaacatattgccaagatagtggacattcttgtgcaacttcttgcagctggtaaattctagtgttttgaattgtgttattatctatgagaatattgtgctaattttgtataattctgagcttgtctgtcttgaatgctgtagaagaatttgtggagcgtgatgctgtccataaagctcttatggcccttttgaggcaggatgtgaaaggtaattttgtgttgtgcttatgttatggaaataatctgttcttgtatattgcaaccatgttgacatcttgattttttgagatgaaaagcaatgcttgcataaaaattccataaaagatttggattttctcatgcccgatgttgatgttgtacaagttttttgtcttcagtttctattttaagtggttggatgttgttggatattgacttcttagaaataagtgacttttttaattttatggttggatgttatcgcataagccgcagtcaacaatgatttacattcctttatagttctttcttgggttagtacaccactgattgattttcataatcttcccggtagcactaattaggacttttctacaaaattctagtattttactatccattggattgaatgcatattatttagaatgccttcttttcattgtgttttcattttgtttgtgtagcttctttgacagccttatttaagcatattggtagtgttgatgaaccaagcacggatgaatttattcgggagaaggtgttaagctttataagagataaggtatcttgtcagaaccacttcctgtgatttttattgcccttagtgtggtggatcacgatctactaattaattggaggattgagactaagtaattgtacttgcaggtatttcctattaaaggagaactgttgaagccacaggaagaaatggagaggcatattactgacttaataaaaaaggcacgttctcagatctgtacactaatttattttatatgcatcgaatttgtgaaatcttttatacttttgaaacctggtattactattaaagttgcaggactgatctgagtttaattgcagagtttagaagatgtaacaggagcagaatttagaatgttcatggacttcttaaaaagtttgagcatatttggagagaaagctcctccagaacgcatgaaagaattaattggaattattgaaggccaagctgatttagatgcacagttcaatgtgagttcatttttcactggtttgagctaagtatccggcttatttaatgacacaagtatacatcccatctgtaatatgtatctgaaaacttaggatttattttgatggctgcacgtaacattgttagaatcgttacacattgaatattctcggggtaggatttacaggacatgcatttcgtaggactttcaattgtaatcacaacagagcctggtttctagtatggtttgtctagttttagttgtgggtgaaattgaagctggtcaaatttggattgtatcattctcagctgatcataactagttctaatagcggtagtagtttcaatatgtattgcatggatcattccatttcatctggaaagcagtctgctagggacgcctaaaattggttcccatacactcaatagtgtgtcatcattaacaactgtaatttttgttggcccattgtatgaagcaccatattcaaacatagaaccattattatttagctcagtcatggatctaaatataatctgtgactgttacatgctgtggctgcttttgtgaagtccgtcggtgtaaatattggatttaaacattttgatgatttatggctcaactttttgcctatgaacaaaatatccacactgaactaaggaaatggtaacaaaatatccacactggtctaatgaaagggtacttttggcaaaaggttgcataggacaatgtgctaaaaaatctgaggcgtaaattgtgtggtaattaaagtgtaactggtgaaagccttgtcgaaacattacaaaattttacaataaaaatggggcttcaaaaagtataatatgtttacaactgtgttacattctctttcttgtctgaagaaacttcttgaaagttaacataatttttctctggttaatcaagtgcatgattgtgtgttgtttttactatgtttgaaaatctgcagtgctcactactcatctttgtagaggttcatagcactattatttttttggtgttgtggttaccttttcttttacaactttttgagaatttgaaatgcaggtttcagatgctgaccatatagacagactgatttcttgcctttacatggctcttccatttgtcgtggtatggactggaaataatcttaccctattttctctctgtgtttgtgtgtgtttcccttttataaaatttaccccatgtactttgtacttgacacagagaggtgcatcaagtagcaagttcctcaactatctcaataagcacataatacccgtctttgagaaggtaatcattttttttaatgttattgaatactttttagtgtgtatttattgtggtatttgctacactaaaatccattttagaattgtcacaaaattgagtcatttggttggaaccttatatcatgcttgtgaacttttgataactactttcatcagttaggaagttgtgtagctctttcccgtttaagtggaaggcttttctgtaatctcagtaaaaggttctacagtagaagagctggaaaaatcctcaatgctctatgaagagcccccttaaaagactatctactatctagttgctcagtttaccatgtaccagtaaagttagtcaatgtatataagttattaactatatatctcatgccagctacctgaggaacgcaagttggatttgctcaaagcactagcagaaatttcaccttacacaactcctcaagattcacgccagatccttccttctattgttcaactgctgaaggtattttatatattgtttcaatgacataatgcaaaacctgttgccatttatgtagctctgagacaactaccttgcctgttaaagttgtttgaatgtgaaaggtcaacttaaatatttagtttgttgagtgattttcatttatttatttatttt

SEQ ID NO: 266811 - DNA, 4504 bp, Cannabis indica
tttgaactaatttttttaaaataataaaaatttaatgacttgaaccaatcaaaaattgccacgtggcaatttacttaagtaggtccctatagaagttccaaaattataatttaggtattttttttgtaactggaaattaaacttaagtatttatgccgtaaattactttaaaaatataattttttttttattcactatcttaaattataaccaaataagaaagattttttttttttaaaaaaaaaaaacttttttactttcatttgtataaaccaatagaacaaaaacacaatcattcatattattttcctttttatttattcttaatattatgagtttaatgataatgagaataatttttgagtgaataatagttattagcggccaaatttttttatgttttgatttatacatttaattttttatttttttagtattgctaaatcagtatgtttaaatgatataatattttataattagaaagtggttctttaataatctttattaaattaaaataagtggactgatattatatcaataacgatattacatcttataaaagtagtagacactatagttatcttttaatatttttctttttttaatggtaaaatcctttatatttatttatttttttatatttatgatttcaattaaatgttatggttatatattaactgaattactattgcgttaatttgatttcaaattgggataaattaaagataagagattttggtgctaattactcaatttataagttattttttgtatagaaagttgggccgagataatgacgtgaaaaatcgttgagcgagaaaaacacgctaaaatggattggagtcaaaatttggatttacaaaacagcttacgtcatttttcagtgtccagagatatatagatattattaataagataacgatgagtctcttgaaattgagaaattaatttaaaattagtataaaaccctcacacccttctttcaattcccccaaatttgcttgccacacccaaaaatcaatttcccaatttggtcttctctcttctctctcttcaatggatccctacaaggtacttgcatcgtttatattccccttttatttgttttgttattcatgttgatttgttttaaaaagatttgatttttgttttctatcatctattcctatttgtttttttgattatatgatgatatggttggtttaaatcgttaggtgaatagatttgtaaatcaagcataacccagaaggggaatatgttattgagggcttaagtgtttctaatcagctgttttatttttatgtttcaatcattttgacagtgttgtttgaagattatttgtactcataatcgtttctttttttaaatgattacagtaccgaccttcaagtgcttacaacgctccttattggaccaccaattctggtgctccagtttggaacaacaactcttctctgactgtcggaccaagaggtacacacttttgtttttaagagaaaataattttgtgggatttgtgaagttaattaatggtataaaaagatcatcttcattgttttggtgcttagaatgaacgttattacacctactatgtgataaaactagcttgtatttcatatgtgataaagtatgaaatttgtgttatttttgtttttaataagaaaaattgtttatgggctattaacataggtcatggccagttcaatattttgttaaagtctttagctttgagtattttgcatgtatttgtttttcaatattgtatctttttcaacaggtccaattctccttgaggactaccatctggtggagaaactagcgaactttgacagagagcgtatcccagaacgtgtggtccacgccaggggagccagtgcaaagggtttctttgagaccacccatgatatttcaaaccttagctgtgctgatttccttcgagctcctggagtgcagacacctgtaattgtccgtttctccacggttatccatgagcgcggtagccctgaaaccttgagggatcctcgaggttttgcagtgaagttttacactagggaggtgaggatttaactgctgttttttttcttctttcttttctctcatattgaatggaatatgtcttgaaagtcgaaacttgttataatgtgtgtaagggtggttcttgtgctttaaatatgaagaacttaatgttgtgtagctctcatgtactgtcatgatatagtataatccctacgtattggctatggttttatgtttctttgttcatgttatgactctattatttgacacaggtaattttgatctcgttggaaacaatttccctgtctttttcatccgagatggaatgaaattcccagacatggttcatgctctgaaacccaaccctaaatctcacatccaggagaattggagggtcctcgacttcttctctcatcatccggaaagcttgcacatgttcacctttctatttgatgatataggtattccacaagattacaggcacatggatggctctggtgttaacacctatactctgatcaacaaggctggcaaggctcactacgtgaaattccactggagacccacctgtggggtcaagtctttgttggaagatgaggctgttaaggttggaggatctaaccacagtcatgctacccaagatctgtatgattcaattgctgctggtaactaccccgagtggaaacttttcatccaaacaattgatcctgatcatgaagacagatatgactttgacccacttgatgttacaaagacctggcctgaggacattgtgccattgcagccagttgggcgcatggtgctgaataggaacatcgataatttctttgcggagaatgaacaacttgcattttgcccgggcattgttgtacctggtgtctactattcggatgataagttactccagactcgtgtcttttcctactccgacacacagaggcaccgtctcggaccaaactatcttcagctccctgttaatgcccccaagtgtgctcatcacaacaatcatcacgagggtttcatgaatattatgcacagagatgaggaggtactgattttcttcctctatgctatgtatttgtaatagctagtttaattttttttacacacttctctgacatctaatggcctttggtgtgatactttcaggtcaattacttcccttcaagatatgatcctgttggtcatgcagagaggtaccccgcccctcctgccatttgcactggaaagcgagaaagggtcagttttattttcttaataaattatacctgtgcttttttcctccttgtatttcacagtatagttatttcagcttaaattttaacatatgtactttatgggatgttaattgcctttccttttgccataatgtgtgtatttatttggtgagtgtagtgcattatcgagaaggagaacaacttcaagcaacctggagagagataccgatcctttacaccagacaggtacttatcctctattttctgcaaagtaaaatcaaaatttctcaatcttattgcaggcactaatcttgacttggctttcacaccttgattttttcaggcaagaacgattcatcaaacgatggattgatgcgttatctgacccacgtgtcacccatgagatccgcggcatttggatctcatactggtctcaggtcagtccatgtctacagcttttgtttatctaagatatgttgatttgaatagaacatggtgttgtagtgggtgataaggttctgatattgcataatttgtttgtaggcggacaagtctcttggtcagaagctagcatctcggctcaatgtgaggccaagcatctgaggatgaatgagaggccattgctctagtttttgagtttcgaaaactgcacaagaatggaagtaaacgagagcggatttgggtcatttagaatgtgggagaaccatatggataatagtttaaattgtgctatatatatatttatacacttgaaactttcatatactgtgtgtttatcagtataataataataataatgaatcaatgaccttttaatagcttcttatcttctatttttcttgtttgtgatatgttggggccttggatgctttaacatataacatgttatttgcttataacgatgtgcagaatagctgagttcaaataatcatggggagggatgaggtttgtccagctgctctctattacgggtggttttatagctacttgggttatactccttggcagtgttgattgtgtgattttctgtttcatgttcttgtgatttcattttataatgttctcatcatttttcatattttgtggttggtttttgaatttgatttttttgtatatatatatgcttttgggtgtttcagtaccctctatctgtttcggtatatggatgagtttttagttattttattttttttttttatgatcgtgtaaattttttaaaaaaaattttgtgtttacaattttaaaaataagatttatatatactatttttt

SEQ ID NO: 266812 - DNA, 4799 bp, Cannabis indica
ccaatcacatttatctaaactgagaccattgatcactgttttctaaaacagtggcacgttacattttgtaatgtttgggtacatattttaggtgtacatatcattacatatattataatgcatataaatgtaaattgaatagttaatttcttgccttggtgattgaaactgacattgaaactgaaaacaggcttgaagaaaagttttctgacattgaaactgaaaacaaaattcttcggcagcagaccttgttaaaaacacctgttaagagtacagcaggacttccaccaactccggcaactccagctactccggtaatgattagctactatgttctaagaaatagatcctcatcttctgtcaatttatctctcatgtgaattatttcacctcttatctcagattgcaaatggtcatcatgctaatgaggagagcagagcagatgtaattgatttattaatatatgttctgttatattcttatgatcttaaaaggtccacattatcctctcaattttgtgataattttgaagagttttctttgcaggaaccacaaagtactactccagttaagaagttcggtacagaagctgatagcaagttgaggagatctcttattgaacgtcaacatgtatgtggtttgagtgtctgtttattttgttttatttttcagtaacgaagtgcttgtttatgagttttaacattataaattctgacatttctatgcaggagaatgtcgatgctctaatcaactgtgttgttaaaaacattgggtacagtcagggaaagcctattgcagcttttaccatttacaaatgtcttctccactggaaatcttttgaggctgaaaggacaagtgtttttgatcgtctcattcaaatgattggttcacaaattgaggtaaaaagaaatgcgtacttgggtgaattttgtttatggtcagatcaatctagatttgaaataaaataacgagagatttttgatgttttttgtttggttaatttgttttggacgtcagaatcaagaaaacaacgatcatatggcttattggctatcatacaaatacatctgcactattgtttttactccaacgaagtatgaagggtgctgggggtggtgcaactcaacaacgaaaattgcctcctgcaacatctctctttggaaggatgaccttggtatttaaaaattcttcatttggttcacttctatccatttattttggctcacccgatttttttgtgttgctaagttatcattttacttacgatgttcttgcattacatttcagggtttccgttcatctccctcttctgcaaaccttcctgcccctgcagtagatgtaatacgccaagtagaagcaaaatatcctgctttgctattcaagcagcagctgacagcatatgttgaaaaaaatatatggaatagttcgagataacctgaaaaaggagttatcttcgttaatttcattatgtattcaggtaatccaaatttcgtataataggttactgattcttgccattttattacctttacgtaagctccaactctggtcttctggtctgatttatgcaatataacccttgaaattttgctgagtttcatttggatggcataatatttaggcgccaagagcatcaaagggagcactaagatctgggagatcctttgggaaagactctcccaccagtcactggcaaaccattattgaaagccttaacactctccttagcacattgaaagaaaactttgtaagaatcaattgtgcttaattatagcatcacttgcttttctgcacttataagtagtatttaatcattcttatgggaatctctactttcaggtgcctccaattcttgtacagaagatattcactcagacattttcatttatcaatgtgcaacttttcaataggtaacaataatacatacgtgaattgtataaacactaaaatggagagtttaatgaaaaaaaaaaaataacctttattcttttcagtcttcttctacgtcgtgagtgttgtacattcagcaacggggagtatgtgaaatctggattagctgagttggaattatggtgttgccaggcaaaagatgaagtaaatgattttctcttcttagctaatttaaatttcaaccttttcaatgcattatgtgataatttgcataattggcccatccatatgcacaacacggattttattttgtcttaaataatgttcggattttcacgagctacccttggtttgcagtatgctggttcatcttgggatgaactgaaacacatcagacaggctgttggattcctggtatgtttcccatccttaatgtcaaagcagtattttacatttctgcagctacttagcttactcctttatctccacaaatccttatctgcaggttatacatcagaaatataggatctcctacgatgaaatcacgaatgatttgtgtcctgtgagtttctcaatctcacattctgtagtttctattgttggacattaatgatgatagactaccaaatttatttaaaaagaggatttttgcaacatgtttcaaaattatacagccaaaaccaatagctatctcttggaaatattttcaatggatgttgtgttcttaacataaagtaatttcatgtgcttaattccaagcacatattttttggttttcacttctttggtacatctttataaaacacagaaaatcattacaccagttcttgtctaatcataacttattttgcagatcctgagtgttcagcaactatacagaatatgtactctctactgggacgacaattataatactcgaagtgtatctccggatgtaagttacttttccgttaacatatgtgtaactgtatctgaatcccaatgcttagcaaccataccctctttcacttttcaggtcatttccagcatgagagtactcatgactgaggactccaataatgctgtcagtaattcctttttgttggatgacaattccaggttagtttttattctctcaatatacattctctttctcatatgtcaatgcttgtgcatgaataactggaatcggtatcgtgctataaagtgtatgaaagaaaaaaaaaatcggattttgagggtcttttgcttcaaatgacagcatacccttctcggtcgacgacctctctacggcgctgcatgtgaaggatttttcagatgtaacaccagcagaggaacttcttgagcagccagccttcgaatttttacacgactgaggctaagggaagctcctgttttcttttctctgtgtttcttttttaagttaaaggtaggctttacttataattctatagcaatttcattggttattgtaaatccttctttccccaaagctgaaaaaattaaaaaaaaaaacaaaacaaaattgcaaaaaaacccatccccttatattcatgcctctgctgtaaaattatttatttattcttttctcgttttggcattgaaaggggcaccaatatattttgaggtgtgtatacagttttttttcttcttcttttctttctttttccagtggtttgtttttagggagttcaggtgaatttgttttgtagtttggtggagtgaggaattgctctctccacctcattttttgttgtaaaaagaaatttactatatattatttaaatatataagcacaaggacattgacattggtttgtgaaatttttggttatgactttacttttatgacacttattttttgtgttagtgaaactgtatgtgatgtaatcaaactaacaccaaccaatcaagaacataaaaactagaaagggtagaatgatgaacaaggaaatgacaatgaatttttcctacttacatttaaggccacaacaatggcttatgaattttatttactatcaagaagaatagtacaaatggagcaccaaagaagtcttgttcttgaattaaaaaaaatactcacatcaagtctcgaaactattctctgattttaaaatcccaaagaaggttaactgaattaataaacacgaaggtgacgttttgttcggaggaatgaaatcacaagaatagtaatgaaaaatggaatacaaatttaaaaataaagttgatagaaaattattaattttttttttatcttgtgttgaaataattttttctttcttttctaacgaatgatggaaaaatcgttttattttaattttttaaaatgcaatcaaataaagaaatgaactttccatttcattaccaaattccacttaagataagtgaatttaactgttttaattaactaaagtcatatcagcaatatcacaagtggcatgaaccagtcaccacattgtacatccataaattcattcaatttatttatttttattattatcttcttaaataatctgttggtggatttgatattttgtatatataaaaaaaggtttgatctttttatcgtttagagttgaatcctatttttgtttggtaagagaatgaatgagagttcgtgttctttttctaaacgagtgaatatcttttaggatgttttgtttggtttgttagaagcttcaagtggaagagttttagagttttgtagaatgcccactcttttcacttttaagggtttggaagttttaagagttctcttttaaaagagtttgtcaaaactaacaattgaaacttattgaatcaagttgtagtcaaaattatttcataattaatacaataacatcaaatataggattagatagcgttactagcccataagttcgagcttgctattaaaactcctatgaataatcagatatttaattatattat

SEQ ID NO: 266813 - DNA, 2095 bp, Cannabis indica
aaaaaaaaaaaaagagaaagtgatacttaattggttaattgttgcttgaaaggatagttgatgaaaaataagggaacagtgtagtatacaattttgttgtttctgctagtttgtttggatagataatgttaatgaaagcttagtcaactaagccaatttattgagtctgtcttggcttggaattaattaagtttaatcagttcatgtggaattttgaaaaaagaaaaaagaaacaatatttctatctaacaacagttgaattgaggctcctaagggtggagtaattagtgttcgttaatttatttctcaggtagggactttatagctccttgtaagtgcaagggcacatcgaagtatgtgcaccgggaatgtttagatcattggcgagccgtaagggtatgtatgcgaactacttccagtctcaaataaataaataaatgaaaaatatggagcataatatgataatcctgtgatgttttatgcatatggttgttgcttagttttacgaagtaatgacatataaatgcaacgataggccagagtaaaattacaaattaaaggatccattttcatgtagattatgatgatttcctgccctttctattttcaatgtaataacttttcagtgttgtgagtatcacaatttgatcccagtgacaaattatcattagtaccatggacaggttcaaaagtgaattagctaacgtgttttcttgtgtgtaggagtatgtttagtgcgttgtagatgcggttatgatgttatttgcgtaatgttaatttagtacatagtaatagatttttgaataagtatagactgtatagtatattatccattgcacatgtatttctggatatttcacatttttacttgatggaactgattttgccactttccaggaggggtttgcatttgctcattgcacgacctgtaaagccccttaccacttgagagtccatgttgctgctgataggaaatggagaaccttgaaattcagattctttgtgactagagacatcatgtttatatttctgactgttcaacttgtaggtcattggttattctctcgagctgtcatttttagagtttctgataattttactaaatcccatgtttctttcacttgcaggttatagcttcattggcatatctggtgtatttgacagatggctaccaacaatcctggcttcgtcgtgcttggggttttgatagtgaggttactttctattacatttgtggtaaatctctttcctaaaccctcaagtatctacattaatcatctttaaattcttatatatgtatgcttcttatagatgatgcttgttatttatacccgcatgtacttcacatttgtattgtatttttgaagaggggagagaggaatgtactagcttgttgttgattgaactgtttatccactgactaatggtaatgtttttactagcaatgtttctcacattattgactactgtactgaatacacacaataaggacgttcatgaattatatagtattaatggggtgtttggtacatgagtgtcttaatgggaatagactttaggttccttagaagttgcaaatgggttactgataattgccctgtactgtactgtttttgtgactgttttggttttctttggttattcaggtcctgattgatgattttcgtctcttacactcttatacctagtccttgttttttgctttattcacattattatcctgttggatgcaggagctctattgtttttcgctttgcttggtttgtctgggtgcttcattacttgttacgatcggagagtgcgcaatgatttggcccagccttgcagagaattatgcctttgttgctgtcatcctgggtatgtctattctgtatttccttttggatattagctgtggttgattttaattattactctcggttcggtttatcattattattatctttcctttctcattgaaatattggattgaaaatttcgaacaagcatctacttgttttttttttctcttttattctaaattcattatttaagccattggcatagctgtatgttttcactgtaagttaattatcaaatctaaagggttgtatgc

SEQ ID NO: 266814 - DNA, 2569 bp, Cannabis indica
gttcgggtctatttcttgacagtcactagtgactttaatggctagttcggaaagctctgcccttgcagcctctaggcccgcagagacagaagcttgatcgctcaatgctttacatgctttctcgagtatggattgaaggtattttccttgtgcttcgattcgaagttgaagacggcgttgcacctgtaaagttaatagggggacatgattctggaaagccaaatgttactgaaatataggtttagcaaattccagttggaaagggaaaaccgggtattctgtagtctcctcccagtctatttcggtatccaaaagagttttttagttcatttttttcttatgatcgtgtatattaaggttatttagaactatttgtaaattttcaaaaatttctgaatagtttacagtaccaaaaataaggttcaaatatttgttacactcgtgactgttttttttatacttgtagtaagaaaatgtttaaatttttatttcagcactgtaaattgtttgaatttttctaaaattaacaggttatcctataaagctaccacatacgcgatcatgaagaaaaaattagactaaaaaactcctacataccgaaacagattttttcgggttgtactactgatttttcagaaaaaattatataagtaaccaagttgagaaagaaaaaaaagccaaatgtttatgcgaattgcaactgacatattatccaaaaatcattagtgaaacatagagactaacctccaattgctcatgaagtcttctttgaacttccatttgtactcgcaaagcctcggtaacctgaaaaccgctgattaaacaaagaaaagaacagcattagtatgcgaaacaagaaaacatgatcagcatcatcagtaaaaccgaacacaacataacatactcgtttgcatcttgtgctatgactctcgaagtcgatgttgaagatgaaccggtgtcctgactttctgcaatgcatgaagctgtaattccaactacacgttaatctgtaaccgattagtgtttcaaagccttaaacgagaaaactatgattctttcgaaaattcagggctattaccatccttggagttgtcaacagaatccttacatgattgctttcccaatcgatatttctgaaattacagttccatcatataaagaaggaatttttatgttatttgcatatttctttccatgacaaagatatgatgggaagaactcacctgaagatgtgattttaagtggtaaagagtaaggcctttcactcccattgttctcataatcgtcttcggtgttgcttctgcaatttacaacaaagatggttcataataagacacaagatgtagcataaacataagaaacatttctccattagatacaaacgaaaactttgtgactaaatacaccgaggttcggggagaccacagttcggggttcaacaagaaatgatatttgtaacagagtttattggaagactgtttgcatgaaatgcaaagtctcagtctcacttctttgtactcgatcgacacctctcgtttcgtatggttcaaatgattcaaactatagagcacttgataacatttagtccttagctattagatttcgaaacaaaactgaaatgaggaactttgaataaatatggaaattttgaaagaatgtgtgagtttctcattgtagacaagtctagacttcttttgtgttttgatcaaattcaaaagcatgttttccctttggaaatgtgaaaatatcgaagaattcgacgtgcttctttgaaagagaaaatcccaataaaaagcaacagcagcagtcaaaggaagaagaatggaaagaattaataagatcaaacaaaacaaacatgttgcaataacataaatttaagaaattcattgttttcatcaaaaaaaaaaatttataagaaaagtttatttttctagcattttctaccattaaaaccatttgtagaagagaaatgctaatggcacaagtgatgcctagcaccactatgaagtatcaaaccaactttgatgtaactaagtatcaggtttggacaccactcgtgcctaatagcaatgttctttgtagaatatcttctgtacatttaggaaagtagtgtgaatgcaattcatattgttggagggaaatgaaaaagctcataatgtgaatctttctatagataatttcaaggcacaaattgcaaaataccctaatgttctatggaattcgaattaaaggaagtctcttgtcttatatcaagaatgaacaaaaagctttggaatctataaagctaaatggtatttctttgcaagacaacatgcaaccattgttgatagtggccctggttggctaggcttttgaaaattgctttcggtttctgaagttccaaagcacttacattgaataatcagtgagtttcaacttttagctctaaaaaaactcttttaacagaatatcttagtagcttcttatgaagctctcctaagaactaaaagctaaagcagaagctcagtcaaacagagtatatagtcatagtcgtagaatccgaagccggtgaactaaggcacggcggata

SEQ ID NO: 266815 - DNA, 4485 bp, Cannabis indica
aaagaaaaaaaaattatatatatataataatatgtgatatcgtaattataacatttttaaaaagtattatactattggagggtttttagaagtaaaggtgccaaaaatgatatagaagaaaaataaaataaaatatttattttgaataatgtggagatataaagcaacttcaaagaatacaaccattggagatcctcataatatacttagcaccaccaccatagctttcagtactcttaattttatatgtcagtagcacatttatttttctctttttgttttaaagaatagttcaaaaagtctccaccatttacttctagaaattcatacatatctaagtaaactacagatttttatttatcctaattttatacgattatttttctttcatgggaatgtaaggtctaaagcttgatagtcaaatctctctcgaaaaacaaatcttgaaagtcaaataaaatccacaacaatagtgtcatattacatatgcagaacaagacacattaaagcctatgtcaaacctcaacaaccaaatattgaccaaactagaagttgagcaaattagactctaatccaaaagtaaaaatgacaagaggtaggtgaagctcatgaatatgttgtttcgaaagactaaatttacataataaacttaattaacattattacagagtttagttcctttgagaagattaaaccaaccacagaggacaaaaaatatagtcacagttgcatatattctatgcactgcaaacattattacaaaaaggctttataagttacttaagaaggtaaactaggagccctgttgttttgagtcacactttgtttattcaaccactatgcacaaaatcaacgcaagtcgaaaatttcgaacctcaaattcgaattcttgtacacattgttgcagtgctcgtatatggaactcccatctgatgtttccttatgaggatgaaatccctcctcttggcattctttcagtacagtcatcccaccaggctcagttagtcgaaatattccatagctcctgtaaattcctcattaacaagtttaccaatgtcatgtaaagatatcttatacttaagaaaactatgaaatatgaatacaacaacttatttctgcatatctcaagcacactgggcatgatctttttttttcctaatttagttggaagtgaacatttttgacaagaatgtgaatagggtatgccaaaagagttggcatttggaagccattgataaggaagtgaactgttttctatagtttcatgaattggaagttgtggtattattccttaaacccccaactaacattcggttagttagttagtctttaactaacttaactgtcaaatatgttaaaacttaactcaaatatgacaaaaagtttattggattttttggcttatataaagagaactactcctctcatttcacaacataaaaataagagcaagaacaagagagacacaacacagtagagagagaagttagagtgagaaatggagagagatatctgagagagagaagttagagtgagaaattgagagagatatctgagagagagggttgggattgggaaattgtatttagcaacattgttgattatgttggttcgggttaattagttaatgaatgttgagggattatactatgaatgacttactgtgattatttccttgtagctcctgagattgatatctctaattctcactatcaataaagattggtggcaatgctttcaaattggagtatgactaagttcacattgaacttaagatcgaaactagtataaatctcgtgtgtttttgtgtctggaagctatctaaattcatctgtgttaaatttttctagtttaatgtgtttgctggtttttgtttttgatctgtttgttttgaagtgtgatcttgaagctggaattacagaagttaattcctatgtatcagagctaaattttctacagaagtgaagtgaagagtaaaaggaaccttgaggaatcagtaggagccatgacaatagcgaaagcctcgggtaccattacctgaaaaattttaaaaaataaggagaagagaaatatcagattcctggttaattagcaaacaacattcagattcatagttttggaacataaattaaaaggtatatagtgtttcaagccttggttgtaaggacagtgaatcaaatcattgtaatgtactgtgaggagaaatctaagaagcaagcaacacacacacaaaagtacctgatatgagtagtgagtatgtaagtctactgatgacatgaaacaactttgagtgggatgagtctggaaaaaaaaaaatataaccaaagttagagcgaagagcttcaatttttaacacaattctattcgtaaaaaagaggtccaaagtccatacatgaatccatcccacaggaaacaatgaatgctcattttgtatggtgaaaacttcctcctcatttgaagcttgacactgccacataatgttgaaaatcagcagcaaaaccgaaaaccgaaatgagatttcgagactcaaaacaatcaaagttcagagagaaaaaacactaagatgcttacagagcttgaagtgcattcctgttttggtatgatcagagtggttacgtagaatcgattctttttctacacagttgaaacaaaaatatcttaagctgcaacaaaataaataatcattggataatttcacaaacatcaaaaacaccaataacaaggtcattgaattgaatgtatattttataacaaacactaaatcttacaagagaggcaccaagaatgccacaagtctctaaatccttctttgtattctcctttgcaagctcaagaaaatcctccattaattgagctgactggcaaaatgatatgacaattatataatgaagtgttcctattttcaataccaccaattttctctgttacaatacaatataatatcatcaattcttactatatgtacatctctcaggatcacagatgaggaggatgcttctgtactagtagaagagttagaagttccatcttttgggttggcgatttcgatactcgaaatttgatcatcttgaggtactttttcaatacaagagattgtggttgaaggataggaatgagtaacagcatcaactttgatatgctgagactcattgactgttctaatttcaattctgctgcaactaatgctagagccctctgtgcataatgaagctaacccaactctttccttgttaaatatcatcttttctttctatatgtaagaaagataaaagaatgagaaaaaccctttacaagaaattcttcattgaaattcagattatacaaaccacttaactaacaatcaaagaagatttttaaagctaatttaatgatttaaaattaattcaacccaaccccttttctgaattaatcattggaacaaataatttaaagtgattggatttaccatgataataaaaagacttttaaaatagttggagttgaaagacttatcttgcaacctatgctttttctgttaaacaaaggtaaaaatatcttcttatataataaaagagaaataaataagcaaaacaataagtaatgtatggaagagaaagaaagaaagaaagaacctggttaagagatgattgagttgggtgtacaaaatctgttaaggaagattagattggcaatcatatattatgcatataatatatgattgaatggtttttaatgtcttgtgtttcagtttcgttgtattacagaagtggaactgtgtgtattgttgtgagttctgacatttgagatcactttgttcgagtttttaggtaagtgggtccctgtccctattaacaattgtcagaattttgaaaccgtaactttctgggttggcctgacatgatcaaattcgggccgagttggcccatagctgaaacaactggattagaaccggcctaggggtaagttgaaatatacctgttttttttagggaaaattacatctacacactaaattatgatctaatttacagaaatgtcgttagtcaaaaaaatataacgtaatttcaaaaatatataactatatattacgtagtaaattaaagtattgagtttcaagttataacacacacacgagagtatattccttctctctcttaattgatctcagcttaaaggctttttgttggtcttgagttctttttgtgtaaagtgtatccattattttttttttctttttcttctgtagttttaaaaaaaataattttggctataccggtatttgagattaagagttacaccattatacaaaataattagtttacacataattcaaatatacatataaaacaattttatacacattaaatgaaaaaaaaaagtgacatttcataaataaattactaattagttacctttcatatatctgatatatatgatattaatataatattgtaaactagatgtattttaaaatacattaatatacaaactgattagtttacgaaac

SEQ ID NO: 266816 - DNA, 5260 bp, Cannabis indica
ttatttagatattattttcatgtagttttttttattgtttcgtgttgtttttatagaaaattataaaaataaaaaaaaaaaaattcttaaaacgtaaaaatataatttttttttacaataaatagtgctttatgtaattatcccttcaccaaaatcctatcacatcacgcccaaactcaacccagttactcttggttcaaatttggcccatgcaagaaaatacgaaaccctaattactccaattaacaggctgcaccaatgagattctagtaagacccatttcactcatttatttaaacccaccccaataattagccatttgttctacaatatattgtcagtaacaaatgagtcttttgacatgcgacagcatatttataaaaataaattcctgcaatcataaatttgataaaatctcctgataaagtagaaatgttataatgtagcaaaagatatgaataatgtaaaattctctttctttttgtttttaacattttaattgggataagaggccacaacattcattaaagatggaagtttaagaaagaacaaaagcagagaataaaaaagactgaaaataaagagcagagccgagcaaaacaacaaatacagcaaaatagaagtctaaaaataaacatcagtaaaagagaataagagcatatattcaaaaatcacctacccctatgatcgttcagcaagtaaagcagcataaattactttatttatttatttattttccttttggttggacttacttggacaataaactcaagtgtagccacatttaagcctatacatacatacatacatgttaattttatagcttcatgctttaaattctcattcaggaaataaataaagagagactttattaaagaaaacaaaatatcaagagacttttttcgtttttaggtttgctttagtataaagtatatacaagcatagatataattgacactctggtctgatcaaaagagcaagtcatgttgccattcattgattggagaataatccctaaaagaaaatgattagttccaatagtcaaagtcaaaaacttccaaccgagccatttaaaaggcgggaaagaattatggcaaccaaaatgctaggcaaattaaagaaaatgaaaatgaatcaaaaaagaatatacaagttctaaaatcggtggatgataaagctaacaaaaaagacaacctaaaaacgactacactttctctttacaaaatttacgtttcaaatcttcctccaaccgttgcaatatcaatgaaaaaacacctgaaataataataaacacttacattacatgcaaatcaaaatttctaaatacaatttatataaaataaaagagtagattgggaaggaagaagaagacggctcctcaatcatagctgtctaaaatctcaatgaattaactttccccaacccccttctctgttactttatattttggaaaagatgtacgaaaagagacacaaaaagattgaacacacgaatgtataattagttttatcagcacttttaaagtgaatgatcccacataaaaattgtagtgcctaaaatatattaaattagtagcattactccacacgtatagtgtgtgtgccatcatctgcgagaagttgaatcagaaaccgtgaccgtgctatatttcaaatttgacaataacacagaagaaaagatggaagaataaaggaacctgaaacttgggaatccccttgcttttgtgagacttttaccagaagtgtgccagggatttgttgaaagacctaaagaaaatgattacaagttagaaacataccgaccaaccataagaagttgcatccagtccaaaatgagaaggtaccataccgaaattcgaaaacataggtccttcataggaatgttcaagcagcttgagcttatggatgtatctcgcacatgttcaaaaccagcagttttatcaaattgtaactcctccatcttcaggattgcattacaatgattctgtgaagcagtaatctagcaaaatgatattttgcagttcatgagaacaaagcaatattacttaaccagtaaacaacacaaaacggtaaatgaacagccaaaagagaaatcatacatcaaccgtaaacgacgaaacattcaatttacaagatgcgccactaatgcagaagaaagattcgattgattgcaaaacatgtatggcactatactgacgttgaatgccctgtgaagaagagcaacttcagatgtcaagatagagtacaaaaaaatgattcattaggaaatcacacacatccagattacaaggatcctaaaacccatctataaaattaaaatcttcaacttagatgatctcctgagattgagaaaaatataataaaacattgaaatatatttagtaaccattcatacctcaagcatgaaagacaggttaccattcttaaccacattagctgataatatttttttaactggtggcacaaaagaccaagcaatcccccaacgacaagtttggccttggacaaattcagtagtttttactatagaaactccaacttctcgaagctttgctatgagggatttcatgtttgatttcctcccaaccattgtagtgtaccacctgtaataaaacgctacaaaaataaaagcagtattcaaaactcaacagttgcataagaacacaaaatgcacatgcaagaaataataccgaaaagtttgcttcaatatggaactatcttcaattatacgacatataaaagccttttctccaccaggacaaaccatttcttgcggagttccaccacaggaggtttttggattcaatcctgcctcctccatggtatcaaaaaatggaggattgcacatgcaaaaatcaaacttctcatcatccttaaccacgccaagaaggataggtggcccataataagtcttatttgtatcaacaccctcaaaaatcatgggattggtgagaccgagctcgctttcaggaccaccagattggtcattttgtggatcttcgacaagaaggctagtgtcatcacttttaacttttcgaatttcaatatattctgatatgtgtgaattatttgtaacatttctttctgcccactctactgcaacatcagtcacatctgaaaccaagtatagtagaattgaaattctttcaaattagaaattgcagcagcaaacaacatctgtatattatatcgttaataagaagatacctgacccaacaaaattccaacccttaagagatgcaccgagcaaaggatatatgcagtttgctccagttcctatatcaaaacccctcacattatcaccattcaatatagtctttggaatgatgtcagagagtagaaggtcttcaatccagtgaatgtaattggatctatttggcactgtggggcatagctgcccatcaggaatccacctgagaaaatacatttacaaattcacattgaagacatatgaaccttctcaacataaaaaaaagggagatctcaagttcaatgaaaagataaatggaaatagcaaatacatcaaataactgaaactaatttagtagctattgcactctactcaacagctaaggagaacttactcatcaaaataaaacattcttgcataatgaggagcataacaacattgatatactataaagttacttaagaaatttatatgtgtgtgtgtgtgtgcgtgtgtatatatatttaatatttatgtatatcatgaagctatcaagggaacataaaacttatactatgaggattttacatgaaattactgttaaggtttgaccacttgaactctgttccaaccgtattaacggttttgtctctcattctttctgaacagttttccgttatttccgttagactcttgtctgagtcatcatgagtcaaaacactatatatagaagacattgtgtagtgtgaaggataaacaaaaccgaggttagttgagtgagtttgagggctgtaaaagtttctcacgtatgtctgattgagagaactcaagtgaggttattttgtaaggagcaaagactccattgagaagaggatcttgggtccatttagtaactttgatctggaaattctaatcaatgaaacagctaagctaaggaggctctcccgtggattatgtccaaaatcaagctgattttgtgacccaaccacccaagtaaattgtgtttttacagttattagttttgagactttaattctttccattcgttgatctgtgtttgtgcttctttgcttatcttgtttcttgtttggtgttgaagcaccaattactaataaatcttttcctcaattataaattctaaaaccaccattctcttttttctttttactcagaataaaaccatcattcttaactagtaaatataaaaagatacaatgcacttaagaaaaacaaccaatttgcaccgaacctcaacctccatcaattaccatcgggaaaataagtactagtccataatggacagtaataagaatgcaagaagagggaagtgtttcctttcccattcagtcgtatggctacttttgcactcatatgacacaagtatattagttcattcatcctcttcataagcaaaattcttttcactttacaatacttttcatcatcaattctttacacgaaggagctcagaattagaagcaacacaaatataattactaagtcactgtgttattttatctaattctaacattggattaaatatcaaacaaatcccacgataaactaattcatcccaaaccaaggcagtgaacagaaagagttaatagagtagattaccagttgaggccaaggtcatgaaggagcaggacgcgggtaagttcccgtgtggcattgaagtcagtccaatcgagtctggggcgaccgtcgcgtgaatagaagatgaaagactggaaagaagggtagagagaacctaagaaagcgaagtccggtgggttatcggcgtatttgtttttggggtggatggtgggtcgctcttctctcctcttcctcttcttgttccctgccattattagggtttcagaattattttaaaaaaaaaagtctttttcggtaatgggtgattttacgaaattataaaggtgtgttcttgccgggaaaaagaagatggaaatcaggggaaaggaggagcgagagaaatggatccgggtcaaaccccaacacaatccgggtccatgggagtatgattataaacgacaataaagagaaaattacactatatacatctttttgttataaatattaataattatgt

SEQ ID NO: 266817 - DNA, 2073 bp, Cannabis indica
ttctaattactttaactaattctctttgcagttttaatattgatcaacacgattattccgtacgcttgagatctgcgaagaagtttttgaaagatggcgacaaggttaataaaactctttttaactgtcagcatttgcctacacacattatctcgtctcttgttttattttgcatgtatagttaaatctttgttgtaatttctgcaggttaaagttatagttaacttgaaaggtcgtgaaaatgatttccgaaatattgctatagagcttatcaaacgtttccagaacgatgttggggaggtgtgtatttatcatctttattttttgttttttgaatagttgtcatctttatttttaatattcacaaacaacatacaattatttttcttgcaaatttatggactgtcaaatctcttagattcagaaagattgtggctctaccgaaaaataggaacagtaaaaaaatgaagttcaatttatcattggttggtttgtttggtgattatgtaatctatcatgactcagatttatcatctcatgtttccaaatattcattatgggcttatgctcagatttgtgtaagtttcagagttaattgttcacctctgcttgttgttgcagctagcaacagaggaagccaaaaactttagggacaggaatatattcataatcttggttccaaacaaagctcttcaacaaaaagctcaagaacccccaagaaaaaagacattcaaatgaagcagttggagttgatgaagtatcagccaatgtttgattgaaggaaatagtgatttaatttgtattatttaacaagcttgagtaaaattggaaggtaatgtatagcattagtgtaacagctggttgagattatattatatcactaaattttgttgtaaactatcttctggatttagaattctataatggattttaaaggcccttattgtaaaaaaatatttatttttttgaagcaacacatatgattgtgtaataagcatatagttgtgaaaagattttcaaagcttaagattattcatatcttctgaaaactttattggtactagaatgattagattggcacaatctgattgtttggcagaaaatcattgtttgatgtacttctaacctctctctgtatatacatacatttatgtaaatatatatatcaatatagggacatgattttgtcccgtaatgtactttcacagaatgtatttcgtggtacattagatgggtctcagggtatgttactattttcaactctaattattcctagattaatctcaaccctcagatcaaataacgccctcatctaacggctgccatacattacgaaatacattctgtaaaaatacaattacgagacaaagtcatgtcccaatcaatataataccatgtgcaaatacaggtacacaaccacaaggctgctatttctgtcttagatagagagtcttcaactcacttacctaacgatatgagctttggcttaggttttaagttcttgcaattcaagcatggttttcaattcttcttgttctggttatttagaaactatttctgtaaaaaaaacaaatcatcatcaagagaagtacttttgatgctacttgttccctttgtggtttcttcttaaaacgtcaccgtttaggtgaggcaccaccaccaatgtttaaaaatttcaaaggccaactcatgttaaatatgttggcaatgtgtctatctatctattcttctaccatcactttcttcagactattaaattaaattaagaaacattgtggctaattctagaattctatttttgtactccaccatttttggttcaaatttaaaagcttaaatattgtgtttgggatagattttgcttgtatttgtagcttcataaatatataatttttagtaaacttggaatcctaatttctttaaaaattagtgtattttgtttaattaaataagctagaaataacttattttaagctttgccaatagggatcatatctctgtttgactttacttttgtttatacttataataatttctatataaaagctacaaaataataaaaataatgataac

SEQ ID NO: 266818 - DNA, 1126 bp, Cannabis indica
aataaaaaaaaataaagaaaaaggatttttataatttgcagtacttatatatttatggacaacacataatttccataatatttttagggacatgattttgtcccgtgattgtactttcatagaatgtattccgtgatgtatggtagccgttagataagaaagttattttatctgaagactgagattaatttagggataattagggttgaaaaatagtaacatactctgacagtcatctaatataccctgtgactcatctagtgtaccacaaaaataacatcaggacacaaaatcgtatcccaacatctttattagtaattatacatatctttcatccaaaagaataaaaaccggaagcaaaaaaaacaaaacactcatttaatattgtatataaagatatctaaaattataaacaattaaattccagctttaaaatataaattatttaaaatacacaccttggtgtgactatattatttgggtggaaaaagtattgacaaggattatttattttcatatataaaaaaaaaaggaacaattgaaaacataatttcttcatgaagctattgaggatggtaaaagtatatttactaaacatgatatttcagtcactttgtcacagattcttcgttgatatgacatatgattcttagaaaacaacgtttaattcatgactacacatgaaaattatatatactattccaaattttctaaaaatttaaatggtatttatgcttataacagttacattacctaataaggcatgttgactatatatgcacaaaataaattttgagggataaaacaattatctttctgaccaagaaaattctcgaaggaaaataatgaattgttacaggaccattaactatgggaaactttagtattgtagcagtccatttttccgttagtttacagtttgactaatgagatatgtctctcagggtcaggggaggaaggccacgtattttcaggttgaaagtgtgtgtaacctctcaaaagtatttggataaacaacattttaaaaatatatttttaattctataaatacaccctattttattattttttttagagaagtctcctccattaatatataaaatatcttataaaattttgaaaaatt

SEQ ID NO: 266819 - DNA, 2037 bp, Cannabis indica
ttaattctacttgactaaaaattaacttaataagaataaaaaagttcaaataattaatcacatatatttgttttagaaatattaatggtgaacattcatgctattattcatggttcattgaaatcattttcaataaagttatttcgaatcaaaaacatttagagcatgcatgataaagaaatatcgatcccacgatttagagcatgcatgataaagaaatatcgatcccacgtgaaataattatatttcattgttaataacaatgtttattatatgtttttttattgcagacgctgtcattattattaattaactatcaactttgttttgtttgtttgttacttgggaccatgggccatgaccttctacaacgacattttcagctgtatagtttgattacttttcaaatccactttcttattctgaaacaaaaaccaaactctctccttaaagaaaacattaatatatattcacatacgaaataagttttttttttcttagaataaataataaactgtcacaatgaatttatttatggtgggcccattcaattttagtgggtgattggaaccaaataagaacagtcattaattttttgaatccaatatatatgatatgtatgtatgacatatgtatgtaatcataagtaaaattttagtaacctttaaattttgtaaataagaagtgtttacatgaaaagaaagaagaaaatggtatccaaacatgtaaaagcatttcatttcgaaaaaagacacaaaaaaacaaaaaacaaaaatggacctcaagcctttttgttcagattaccacataacatttctaattttaagaacttaattaaatcaagattaatcaacacaatcataaaatttacaaggttcactagaaatgaaaacacattccagccaattattttccttggatttctaataaaatcgactttatcaaaaattttacaatcactaatacatattacaaactgcaaaatcacattatttacaaagaaatagtaaacaattaccctaaaacaaaataatctctcaatctgaactcccttttagatatttgagcaactaaccattttcaatggaatttcttgcaagaaaaacaatacagagaaaataaagagagaaaaagtatgattaaaaaaatatcagctttgtaatatgaggtatgttgtaacagtaacaagaatgcgttatttatactcaactaaataatgaaacccgaaatagacaactatactcagctagacaacgtattacaacccaaaatatattttactgaaatggacacaacttactatattctacaaataaaataacgaacaaccaagatacaaattgagacaaaatattattcgccacaatacaaacacacaaaaataatggttgttactatctccctcttagataagttatgatcattattaatgaaccaaaacaacaaaaaatatgataattaagaacataaaaaggaaaaacaacctaacaaaattaaccatgcttaaagattgaacattaccgaactaaacaagataaaatagaaggcacttactctccccttcaatgatcataatgaattaatagccaactatctaaaccaaacatttaaaactaggctatctctccacctaatgagcatatataatcaatgccaaatcaacatgtacctaaaccaaatacaacatttttcttaaatgctcccctagagaaaattaaaagattaacaaaaaattctccttgaattataagtaacagtaaatgcaacattaactcctcattgtaaaagaaaataccaaaccaacacaacaagagacccacaacatatgtgtattagatataaaaaaaatgagaaagattgaccaaacaaattaaaactacggtctaaaatattagctctgcaatttgagatgtgttcaaatagtaacaaaaactgatatttatattttggtgtcgtttggtaatatttttatttttaatttttaatcacaaaatgagaataatttttttgtttttgaaaaacaaaaatgcgttctgt

SEQ ID NO: 266820 - DNA, 2743 bp, Cannabis indica
gtttaagcataaaatattagagtttttaatgtatagttattcaaaatttccatatataaacttttttttttcataataattatgaaattctaatttatgattttctctatttgtacaacgccagtctttaagaatgacaaacaaaatttaactcgtcaaactcgatattaattttttatgagatagaatttaaaaattatgtgcaagttaacacgactgacacgaaaaaaatagcaaatcccaaatacagcgcacaatacaatataccaactccatgcatgtatcactttacaaaacaaattaacattaacttcctttattcttcttcttaattaagcttgttaatcaaatccaaaactgaatcagtcaatcaacatggttataataaaaagatagagttgtgttttagttttccttaaaaccattcaagcattgtcaagtagatttaacctcactatatgtgaaacttgttttccaaaaatattaaatcttttaatacttttgtttacattgcttgaggctttcttattaattttggtacttaaaataagcattgtacaatccggatatgatcttggagtatttctaattgacccattatttaacaataaatttaatcaagaaagtgaaatgaaaaagtgactgaagctgaactcttaacttattttttgtttgcactagaacattgtaaagtatttttgtacacatattgaagttgtcatttgacagctcaattacaattacaataacaatattgttacagtgacatattataatagtatagaaaatcccaaaaatccaggatttttgtaaaatcaaagtcattgaaactaactccaacaaagataaaaacgacaacataatagatgacaccaaaatccaaggaccacagtaaaggaaagtgacaaagttcaagggcagtgtcaaaacaaaaagcaagagctataacaccatcaatattaattccaacattggaatggaatcaatcaatatacgattactattaaccattattttttattattttctctttgaaaaaaaaacaatggtttgtttatagactatagttaacaatgcttgtcaaatgttacatcactggaattatattctcaactatggagctttactggctggatttaacaatggagctttattaaagaggccttatttgacaacatgcactatagtcttatctttctgttttggctaatcaaatcctttatgttatcattaatcaagattgtatgaatgggtttattagaccttttcctcgtgcaccttgactaatgactacaattatagatagactgattaggatttttgctcctcaactttgacatgtaacaaattatgcctcttgaacttttaaggtcgttaaaaatacctctgaactattgagatggttggatttaaggacttttgtctaatttcattcagttttattatttcaatgattgtttatgtattaaaccatgctccctagactttgatatctaccaaattatgccttcaaattttgatatgtactaaatcatgctcctgaactttcatccacgttagacttttttactaaaattggacaaaagtttttaaatccaacaattttagtagttcatggagtatttttaacgactttaaaaattcaagggacatgatctggtacatgtcaaaattcaggagcaaaaatcctaattagtcttatagatatgagaaagacccttcaaatttattaaataatccctattttccaaaaagaaaattatgtatttttcatgggagaaattttgagagaatttctttcttcaaactttaaaaattaaatttaattcctgtaattttaatgagagttaaaaaaaatgccaaatacaacaattatgttttaaaaagttatagatatttctgttgaaaaataatattgtaattttactaatttatatccaataccaaataacataaacattaaagatagcaactatcatagcctaaatatcttggcaaatgattcattctttatcgaagagaatttagaggttaaaaaactctcacaaatgtacacaaaattcattgcagtcgttgtgctttttcttttctgggtcgatgactcaataatgtacttcaacttcgaccaccacttgtcacgctatcattatttccatcctcttcttaattgagttcatttcatttttatcatttttttttttcaaaatttacaaaaatattgttatttttttttagaataaattattttgtgaaaaacaattaaaaaataatgaaaaaaaaatatatttagactaaccaggtaattaattaccttttggtaactagttactttatattatttttctttttataaatatacatattcgataaaataactattaaaaaaactatatttaaatcgtaaaatatgtaatttttggtaattagatatgaaaaaatttatctaggtacagctgtgtttaactgatcctcagtttttgaaaattaattaaataatttcttcatgaaaaaaaatacttttttttaataagttacaaggttttttttttttggttatttacaatattttgatatttatttgagctttgaattattttgtaacgaccgccttagtaaattggattagaatagacaattagcactaatttctattattttattattatttatgaatttaattattttggacctcaatatttataaataaatattagagttgtaatttctcaatttcggagatttt

SEQ ID NO: 266821 - DNA, 3305 bp, Cannabis indica
aacagagactatattattgatgtgagaatgaaagtaaacgtgttataaaagacgataagatatcattatagagcttacaaccatgtacaccaatccctaactaaataacaaattgatacctttcatatattttgtactaaaaacccaagagctacgtaatattatagcatccaataaaaacaatataataaatcttttatatttctttccggtcccaaaatgacctacacataactgtgatcgtcacattccacaaccacaagtgttggttacattgtgatctatccaataatattgctgaaaaattcatcaaattgctgtgaaattattttaatcacgcacatacatgcacgcattcataaccactatactattcccaatgacaagtaatttttatgaaaaaaattaatattgcatgcccaatcatcaatatgaaaccagttttttcttttcttgtcgataagaaacaagtctagtttcattaagattgttcaagatacttcaaactgaatgaatccataaaaagacactaagctaactcgaaacttcccatcctctcaacaaatcagaaaatggaaaaaaataactatacttctttaacaagcaaaaatcaatacaaatgaacataaatacagtcagtagtcaaacatcaagactgcacatattacttacctcctcctcacttgttccactggtttcaactaaatcctcctctgaagatgtactggaatctgtggaagatatgtttttatcaccttcttcactctcttcttgaagagcgtgtaatatggccgtagggttatgtaaagaatcttttttttcctccaattccaatggtctgacataattctccttgacctcagctgcaatttttgaggcattcaaagcatgtggtggcagtggcactgaggattttattccagcgttctcatccaacccaaaaccccaattccaggactcccctgagccactgaaaaggtcaataaaaccataaacaaaaggccccccaagattacttgaaactgcaatatcctgacgaaacaattgactactgctatccaaactcgaacataagaccttccaagagaaaaggacatgagagaacaaccttatttaataaattattccaaggaagttgaagtattacactttcaagagtaagagaattaactccagattaataaattaacaagttgaagccccgtgaaggacaaaacttacagaatcatgtgattggcccactggcacaatttcagagatgaattcttgagcagcctccaccaaattgaaaatcattacccgtccttctcgagcattaaaatttgcctaaaagataaacaaactgctgaaacgaccaatataatgcatgttgcagattagaaaaactgagagcagttcttacatacatgatcaaaatctctctcttccctctctctctaaaaaacaagaccagattgcatttgtgagttaacatttacatattcatatcgtataatcaataaaacccatcaagccttacacttttccttttctttttttttttttttttctgaacaatgtatactgattcattacttatcactttaagatattatgactcctcctagctccctaatcacataattacgcagaacggatatctagtaagacaatgtaataaagagccaaacataatttgcatcactaagtacattttttgtaagaccacaagcatgtgagagtcaacaattacctgatcatgaagaagagacaaaagcttttcagcatcatgatttgttaaacctttttcttgagtaatctgcaactttggagacttgaaaggatacccaggcaagcacctgtcaaataaataaaataagaacaattactacctacgaaagtgcataacaaaaaaaacaaggaaaaaaaaatcaccaacctaacaagaagaacagcagaaacatccaaatcctcgaaacccatatcctttgaataaggcctgttcacatgtaagggcatttttattaaagaagagcatatacatcatgatgggatgcaattcaactttagaaacaaaactccaaccttatcttgatggaaatttgagaaggtggtccaggaacaattttgcagtcttcttgaaagattgcgcatctacgatagatgagagtaaacatgagagcgatggaaaatccattgacacattgttgagcacattgaaatagaaaacattcagaaatgtaaacaaccaaaacttgataacgcctaactctaaaaattgattagattaaactatcttcttctcatcgttcgaatagccgaagcatcgttagattaaactatctgataaattaataaaacttacaaggcagtgatttcctcagaaagaagttcattatcagaatcggtattatgatgagtgctgccatggccatgatccttggatggtgtccttcctttactccttttcccgctccctccccctcctccacgcttcttcttcttcgaaccataccccatctcctacccttactcaccacagagacccaacccccaatgagtagaaattactattgctagtattgctactgctatggtattggatgaaggaatctaatcaaatcaaaatgcaaataactataattggtattacatttacatcacttctttctctttctctttttcatacgatagtcaaaaagttgatacaggagggcgtcgctgctgaactgagtttaaacagaagagccggatggtatgtgctgagtgctgacttgggatacccttgtgtgtatccttactaaaaaaaagttcttatgtcgatttattcttgcacttatggaatttctctgtgactgtgattattgcattgtggatttggaatgtatattaaagaggattgaggcttgtcccaaaatactacaaacaaagatttctacacattaattggagcgtttagaaagtcaattactcaaaatgagtgaaattcaaataagggtagggatacacggggtgtaacgtgcgtactaagatgacaaagatgacacgttacaagttaggtgatgcctacaagttggtcaagtagtggtcaagtggtagcgcatgttgaggtgcatgctggtggcatgctgatgtttagtttgtatgtttgtagcattttcgtaaatatcttcaatattgtccgaattgggacgggacttggtatttaccatttatttaggtctacaaatacaatggtgcaatcgaattggagaaactatgtgatttagcatatggtttggccatatatctacataggcaaaatcatgtatgttcctagtagaatg

SEQ ID NO: 266822 - DNA, 1779 bp, Cannabis indica
ccacactttgagccaaaagtgtaaattatttttccttgacgcttaaattatgtcatgagctaagaaacaagtttggaggaaaattttagttgggtgattttctttgtaaatgtgaataaataatgtattgataattgagagaactatataaaaatttgtatagtatcactaaccttttaaatgttcgttgtattagttgaaagttcttcaatttttcttacaaaaaaataaaaataaataaataaaaaaaaaaaaaaagagtcaataaagtgatgttgttattgtgagttctctcaattgaaattttgtgaattggggaggggattgttttataagtgagaagtttgattttcattttgatttgcttatggtgtaattgagcctaaatgactttacctacccatgacctaagccttaagttttaacttttaaagtctttttgattctaaacttgtgttgttgatattattggaaaaatatacaaatgcaagcttattgattatttagattctggaatgatggtttgagtcgggcatttataatggagtccaataattgtggttatttgtaagttatattttgattttttcaataagtttaattttgaagcaattaaactaaaattctgattacaaagtgcaattgaaattttcaagtaatggcaaagcagtttagacaatagcagtggtttatttatgttgtttgtgttttctttagttagtatgtttaggtctttactcaaggagaagtaaatgttaaatttgggagaattttttaaatctatttttatgtcgttttagagtctacttttaaaggtattcttagtagtttttatatgttattgttcaggtgtacacttattttcttcttgtttcaggttttaacggtcaagtacatcatatggattgaaatgagataaaacacactaaacaagatgaattttatggatttatcatagattttggagttgtaagacaatgggtaaaaaagtctaagttttggatactcaacacgctctatttctaattgaaaatgaagtctgaagtttcaagctaatttttgtctatggtctgttcattttcagaaaaaacattgtcaattaaagttctagatctttcttttagctacccaaaaaattttgaatcgtccaattttgaactatatcgagagagttgtggtcaaaatacaatcagtcgtcgcaatagaaaatcaaaaaaaacactaatcataaaaaagggaagtcgcaattatattccaacaatcagccgtcgcaattgaaaattacaaaaatactatgcaatgtgatttaatttcgcatttatttgttggtcatctataattgttatctataaatttgaatcaaaattctgaaaagtgagatttgattatgctttgattgttttggatgcaatttaattttgaaccaaagtatctatgttgattgtatgacttttatgaattgctatgttcaatgctttccttgtgatttaactttgtcatagaaatatggggagttatcactaagattgagtgtgtaagtcttaaccacactatgaattattaatctcaatttgtcaatttactaggaagaatgggaattggatagaggggtgttcataaaagagacaatccaatctgcaaaatgtgaatatccgcacttgtgcgaattggattagattgaaaaatctaaaatttatacttgtgcaaattgaatgttgattgacatataaaaataaatgattcaaaactcatctacatatttatacaattaatatttta

SEQ ID NO: 266823 - DNA, 3155 bp, Cannabis indica
tcctcaagggtgctatatcatatcccacatataactatctctgaatagtattaacccttagtatcaatacaactaaaagagaagtaggtcattacctgctatcaaagggggtcgaacctctacaacaattttgtgtgttctttattttctaattctaattgtgtaacacgtggcaaacatcacatccatatgaccttgctgttggttgaccacatttcaaggtcaacagcacgattggacctcgtcaatattttgcaaatgagtcggtatgcttcttcacgatcagctcgacttacactacaaatagaaaaacccctgctccctctacttatttaactatcaacctgagtagagcgagagccaacagttgtaacctctgacaagtagtctaagtagaattcaattgtctcttcaacgatgtatgattcaacaatacaacctctgataaatgtttaaattatttatatttattaaaatataattttggtaaaattaattatctaataaattaaataattaaggtcaatacctcaatgtcatgttcaaattccagttcttattgtttatatataatatggtggggacgagcactcaaataacttgtggcataaatatgtataatatttagacatacattgtgtgcgtgtgcatgacatttgcttgcttttatagctcagatatttattatgttgttacgaggttttctttcccagttcacatgatgttgttgttgcttttgaacagttctagatgagatagataacaagtttgtgttaagtacaagtgtagtactaccacttgcttttccgaactatactaattaaagtagagagaagaaaggaaactaaagatatttcacccatcatgtaaaagaaaatatatataatagataagggcataattttctgtactaattaatttgcattttgaatgacaaaaaaaaaaaaaaataccttgctctacgaaggttttcataccacctttaattcatggtggatataattaccctcttagaaagcagcacagcatgaaatcaaacgaacaagagatttaaaattaataatgagctgtacttaaactatagccttcaaattaatactcaaataacaataaataagaccaagtcatataataggtaatagccactcacttttcttccaacgcccggctagaaagttccaagagagaagtaatttatttacagctattgggttattttagttttttttccttcttcatcattctaaagaaccaccaatttttgcagtttagtccttacaaattcagaatattggctaatggggtcatgttttgaagccaaggactattcaactgtgtccaaaactgttcttgggtccaatccaggctcaattttggaacttgtaactcaggcaacttgtccagcttgtaaccatatggtacttgcaaagatgcagtggtaaaggaggcattataattatctactgctgttgctgatcctacaacttcttctacttctttcttcaataccaagtcatttgcggccattaatggtggttggaattggattagctcttcatgtgggctacaaaacgaaaaggtgtccattggagaggctggagaattatgctcattctgaaagtttttctcttcttccatttgtaccctctgttctagtactttcaatgaagtggccttcctatatactttgcacaaaactatgtcctgcgttatttaaaccaaattaatatcttaattaattacctataaaaaaaaatgtgaccatatatagctagcaattattataagattttctcattttgataattggaaaaataattatatattaactaaatttatatataaaaaaaaattggctaagttggtacactgacactattagtacgttttagagatagctcttatgattacatggggtatattattggaaggttctaggcaattttagcatttaaaaaaaacgtatgcatatgtactttattattattatattattattattttctttctttggaattttgcatgtgaagattccttgaattttctcaaacgtaaactttacaagtcaagtatatatatgtgaaatcacttataatttctattgtttgtatttgatcctttcttgtgtatatatgtaattatgatttatatatggtaagagataaaggggaaaaaaagtaaagtagtaactaccttagagagtttgcagttatcaggcaaacgatactcattcatgacccaatcagtcttggttcctctaggagctctgcccttgtaaaaaacaagagtttttcttaaaccaatcacccttttgggctctgataaactcacaatccgacggtcagaacccgttgctttccaaaaccctctttcagtggtccggttaggccttccaccactaccatgctttctatctcttggcacaaaaaataccattctctttctccaagcttcgccttttctatatatgtcaaagaaaaacaaacatatcccacattattataaccataataacaaaatgttgataacaaaaaggtaataattatgtatatattgtaccgggcaagacccaaggatcaaagagatagatattgagagagccaattatgtcaaaactcattttcccagacaccatattcttgagataaaaatctaaaagctcctcttcagtgggatgaaaccgaaagccaggaaggtcaagtggtattacatcaggatccatggagttgatggccatttaattattaaagtgctaattatttgatgatcagtaatgtattggttttggttttggttttggtgatcagtatatagttggatgcatatatttatgtttgtagcttaagagaaaatgaaaaatgggatgggataaaaaagtgaggacgatgtaggagattttataataagccatggttgtgaccaagtcatgaccaaacatatggggggcagaaaagtctgtccaatattggaagtgtgtgatatgtggggaccccatgatagtgaagcctacgcgtcttgacgtagaaaaaaccaactataatattatatggacaaatatatattatgggatatgattttactttcagtgattctaatccgtgatgcacggcagtcgtcagatgagagaattatttgatctgacgattgagattgat

SEQ ID NO: 266824 - DNA, 2210 bp, Cannabis indica
gtgaacaatgacaaggaagtatgtgaagtaaagagtgatgctaaaggagatgaagattggattgtaccaatgttagagagattgaatcatgggaataccaatgttatagactaagaaggccttgcagaactgttggattaagattcgtatggagttgatactaatgcaaagaatgaaaataacaattatgtacaagacaggagataaaaatttgagagttgataattactggttgaagtttgttgtttgtttcaacagcgatattcctagtggaaataatttgaactaatgatgtatagttgctaagagagacattttgggaaactatggcctgagaaaacatatatggtaagaaaaactcaataaactacgtcacggcctatactgccacagtcgtgtatgcatattctgctgttttgattccatttctttatgttgtaagtatttaatttgccaatctaaatccaataggctggatgagatttatcatgtaactgtgatgctacgataagaagctgaggcttctagagatgactgtttttcaagctgagtctcaagccaaaactaatgatttcagaggtagattcagtgctgacatctggagaagttctagattcttacaggttttgctctgtctttctttttgttttatattttttctactgtgacattgtaagataataaaatatgttgacatgtattgacctagacacctagtcttttacggccaacttttgcagttaaaaggggtggactataaaaacttggaagattcacttgttgacaacatgtaagaattagaatttggccactttcatctcctactatgtgcttgagttctgtctctggctgacaaatgttactgaggaagggcatattatttttagacatgctgcaaaggttttgtagggaaaacaatagaaggtcctcttgaattcaagactaagaaatttagatttccagcaagttatcatggaaagtaagttaaaaatgttctagttcataattgaaaatctgttatgtagtcttttaggttgtatttttatgattatggcccatagtcatattcttactatatttatcaattatctttctctgtaattaagtactggaaattgaaacgagtgttagtgttggtatttctgctttgtttgttattgatataagctgtaattgtgtaaccagttgttgcttttatagttttattttcaatattatcgacttctttaaaacagatttaaaagggagcttattacaactttgttaaggaagtttattagatattattaataaacaatggcgtgtgatgtgtttgaaaccatatataaatagtaatttgatgatgctaactgacaaatagtttacgagggacaaatcctcacatcaaatcaaatggctccagccatgtaaacaagtctatgaaattatgaaccatatataaatggatatgcccaggacatacgaaagctaggtaggacatatacaacagatcaggctgtcaagaaagaaaaagaaattaccatatccataatcaactttgttagtaataacattcaacatagatttcactaaaagagtggaaaccaaaaaaggaacaagtggtttctatggctgcaaaggggtcttcaatgacatgtagtttgtcagcagagcataatgagtttcaaatcagcagctgggtcttcacatcttcatgtgcatgttcaatgagaggataaaatggttttattgcttggcaacattgatctttactgcaaccggctctgagcaatatggacaatttccaaacagaacattaaatgacctgcaatgcaagttacaaacaataattttaagccaagtagtcaaaaggtcagctcgagttggtgactatatatttgagatgacataaataatcacatgtgatagaaaattattcagaatcccttggacattctctgaagagtaggagtgttcattaaactgctcaaactgcccgcaccgcaaaaaaaatgtcgtttgaaattttttgcggtgcggtcacggtttgaattttttctaaattgcgtgttgcgatttgcggttttgaattgttaatatgcggttcaaactgcaccgcacattataaaaatactaattattatatttatttaggttcaatatgtgaatgttcagcccaaagcccactaattattgtattgttgaaactttgatttttttcatatttattt

SEQ ID NO: 266825 - DNA, 1302 bp, Cannabis indica
actaaatatagttagataattatataaatatatatacctgaattgtgagaaatcgtccaacaaaattagaagccagaacagagagtgttggagaatcaaatatgtccccattatcgttccatgttataattgtgttagatgattttgttccacttaatgttacgaagggtttatcagaaggcacaacaattttttctctgcataataagtgaatttgaattatgatgatatcgtccaattaataagtatatatataaataataagtgtgtatatatatatatatatacctgtaagttccaggcttaacccaaatgaagtacaggtgggagttattagagggaactgaatcgatggcttcttgaatttttgtgaaatcacctttccctgattgatcgactcgaattagatttgctgtagacatatctttattagtagtagaagcacctcttgtaatttcaattaaggtagaaacaataactaataattcaaccattatcattaactttatatagtcacaacaaagcttagcattcccgccaaaacccatgtggaaacatgtgataataatattacttccactcgatggggttgcacggtaatgaagcaaagctctaataagtacataatattatatacttatatatatatgctgtatctatcactatcgtatggttgttccaggtcaacaataggtagcctactgtggttgtcaatttcttgttgtagaagatcaaagctgggaaattattataaataaatgtttatatatatatatcccaaaagaattaatttcaccatgttgttgcatgttgcatgaattagattataaataaacacaaagaaacagtctcttctactattgaattatgtgttattccttaatgtgtacgagttattaataagaatattattgagcctatataattcaatgttattgttgtgattagctattcgcagccacctaatgtaaatttgatatatttgataaacgaaatgctaattactgctttgtaattaaggatagtttttatatatatcatgattcacatgccactacgtacactacaatagtggtacccttgatttgcgccagttttgccacgattttttgcgccagtaaaaagtggttgatttgcggctagtgatggatgcctaagaaaatccttttgtgttgggttggtgccataatgtgccaatcgatcttcaaaaagtggcggcactgcatgaatttgtaggtgccacgcacatgagtaccctttttcactggagccgtaattagtaaagtcaatcgagttttctta

SEQ ID NO: 266826 - DNA, 1800 bp, Cannabis indica
gcgtacgtttagataatttttggctcgaacattcttaatgtttgtgaaatgtaggaattgagtagaaagttataattaattagggaaaaagaaacaaaataatttagaatatagagtgtaaaaatgaaagagagtagagtagtcaaattgtatggtctctccttcttgtgaagctctttgtgcgccggccctagctaggttgatcgaatcatatataaaacaaggtatacgtagagcattctcagcctctcataactaactaataatcaagttgatcatgaaaaaacagctagctaggtcaagctcacaaaatttttccacttaactatattattctaatatatatataaatttagcactgcttttgtagagataatcttactccttcataatgactttttgcaaaatattttaaaccctagatagtaactgttagttttccagaatgatgatgtatatatacaattttaaagccctcataacagctaaggcagccccaaatctggacccgattttgttgattattcaatcagatgaccaagtatatatatttcttatttggacatgagtccaactcgctgacctaccaacactggacctctctgattcggaatacaccattcatgtccagaagcaaagagtctgccaagacaaattcggatacgtctccaattacacggaaccctctagacaaaggaccccaaagtgtcagaattttttcctctcagggtcggccctaggcataggcgggctaggcccgcgcataaggcccacccatttaaggggcccaaacaaaaaaaaatacatttttagaaatatacatatttttttaaataatttttaaaaataccatatatctttatagtaagggcctaatttttttttttgcatatcggccatttcaaatcagagtcggtcctgatcatagtggtagactgtgtatgctaccaaacgaaggtcatctttttgtccgacaccatattcgctgacattcttagtacgaatctggctgcgcatgacatctagctagcattcttaaactgtctctgcttgtacggaacagtttcacatcgtgaatcgggcctcacttaattgatccaaagtcaataaatattgtattttcctagtcagagggcctagtttggatcttaaaaacctaccgagttcgggcaagcccatacttgattctcccctataaaaagaatattataccttcatggaaagggttggaaattgaattcttgggagaagaactgagaataagtagggttcttcaattagggaataaacacgtgtaagaaatactttaaagtattttagttcaataatactgacttgtggactgcattttattaacactcgaaccatgtaaaaatctcgatcgatctcttctttaatttacttttttcttaaccttatttattttataatcagtttttgaaaaatcttgataaacaataacatatttaatgattttcctatgattcgcaagtggcaccgacaaaagtaacctacgccagtactacaaaaaatcttacttttagtcacaacaaaacttgttactaaaagtaaaaaaagttgttactaattattaattatcattcctatgttgtgactaaaaagtctgtgactaaatgtgattttactcacaatacttgttgtgacttaaagtcatattagtgacaacttgtgtctactatgttttagtcacaagtagttgtttgttgtgaccaaaaattacatttagtcacaaaaaatttatgttgtgactaaaaagttgtcactaaaagtaactatttt

SEQ ID NO: 266827 - DNA, 2108 bp, Cannabis indica
gattttaaatttttcaatctaatccaatccgcacaagtgcggatatccgcactttgcagattggattggattggatcaactattttctgaacacccctatagacaatttcgagtgatgtaggttcgacatgatgggtgaaggaaacaacagactttatgttcaggattgtacccaataaataggcatttggtaggacaaaattgaagtttatgtgagttataaggccttaaataagggtaacaagcacaactaaatactttcaagaaagtattattagaagtcgaattaaacaaacattgaaagagacttttaccttttgaaactagtgaatgcattttgttaagtaagtatgtggcagtaagaaaggcttcccactaaaagtagagaggcatggctacttgagctaaaagtgtaaggctactttcgacaatgtgcatgtgcttatgttcaattctaccattttgttagtgtatgtgagggcattgtttgcaatatacaatatgttgtgggaggaaagaaaaatagagaatggcttatattcgccacccaaatcactttgaaacaaatttatatacttaccaaagtatttctcgacttgtgtcttaaaagtttaaaacacagataagattttaaatttaatgtggaaggggaaaattcatgcatacctagtataatcatctaaaaataccacataatatctatatcctgaattagagagaatatggtagggtagcgcactggctaattgagacacaatctttagactaaagtgacccaaacattggtgccacttacaaaagttggtaagaactacactgaaacactaaaaagaagtagaaggactacactagtgataattagctaaaatacaattgaataatctagacacaaaagacctagcattgggagaagatctttctaggccggggaagagggagtagggcccatccttaagatgtccttccaccaagggttgacctgttgcctagtccgtgatataacagacattagaatgaaattcaaaaaacatgtcatcatctccagtgagtcggagatactgattaagcttttctatatagattaggaaaacattacacattatgtaattcattagatcaatcatgagatggtgaatgtaagaaagcaaaactaatatttataatggggagaagctcactattagctaccatgtttaccaaacccgtgataatcactttgcttattaagattgttgaaattagatgtaatgtgatatgtagcgtaagtgtcaacagaccatgctggatcagctatgatctcaggtgtagcaaaaaaggtagccttagtgttgttgtctccaatggaggtctaagaggaaggaggagaatcctctccatgacgatactagaagatagtagcaatgtgacctagtttggtgaagatctcacagacaattttaaatccaatacctttgttagatccacaagtgtgtctaggacctcacttcgctccacgacctcgatttgagctggagccacaaccacggtgactgatctagagcaagattttcagagggaggaaccttgacaacaccaggggtgagccatcaacggagtcgattatcttgactcaacataagtgattgaacttcttgaacattcaagtttccttaactcataatgctgttgatgactccatcatatttaactggaaggccattgaggatgctcattatgagattgtcttctggtacgcgagaatctacaagaagcagagtatcagagatgcttttcattcaagcacagtatttcaaaatcgtcaaacctcctttcttgggtgtctgaagttgattcttcggatgcatgatgtgtgccatgctacgagaggagaaaagagttacaagagctctctaaacttcatgattagtacgatagccaaccacctaactggaaataggaggagtcaacgatgagataatccagttgagttgaagttgatcctcatgatgccacgccatgtgctttggattagggatgagaacgtgtcttccgttttcattagtgatatgaaaattttgaggttgtggaggagtaataccaaacacttatccttcaagatcgcagccccg

SEQ ID NO: 266828 - DNA, 2915 bp, Cannabis indica
acacaactcaacccaaacacacaattgatattaattacctcatgccttgtagccacatttcagtgatcaatgtttccccagggtacacatgcaaaaggaatcgtcctgactatgctctcttcaccatgtttggatctcccttgcagatacgtttaatgacggctctaactgcaaatccaagcgtgcacaatccatggagtatcggctgtgaaaatctttgaaattacaatagcaacatgtttagtcaaatgttggtacatgtcaaatgccatgagatgaattaaagctgtgattgaaaaggaaaagcaagagggtggaaaatggaaagttgtttggaagttgagtttagcaatgtacacaccctgcaacttttgcaagcgcgggatctgaatgtagagggttgtagtcaccggatagcctataaagtaatgcctgcagagagggaaaaaaataggttgagacatttcagggtatctcaaagtcaaaggcaaataacaaaaattaacatggagatgtgtaaaaagttcaaaagttgtgtaattttctattcatccccgacacaaaaaaaaaaaaaattaatacccacatggaattccccgagtaacagagtttatatgaaccgctaacatgctgacaatggttaaaaacctaaaaacagaacatctagctttcactatttaataagcaagttctaactcttagttaatcaaatgtaacatgcctgagatggttgtgtagaatcttcaaacacagtgaatggctgttgctctggaattttaattgctggagcctggttggctggatagtttgaataagaaaatggttgagatgaacttgagaaaccaccagcacctcgaagaaaggcggttaacctacaaataccctagctaagtgattgcatgagaaatttgtatcagttcattagaaagagtgcttacctgttcatgcataacaattcaccagactcattgtaactttttgtttcaatctcaacgatagctgctttacctataaaagaaagataagatgaaaaatagcctccaaacatttatatcaataacataaatttatgtttttgactgcaatatcagattcaagtgtctaatgttcttcataatgcatgtattagtatatgatttttgtgcacacgtgctctgaattgttaaaaaactttctgccaacagatatacatacctttgtcatgcaatcctgccacagcaaccttattttgtatctgcaccaacaaaagaatgacatactatttagcatcgggatacaaaaagaatcatggttttgttgattctataacaaaacagactaaactcaagtgctgtatgacaataagtttgttatcatagcatgctggtagggggaggacaataattcgattacacatactcaggcactcaaaaatgtccaaagcaaaacaatctaattcatactgcatttaataggacttgaacctgcagcacacacacaccccaaccaacaatttgagatagcctcaactggcataatctaatcaacattgacttgtaaaagagaagtatctagcacattctattactatccaaaatggcttgtagttagaaagaagccttacacgaccacttgagggcagtggcttgtacaattctatgtattgttgtccatgcagcagaaggcgtggatcatatcttgcagcaataaaatcagaaaaagtatggttaactatctcatctaacacgaaataccaaaatccatattgcagacatgggcataaataataaagctggttaacacagagaaggtaatgaaactagatgacttgacaaaaacaaaacaagacaaagacactagttgcatgttgacttcatctcaatatgaatcactgaattgtaacgtaaacttaaaagtgggaacaaaaaaacatggtggacttcacatatcactgggaaaaacatatccctgaacccagaatggtcacctattttcagttttcaacctaaaatcccaaaacccacttatagctaaaatgtaaagggagttcagtaacttcaatacattttatttcttattcatagttagtctagtttaagatatgggattgtcaaggattcatattctgatacatgaaaactaagtaaacaagctaatcagaattatgtctctaatatataacttactctaatcctggtagaagagacctcaatgatacacacccaagggcaaatatttgcatgttgacttcacctcaatatgaatcacttgcattgtaatgtcaacatacacttaggagtgaaaaaacatggtgggcttcacatatcacacgaaaaaaaaaaaaacataaccctgaacccgaaatggtcatgtatattccaatttctatacttatattctaaaacccacttataaggcagttcagtaactttcttgttcctagttaaactcatgtttcaaaaaaaaaaaaacaagctcatgagaattatgcctccaatatacaacttactctaatcctggtagaagagaccccaatgatatagacccattggaaaatagagcagcaaatgttggcaatacctgaaagaaagaaaaaacatatgaattcattcagggtatgagtcaaaatgtatcctagagaattaaactcacgcgttgcaaatagaataacctgtataaacttctgcccgtcctcatgataaacatatttcagttcgtcaccatccacggcatccctagcacaagctccaatacctagcgcatagagcgttgcatctctgttttccaaaaacaaaaattagcatataaaaaaaacaaagaaatttacactgggataattacataatagaagaatgaagtctaaaatttgaaactttacctctcggaataggtatatgtcctctgaagtccataaaaaattgagaaagaaatggtta

SEQ ID NO: 266829 - DNA, 3699 bp, Cannabis indica
atcatataaattgatcaaaacctaaaaatactatatttaagtaaacaacttctaaaatctcataacgagtctaatttcctctatattttgtgcaaatgggcaccaaattacaacatttgtatttaattcatctccataactgcacaaatggcagtgactatgtgaagatgtattggaagataaatcctatttattattttatttttgacaaacgaattaataactacataaaaactatcatttatagcaatgaattatataattatattaataatattttgtaattacataaatataaataattcaatttttatgttgaaaagtataattaaaattctaaattacattgattaatgtgtaattattagttaaaaaactcttcaagtgaaaaaaacttacaattatttagttacctataagttataagatttttcagtcactatctactagtttccccataattttattttcttctattgtttgttttgcaatgaaataaataatatcataaatatttaaagttttaagtttgtaaacataaatacttaatgtttgtaaaattataattttccttcagttttatcagtaaaaactttgttattgtatgtactttcatttttttaataaatttaaaacgaagtctgtactaataaaactgaaggaaaataaattttttacaaatatttggtacttatactgttaaaataaattatttaatttataccacttacaaactcaaaattttgaatacgtatgtgactatttacccttttacaattatatttgcctttgttaattactattttaaattttattgttttatttatttatttattatcaatcagtaaaataggagactgaactaaaatcaagataaaaaaaaaactattttagttcatcaaaataaataaataaaataaaaataaaaaactatgatcagataagctttcaatttagtgtatttcttgaaaagaaaacccattctctataaacaaacattaatttcatcattataaatttataatcaaaacttaaaatcccatttttgtactttttttttttcttcttcttcttttgactttcacatttatgatataatcatcaagctaaatatttttctagtttctccacttcttccgtgcttccgatgtaaagaggaactcgttgatgaatctgttgtcacaaattgaaattaaacaaatcaatatataaactaaatcacacatatatgcaaacatgccaatttttactcctttatacaaattatttcaatgtagtacttaagtttgagatgtacaacttctaatactcaacatgatatgtgtacatgtgtttaataaacaactggttgagaaaacttgtcatatgcaagtgtacgtgtcatattattgatgtaatttgaattgaaaaataaattatataaagtgttcaaaatgcacttacttcaactggtgtaatgtcaagaactctttggtggccatctgagcctttgccaccagcttgttcaactataaagctcattggagcacactcatacaagagcctgagcttcccattcttgctctttttgtctctagggtagccataaatgccaccatacaaaagtgttcgatgaaagtccccaaccaaacttcctatgtacctagctgagtaaggcttcccactgggtccaccagggtccttaaggtcatcaatgtacttcttcaacttgtcatcccaaagctgatagttcccttcattgaatgagtaaatcttacccgatttcgggatttgaatgctttcttgtgtcaacacgaattcaccatacatggggtctaatgtgaaagcgaaaactcccttccctatggtgaggacgaagataaccgagctcgagtacatgcagtagccagcagcaagcagattgctccctggttggcacacactcacaacacacctttgttcactagtccctaactgtcatacacaccaataaatatagtatgtcaaattgtattacactgtgatctgatgacaacactagctttaaacaatcacatattcacacacacacatatgtaagtgaccctgtcccaaagcagaactacagtattttatatagacttactgtgccatcatcaccaatgtcagcaagacactcatcatttggactgtatattccaaatattgatccagttgagactgcagcatcaatgttggaagaaccatcaagagggtcaaacacaacgatgtagttgcctgagtaactctcttccacagccactggtacatcctcttcctctgaggctataatcccagttcttccacttgatctcaaacaattagagaaaacctgttcaattaaggtatatcagattaacaactttcttatctaacacaactttcacaagtaaccctttattatttacctcattagaaacaacatcaagtttcttttggtcctctccttgaatattaacagcaccctgaacaccagttaagttggaaatactagctctttgaaccaatgatgctatctgtttacaagccatggaaatgcttgacagaacaatggtgagctcggcgtcaatcacccctgactgttcctgcttgagtagccagttggtgagcgtttgaatctcgtacgaagcacttttcttcttttgtgcagcctcctctgctgcaacagccatgcaccgaacatgtctcgctgatctcttgccatgattgctcaagttaagcgatttggaggaggcgctgctgctgctgcctggaactacgtcgcatagttgtagaggagagagccttgagattgaacgagctgagctgtagtttgaatatatgagctgtgatgaagaaggagataatattgctgttgttgaaaccatggttagttactactattacttcttcttcttcttggaattgtgaggctggttttgtcaaaaacacacagcatgagatagcatgagccttgtgaggttggcaacgattttatgttgatgtgggtcctacttatctttcttcaatctttttgtgatcatgcttcttcggatggagactccaaaaagtgtactctactctacaagctacaagtgcatttggatttggtgtattcttatcccatactacatacaaatccctccattggttttcctttttcattataactttctgtttcagttatatgaaaatctttgttgaggtaaataattgcagtttctcactgctttcatatttactgaacttggttggctgtagtgttcctaaaaggcatcaggaagtgttattttaaagaaagaacaaagaaaattgaggccttatctctgaaaataacactttgattttagtcctaatttgtctcatagtcgagccaaccctctatatgcttagaatgattctagaataaattatattttatacccattttattttatttattttaatttttaccttcatttttatattatttaatatatacccactattatagatgatgttcccattatacctcttaggttaatgtaaatgtaaaatatgtgttagacttaagcagagactgagaatatattggcaattcactcaaaaaaatggatatattttaatgaaatataatatgaggatatttttgattaatggatacaaaaaagaagtatttctcaacttatcccaaaattctatatgcatcaacctatttattataagattatttacaccacatac

SEQ ID NO: 266830 - DNA, 3453 bp, Cannabis indica
atgaatgttgagagaatattaccaaaaaaattgtgctcagaacatttaaggatggtagaaacagcaatattggaattttgatactattacaattttcaaacgcttccacaaaagtaactgtaaaaataaacaatatgaaaaagacatgaaatgacattcaaattaatagagcctatgtaagttgcagcaggtgagtacaatagcaaaaacacagtccatggtactcttgttaactcataattcgataataaaaagagagtagaaaaaaatacctcaagtagaatcacttgtactaaaagcataagatattaggtgctcacaatagaaccaaaccaggaagaagcactaaagtggctttaaaatcttggctgattactcctcaagccataataatcttcttcactgattactcctcaagccattaaagcagccacatcagaaaggtcttcagagcctgaggtgtcaacaagtagattgtcatccaaattaccatccacaatcttgatattatcctcatctaccttgacaacttggacatgccgatttaatatatgtacggctttggccggcatcaaacccaaatctttcatcttgattaattggccaataatagaattagaatggtatgaactacagaagaaactacataatcggctgaaattaccatagttcagttctatccttgcagcaatcatttcttctagtatccattgtacctttctgttatctttctctttacagaaaccacagagcattatattataagtatatacattaggagctataccaacctccttcatctggctatacaatgaccaaacctcttcagttctaccaccccttaaaagtccatggatagccaccgtatatgatacaacatcaagtgggtagccatcttcaactaccttcctaaatgctctaatggctccatgagacttccctgcttttattagcccatcgacaactattgtatggatatgaggatcttgagtgtggtagttcagcaaaatccagtggtacacattaatagcttggtcaattcttcttgatctacacagcccacttagtaaagccgcaaaagtatactcgtctggctgtaaacctctgtcttgcatatcgtcatacaacttaatagcaaggcatggaaacccagccttacaaaagtaacttaaaagtgagttacataacttttggtcagcttcaactacaagtccagagactaacttcagcacaagagaaaacctcccagataaacataatggggataacaaagaacaaaaagtgtaacaatctggggctatttttcgtttcaacatatcatcaaaaacatcaatggcatcgtcatatctccccaactttgtaaatcggtcaagtagtacattacaaagaaccaaatcaggactgaaccctctagattccattaggtgtaatataattaaagcatcattaaccatattggatttcaaaaatcctcttattaaacttgtatatgttacaacagtaggagataaaccagcctcaaccatctttcctaacaattctattgccatatcaaatcttctcagtctacaaaacccatcaatcagtatactccaaatatttatagacacagggactccaaaagcaatcattagacccaatacttgatatgcttcaactaacttacccactttacaaaagcaacttaatatcttttcatacgtctccaaattcagataaaaccccattcgtaacatcttcctaaaagtctctgtaacaagaaacaattctttcaaactacacaaattacacaatgcaatattaaaggtcaaaaaattaggggcttcagtttccctccaaactttaatagctgactcaacatgaccagttttgaacaacacatcaatgatagcattgcgtgcaaatgtgtttggtgtaaaaccattgctagacatttcatcgaacacctcaagtaccaaattattcatccctccattccaacaaatcctcaacaaaagcaaaaacgtactagctttagcaagagacccaatattctccagctcccaaacaacccttttcactgttttgtacctttccacgagacggcttaccactccaaccatatgctcaatggttactctatcatgaaaaaaattaggctttttggcacaccacaagaagaaactcaaggaaatcaaatcagatgaacaattcaataatgtggaatgtaccgaacaataacttagagtaactttcctcccgtcgagaaaatcttctcgaccaagattttccctgaaaattttatgggtagtgtgagttgcacataccttttgcgatgacaggtaacgatttgacataaagggtagcaatgaaaacatcattttttggggtgccttccatgaatgccgccacaacattttctttgcccggaaagttgaaagcgacggcatccccctaaaatggaggatatattgaaacgtaaaaaaagaaggaatagcaggataaggtggtagactccattttagcaaacaagaaaatatggagaagtgaatgacacacctcagtcacagagactcagagagattaaacttagctgcagagagactggggaagaaatgaaaacacaaaacgcaggaataccaatcgggccgggttgggcccgaccggcatggatccgaccctgccccaatacctttttggcacgatctggcccggtcctaccacttcatttagtctggcgggtcaagcccagcccggcccggccaaagcaggtcagtcctgacccggccttttatattttattagttttaaaaaaaaaaaaaattcatttggtgatgatcaaaagaattgttggactcattactaaaattgcacatattatttagcatcaacagaaattatattaataaagtatttgcataaaccctatcaaaaaatgaaccaagtataaaaaaaatataaccttgttttgattagtgagatgaaatttatgttggtttgacacttgaccaaatcagattaaactatggaaaaaaattgaaattagaatgaactaaattatatatgggttgttgttttggtatatataagattctttttaggtgggaacatcacttttactctcataagtgaaattagaatgaactaaattatatatgagttgttgttttggtatatataatatataagattttttttaggtgggagtatcacttttttactttcataagtgtattttttaaacctttaatttttaatctgatagtaatagtttgttgtagtttatttcgttattggtgaccgaggttttcgacaaccaattaaatgagataatgatgagagctttggaataattaatgcaggtggtttttacatggttcgggcattaatgagtcgtagtccacaagtcttttgtattaatgagagttcttatatagagaatgttcttggtgagttctctctctcttgtttttt

SEQ ID NO: 266831 - DNA, 2501 bp, Cannabis indica
aagttagttgacatttttgaataaatattttggtttgttaaaaacctaattttttaaatttataggtttaattttaaattaattaattatttaattttattattttcgtaaataataatttattttttagatttttcgaaaataatttaattatttaattaatttaaattaaataaatctatatacaactttctagtttgttgcatgtgtgtgttttatatattatttattattaaaatttgtttctataaaaaaatattattgtttgatcaaaattgttatggttgacttgttgacagatccaataatctgattttaaccaatatttcattaactgtcaataggtcaaataaataatttataacaggtaaattttacaatcttgtgaatatatatataaactgtcagtatgtgcctgacatttgaccactcaagttatgaatgttatataactgccacggcttagggctggaattgtgacagtagtaatagtattaattgtataactttataatgtattagagtacaatgagtacaattaaaacattaattatacgtaccaaatataatatttgtcgatttttatgacaaatttgccacgtgaagcatagagatggttaaatatcaattttactagtatattgactgagacaaagtttgcagtaaaggactaagattttacaaatgaaattacattttggttgccatttccaagacctttcatgtttacttaattatagaaatgttatttgttaatgttatatataaatctgattaaaagtgggaactaccagaatcttctgcgatggagaaatagtgaccagtatttaagctaggatcagtagtattaataacttgcatgggagactttgatgagttgatcatgaagaactttttgttggtcttttttggtgctcaaatatcatttgaagttgcttcccttgtttttcaaccatcaactgcagatcttgttgaatctgataattaaccataagaaattcaagttgctcagttaattattagatatacttgagtattcaaattgtatatgaaatatatatatatatctatatattatatatatacttctattcaaattgagcaatatatatatatgtagtttaatataaataaaacatggatttgttagctgttaataattaattattgagagccagacctctaattgttcttgaagtctcttattgacttgttttattgactccgtgatttgtattaatccactgcaatagtacaaataaaaatccagtacgtaaaccaaagagacgattttgaagttttctttatatagtgagattatatatacacacaaatagttttttttttttttctttttatatgaagatcaaaagtgatgtaattactaattagttgattgcattcattattatatatcatataatattgtttgtgaaatttgagtcatcatgtttaaatgtaaagcatgatctaaattaacccattcataattaaacatataactcaaatacttattattccacctaaatttaaaaatatctcatttcaacttcctccacatcatctcatcttcctcttattctctatatgatctctctcccattcaagactacctaaactcaccaccacgcgccactcatcaccgcccacctctcattttcttgctctctgctgtttgtacatggaaataatgaatgttgaatgttgatgtatgcttgtaattggttccaatttgcaagtaataaaaattatcttatttaccaaaacaaaaaaaaaaaaaaaaatgcattactctagcttagcacaagtatctatgcattttgtacctacattttcatatccaactgaggcgtgtcacaagaagtaaatctcttattatcaacttttcctgcaataataacaagcttacagtcatatatacatatataagaaaaaaatattttaggagtgtttttatttttatacttttaaagcatttttttctttctaagatgagctataacagtcttaaaatatttattatgcatgcatgttgctaatataattatttagcgatttacggacgtaccctttgtatattcttcgaaatactttgaacatcgatatttctacaagtatgaggaaaggttattataatttataaatatatgtataaatataaatttatattaattatttagaaaaaaaagaacatatataatggtgagaaaattagtatatagttagaaattaagaaacaagtgcttttgggtacctgcaaatgactcttgacatgatagatggtcaacatctttgagttcattagttttagtactcctcttggggttgcctctttcacaacataagctttactagtttagctccaaattaattaagtttgaattttcaatttgtcaaaaagataagaaattaaaaaaatgaagaaataaaaaactaaggactaactctttgttctaatcaaagttttttttttctaaaaaatattctcatttggaatgcat

SEQ ID NO: 266832 - DNA, 1739 bp, Cannabis indica
aaattaaagccataagatccgactggggtggtgaatatgatgccttctcggacttagttactgaaaatggtattgtttttcaacactcttgtcctcacacctcggctcaaaatggtagagccgagaggaaacatagacacatagtcgagatgggcctaacactacttgcacaagcaagtatgccattaaagtattggtcagatgctttcttcacagctgtatacttgataaatagactcccaacaactgttttggcaggtaaatcaccatatgaaactttgtttgataaaattcctgattacaagtttcttaaggtgtttggggttgcatgttttccgtgtctaagaacatatcaaacacacaaattcgagtttcattcggtcaagtgtgtgaatttgggatatagtgaaacttacaaaggttacaagtgtttgagtccacacggtagaatatacatttctagacatgttatatttaatgaaaacgagttccctttcaaggaagggttcttgaataactaccaaaaagaaaacatagtcacccttccaacaccacaatcttggtatgtactgccctttgtgtcaccaacaacagccccatacacctcttctcagtcacaacagccagcaccttcagtagaaccatcctctcccgtcactgcagcaacaccagaagagagaaatgttcgagacattgagcctggttcaccagtttctaactcaccagatgttactgttagtgttactaatgagcaggtacagccgttggttgaaaatttgcctctaactcgtccaacacctccacggcatcccatgataaccagggctcgtgctggtatcttcaagccgaaagtgtatcttggacaaacaaagtttgatttatctctgcatgaaccttattcggttgatgacgcactcaagcacagtgggtggaacaaggctatgagtgtggaaattgttgctcttctcaagaatggaacttgggttctcgtaccacctgatgaagctcactccgttgttggctgcaagtgggtgttcaagatcaaatataacgctgatggtagcttccaaaaattcaaggcgagacttgtagcaaagggcttccaccagcggccaggggtggatttcaaagagaccttcagtccggtcattaaggcttcgacagttcgagttgttttaacactggcagtgacaaaaggatgggagataaggcaaatcgatatcaataacgccttccttaatggcattcttgaggaggatgtttttatgacacaacccccgggtttcgaagacccttcaaaaccaggctttgtgtgtaaactgaagaagtcgatttatggcttgagacaagcgccaagatcccggtatgatcagttaaagaaaacgctcatcgattggggtttcagcaactctaaagcagattcatccttgtttatgctacaacaccccaaatatgtcctcatggtgttggtgtatgtcgatgacataataataactgggagttgtggcagggaaataaatgcctttatttccaaactagacaagagttttgcattgaaagatttggggcccgttgaattattttctcggaatagaagttttcagagacaacactggtatttacttgtctcaagcaaagtatatatcagaactcttgcagaaacacaatatgatgaatgtgaagccgtgtctactcctatgacagcagggaagccactgtccataagcgatggtgagttg

SEQ ID NO: 266833 - DNA, 1193 bp, Cannabis indica
ggaagcttcactgcagctgagtactttcgatatgtggggtggattgttgataagttttcgggttcagatcgaaagcgcgaaaagatatttcaagaattggatggtttcttccaaagggtaattgatgttcatgtaaactcatggaagaaaaaaaaaaggaaaaggaagacattattgatgtacttttgagaattataaaggagcaaactaggataggagcttttaattatttatcttatttggttagtttgtgaattgttgcaagtctatgaactcttagcacttggattcaagaagactaattaaaattatgtaaggacaattctgaattttcaatttgtttttggataaattcctatgcagtacatgtttataactagtttatttacccaataaatattttttagtgcagaatatatatatttttaggtggggtaaacgctggtgcaattaccatggagtgggcaatggcagagctagcaaagagacctaaaatgatgaagaaggcacaagatgaagttagaacttgcattggaaacaaaggaaaagtctcagaaactgacattgatcagcttcaatacctcaaaatgattgtcaaagaaactcttaggctgaacccacctgctcctctgcttctccccaaagaaaccatatcacatgtcactatcaatggatatgagattaagccaaaacaatgctccaagtgaatgtttgggcaattggacaagaccccagaagctggaaggatcttgaagagtttatccctgagaggtttttggacaactccattaatttgaaaggtcaacatttcgagatgctgccatttggttcagggcgaagggcgtgtcctgccattcatatcggaaccacaatggttgagcttggccttgcaaatctcttatacagctttgagtggaaattgcctgttggaatgaaagtgcaagatatcaacatggatgagtttgctggtcattctcttaccatctccaagagaactgctcgcaacatggatgagtttgctggtcattctcttacattgaggccactatagaagaacaaaacattttttaccgtaaatttctgacatttttttaaataaaatgattttttttaaaatactcttttttttatgtgttatttataattttacgtcttaaaatttttaattacaaaaatatactttgtttagcaaa

SEQ ID NO: 266834 - DNA, 4167 bp, Cannabis indica
tattttatttattttttagaaaaggtcatgtataaggtcaattttagcaacccatagattcatttggaacatcttgttttattattttttagacataactaagggtcaaaaacacatgttctgatgttttaggttgctggtaaaaaaacatggatccttggaattgcacatcttctgttggtgtgccttctttcgagaaggcacctcgtaaattttctaatcaggtgcctgagaagactcaattggagattgtagagagagctagttgccatgctgctgctgagactaaagtagatgtggaccttggagaagtttactttttgattttgcactttctatcttttgggccatgcaagaggacttttacacaattcttgggtgagcttatggagaatcagctcttgcctagaagatatcacgcttggttttcaaggggtggtatatctagtggggatgcaagtgatgatggtgtatccttccctttgacttatgataaactcatggagaggtatgcatgtagtctaatataaccatggtgtttttttcagttatgcttctctactcttaaattgtattcgttattgtgtattgtgatttcacatttcagtgttgtttactcggtttatattagagtatgccagattcaaagttttctttcatttttgtagtttcttaaaatgatcaattactaaagcttctcggagattcaaacttgcaacttcctgaagagggggtgtttggtaacattatgctataatgtctatgaccacaatttctaaacttcttttaggaagatatatttggaaatgtcttacaactctatcacaacagttcggcatccttaagtgccatattattagaaggacatcctctcaagattgagaagtcacaaaaatcacgtcaaaatgcattttctttttaagatctttatttttgaatgacaagtcatttattctatttgtaggtatcctcatgtagagaaggaccacttgctgaagcttttgaaacaattgatggcaattgaatgctctccgttgcatggcaaggttatgcctaatgcagctgatgtccctacgttactgggaacgggttctttttcgcttgtagattgtatgtgatgtcttactgatatttccccttaatcttattggttctttcattgctgttgttgtcctcattggtttctattttgaatatctatttatacttttggatgtttattcttgcatgattaaagattttagaaataggtcaaatatctttattaattacttgtagttgcttttgatttgtcaggatatgtcttcatcaaaactttagtttgtgtatccacattcaaatttcattaagctagagggttcagaagtagacaaacattccatagattatagtagtaatttgtttgataattagggaggatggctccattaagctaagcacaatgggtttttcctttctttctctttcaattctatgctcccactaatgtctttaaacttatttgaaatttattgtacattttgaattctattatagtatcagctgtccttggttttcttctggtttgaataaagtaaagactagatcgactgatagtatccattttagagttgtctcattatttacatatagtgacaacttgggtttaattttgtacatcactataacatggaatacaagataaaaactttccttatgctttatgacatgagtactgcaagctttacaactgctctatgttccctataaaattacataggcttacataataattgttcagtttttctacataatcaccttgtcataacttaaatttttttttggctttccagactcattcattgtcatgcagttcccacagttttacaccaatatgatgttttgtttgttgaatcacttttagggatgaaatgaaagtgtctgaagatagtctattcatgtgtttagtttgggagaagaaattagggatagccctggttttttcttatggagttgctatttataaatgatttgcatgctgtggaatatgggagttggtggagtttgtaatctcatttctataaaatgttgtattacttagttaccgttttgcctaactattattatatatctgatgtcaatgatgtattgaagataacgtttttgcaatccaaaattctcaaagaaaataaaaaacatgtagatttacaacagttaatcaaacatattccatacacttattccacagttcaactgaacattgaaattcttttatattcctatcttaacccatacttccaactaacaccactgtactattgacttttctgtaaaccttatcattcctgtttatgcaggtgataagaatgtgacaaataagcatggtaagcctctgccagcttatttacattggcctcacatgcaagctgggcaagtgcgtgggcttggtttgagggaaattggaggaggttttacaaagcatcatcgtgccccatctattcgttctgcatgttatgccattgctaaaccatcgactatgctgcaaaagatgcaaaacataaagaagctaagagggcatcgtactgctgtttattgtggtactgttttatcaaccaaactattcatcaacattttataattctgaggacccatttgtatttgagctttgttcaatatcattcctaaattgcttgttaggatgaggggtacattattttgaacatgccaatggcgttatcttggttctgaaaaattccattcctttagtacctgcactagttaatgtattcttagggtttttgaaaatcatttggacaatagattgttcctactcctatggtttttcttagcaatgttcggtatttacttgagcacttgtttcattacataatgtaactctaggagtttgtattagttatttgaagaaagatgatatataatttagctgtaccaaaggaatttgcttgtgtcatgcagccatatttgaccgatcaggaagatatgttataactggttcagatgatcgtcttgtcaagatttggtcaatggaaactgcactttgcttggccagctgtcgtggacatgaagtaataattgtccacatcacctagagaacttttttatttcttataatttgaatgtagccttcatcattttcttgaaatataaccatatgttatctctttttttttttgttcctttaaatttcaaaagggtgatatcacagacttggctgtgagttcaaacaatgttttggtggcatctggctcaaatgattttgtcattcgagtggtatgtatcttgcctttgcataaccatctctgtttcatattggatcatcactaaaaatgtctctaaatgtctctcttcctacagtggcgcttgccagatggaatgccagtatcaattttacgggggcacactggagctgtaactgcaattgcatttagtcccaggccgagtgctgtgtatcagcttttatcgtaagccacatcatgaatctttttaatatatgctgttgcttctgtttagttctttcactgctatacgtgaagatatatgtgtgtgattttttaaagtgaatgttctgaaacagtattgttagtcccagagttttcaggtttttgtcaaaatattgctctgtcttatgactcttaacaatattcttttgatgcatttcgtgtttttgattatcacattatcgccttcgcagaaacagagtgatgttaccatacttgaagaagcatcattaatacctattcttctttttatgacctttgtagttcttcagatgatggaacttgtcgaatctgggatgctaggttttcacattgtaaaccacgaatataccaaccaaaacctgcagatgctttagccggtcagttcatcaattctatagtgttttgtaatgataactgttagattgttccctttcgtcaaactaggatgtttactcattactgcaggaaagagtattgtttcattgaattctggaccctcttcggttagtggttcacaaaaccatcaaatactttgctgtgcttacaatgccgacggaactgtttttgtaactggtagctctgacacctttgcaagggtatgtttagtaataatatgttccgcagttacttaatatggttcttgttggtaccatgggctttgcttacattaatctgtattataatgttt

SEQ ID NO: 266835 - DNA, 3696 bp, Cannabis indica
ctttttctctttgttttctttttccttctacaaattttgattttccattatgattatgattttttattatgaaaaattatgattttttttattacttacctaaaaagttgaaagctctaccaattccaattcagctaaaaactgcttttgcaattttttttctttatgttttttaaggtaattggtaaattttgtgtttggaatgattaaatttatcaaaaagaatttttatttgttttacacattaaaatattaagttaaaattatttaaaatttttaccccctaaactattaccactattaaattgtgccatctaaatgtttttgtctattctcttgaattattcacaatcctgaaatatacgactttgttaagttttatcttgaggaaattatattacatacctctattgaattattgcctttaacttttactctctttcaaaatctattatatttacctattttttaatcataaaactaattttacccctatcacttcctgatagtctttatttttctctaatcaaaattttacccttactttcccacaattttacacatccctctccaaagaacacaatctattatgtttgaaattatgtattagttatatgagagcatgtgaaaataatttgagtacaatactcataaaaagaagtatatttgaattaaattttatttaaaaataaatttagttaatatataaaaaaggagtatttttgaaggtctctcaaatattaattaatatagttaatatataattgtctaccacatgttttttgttttgaaatttgttatggcttctttttgatgtcaatgtaatttcctaaaaaaataattttcaattattaaaaaaaataaagcatttttaatagatatatttgaataaattagagatgaacaataattggaagtatatctaatgtaggatgtggctatatacatgggaaacaagtgattcgatccaaaacatgtgactatgcttgtttggataatgttaggtctattaatcactttataccttcactattattattgtacactattatgacaagtcatgatcatcacctcctatgtaaaaatgtgttatttataaccaaatatcaatttttttttcttttcttttttcgaaagacaatgaaaaatttcattaatagttaaataaaacatagattaaggatacaaaattaacaaatataggtaactagagttgttaacaatgaaaagataaagacaaccctaaatgcaacctcaactaaaagataaagaaagtacaagcaattaagaatccaacaagtgcaaagccaactagagtcacttttcaaatgagctaatgatagatcaaactcaccaatgacaattcacacatattcttctaaaagaattagggaaaaaacatacctattaattatctaaataagaaataacgagtaaaagacactaccaaccatgtaaactcttttgatactaaagatctaaagttcacataatagagggttagaagatacccaataatcatcttgatcacacaaacaagaacaaaaaatgatacccccgcagccaaacaacatattacagaatcaccaccattctttctcgcgataatatataactgctaaaataacagggtagtagaaaaattctactcttattttaacaatgaagcaaaaacaacaataattaacataaaatattgcaagcaacatggtagattttgaagactagtgttcctcttcgcccacccacaaccaatacaaaatgttaaatacaaagaaaaataaaaaagttaattcaagaattagaattaagagtctttagatcaaggatttaaaaaaagcaacatttatattaaggttttttgtgtgaaagtgagagaattttctttgttgagagcatgaaaaatgatgacgaaaagttcattgttacattaaaaaatataagaaatgatcttatttagggccagtcttaagatatatgtgacttaagacaaaattaaattttgaaatccttatataaacagtttaatcattattcaaacaatatcacatttaatatctctaaaaaaatagtaacaaagtagaagttaagagttgatcccttaaaaatgactctctttaccattatgctaaacatattctgatatattcccttactatttaatattcatgtgtatactaataattttttttcataattttgggactttgggcgttcaggggcccaaggcacacgcgttgctcacctctccttagggctgacccttatcttattgaatatgtattgtgtgatacatgaatatattaataatacttgaatatgtttgaatgaattattagaagaggaaatactccttatataggagaaaattataacagaatcacggacagaacatttagttataactaacctgatagtagatgcaacaactaactgaaaagaacatgactagcctaacctctaactcctaatactctcccttaatgtgaagttcacaaatttgttacactcatcttggtgaacactaaaaacataggatagaggtattagaagatccaagtgctactacgctgattgaactttgtcttggaactcttagttcttgaaagcaatggattaggagccataatagatcttctggttaagttggaaattttgaatttgatggtattttcggcttgaatctattggtgttggatgtgatgaatttctatttaatctttagtcacgtctgtttgatctttagttacatctagaatctctagtgccaaagaaataataaacgttttgggcatgttgaaccttgttgtgatgaacatttgctagattgtctgttgcatatgattgatctatagttacatttgtaggatctccagggccaaagaaacaagaatcatcttgggcaggtcaaaccttgtgttgatgaacatttgctggagcagcaataacttttatgggataactagttatctcagtttgatctctagcacctaagaaccaatatttttggggaggtcgatgatagacgagatagtactatagggtttttagttatatttatctgatctctagttatatatgacggatctctagtgcctacaaatttttgaataggtcaattacgatggattatggtcagaccttcatcgtgaattacaaaggtagacttgagatagcctgtaagcatggctgattatttcatggatggagcatgagtcatagtgattgccgatagttgatagtcgatagaatggacgagacaaggtaagaatgagagaatacaaaaaaatgtggtgttgccatcgaagctttgacgaagatgttaggtgtacaatcaaagttccacattggctaaaaatatgaaagttcttgggtatataaggatatacactatctctattgaaatgagactttttgagaaggtgcccaaaaataaattcgtgagggcttaggcctaaaacaaacaatattataccaatatgaagatagatggtgtctgatgatcctaacaagtggtattagagctagatctcaaattattcatgtcaatgaattgccaaacaaaagaggtgaagcttgctactagagccatcgaaggtttagatatgatttgaagggagttcaaatctagctagtgaagaattcatctaccttactcaagggaatcttgagtgttggaattgagattgttaattc

SEQ ID NO: 266836 - DNA, 736 bp, Cannabis indica
aatcaaagtaagaaaattaaaaaactaatgtagaagctgctatatattaatattgctatttacagtgaagaaaaatggtcgaaaaattggtatgaaaatgagttatgattattaagggttgaaaatgaagttgccacatttgcatttccaactcattggcttgtagttagagttgtaatcatctcctcctctagcgtattgggtgttgaaagatcttttggaagtaccagatttcacttgtggatttgttggaacctgaatagcttcacagtgtccacaccaactacatcttctttcacacctcggaggcctcgaaccaattcttgctcttaccatcactttctcttcattttcactttcacttactgcctatccatatatatatacatatcaaaccaaaacatgtatttttctttcagtttcaaaataaataagaacaaatgaaataatggagataagtgaggctggtttaattctcacctgggaaagatttttctctttgggaattactctgcctgcaattacatgcaaaagagaatatattgtttagtagtagtgttgttgttatgatgaaataaataattaacattaaatattttggatttttgagtctgacccacttaccttgagccatgaatctgaattgggtagagctcagaaatgagagaaacagaaaacaaatgaccaaataacgaactctgctacggtggctactgcatacgacactactactcac

SEQ ID NO: 266837 - DNA, 768 bp, Cannabis indica
aatcacgtaatacgcctatgctagttagggtgttacattgacctaagccaccttcgccccgcctaacaaccagccatgaacttcgagcgttccctgtggccatacttttccaatggcctcatatacagagctctcacaaatttcttctcacacccaactcttttttatttcaagagcaacaacatcatatgataatttcttaactctactttatctatctttaatgtgcttttcttgtgtttatatttagcttttctgtttattgtgattaatctaggttgtatgttttggtgaaatttcttagcattttgattttttttctccatacattttgtgcccatctttattaattaggtgttgtcatatgctttggtgtatgttttgattctgaatttgttgagtgctagggctattcgtgtcttgttcttagtaattcataatttttgtctttgcttgttggaataggtgccatacactagacgtctcaaactttgggagtgtggtctgttcattattttcttaaacacatcatttttaccttacctccttaaacaccttgatctatctaagatatgcattaatttgagagaaagtgagaggcgtgtgaggatttgtggagtctttggtgccatcatgtcatatattcatattcttagtggcaacattggggacaatgttgggtttaagtttgcgggagagtgtatgtttattgccacttttatatatgtattgattcatgattaaaaaaaaggagagagagagataaat

SEQ ID NO: 266838 - DNA, 1077 bp, Cannabis indica
cgcttaaataaaaaaaaaataggttatattcttcatcacaaataaaaattgtaatttgtcacaaacacttaaaatcctagactattaggtgaatagtgatgacggtagattagttgtaatgtgattaatgtttttaaattttaaaaaattgaatatgtgattagttgagaatctcaaaattacaagataaaagaatatttgaaaaattttggattctatggattgaaaacatagaaaacataaaaatagtatttttcatgtttaacctcaaacttaaaataatattcagattttatttttaaaaatactcactccatcaagaattcttatgtaaactccaccattttaatttttaaaaacataaaacagttttcaaattctaaaccaataacattataatagaagtgttattttatttttttatttaatcacatcaaaataatctatatttaattactaaaactctatcttaaatttatagtttggtaactactttgtaatacaatgtgagacaaacacaaatttatctaacttattttttccaatgttaagaaagaaagaaaaagaaaaacaaagtgacagcaaagagaatagaatcaaaaagatataggaagaaacttaaaatagtagggacacagtttaccttaataacatatgtattatgtggaccaacaacagcccaaaccaggttgggttaaaggttaatcaatcacatgagtttaggaccgttttaatgggatcacatcacaatttggtgcatacaaacaaaaaaaaacaaaaattataattaattaatgcaattgacagaaaagctttgttcaattccctagaaactagaacactctttcctactttcattacatttaacaaatataaatgaaactataacatgaaaatgaatatttaaccattaattaatatttaatatttttatttttaacaaataataatgttaaaaaagagaaaaagggcatttcagatacagacacccactactcactactactattacccaccgtcactcttcatctttctcattattgtctactagaaagtagaattctctctctctctctc

SEQ ID NO: 266839 - DNA, 2871 bp, Cannabis indica
ataatttttggtggttgtggttttgttttttctgttgcaggtaaatgtaaaaacttgatttattgaatgatttgttgttccagattttattcctttggtatatttagaagaaaaattaacatatgattaaagtgaactaaaagatgcttcaaagtctcacgttgaagccacttcgctcatttttaacgattgaatagtgtatttagttttggttgtatgtgctaaaaagcaatatttaagtgaatttttactttttcataaacttttatttagttactacatctacttataaattttgtgtgagatattgaaaattatggtttgtttttcaatttgtttatatttttagcaaattgaaaatgaattaatattatattttcaatttccaagtattgatttattgtaataattatgttatttatacttttgtaaggaatattcgaattttagcaattgatatttaatttaaaaataacataaaatcaacaattttaaatagtaagagaagcaaacaacatttttacaactctataacaacttcaacaaaatggagtatactgttgactattagttttcaaatgcatgtaaaatatgaagcttgtgtcacctttaatttgtaatggcagtaagtacttttttatgtaatagtattagtatgtgtgttgttgtatcattataatatattacgtagtatatgaaagaaaaaaaaaaccctaaaataaagaaaaccacctaacagactctctaccagtaacttaaagtggaagagcctaaatttctttcatagagaagtttcaacaaattaccatagccactggcaaaaatccaagaatccttgaaatcagcagcaaacaaagctcgctcattcaatacacacctaactgacaaaaatgaaatcaaacacgcaaaaataaacctaaaccaaatataacaactttacaaaacaaaacaaaaattacacattattctagtatttctgaagaaatatgattgtgaattttaataagatcactgcaaaattactctaatattttttttaagagcaaaatcactctaaaagttgatatgtatttgtatatggaatttcttctatctgttaaaaaaaatgtaataggatttaggatatagacatgagcatggtaatctgaaaatggtctctgatcctctattatgtcattcatacattaaacaccgcatatgaaagtaatttgtatattctcagcagggaacaaatacataaaattgacgcattcataactactcaagttcatattaaattagatgatgtaaaagttcaaaactgaaccaaaaataacttcaacttggtggggaaaagttaagacaatgagttaacagattctagtgtgcgctaaaatcagaagccttgttgcaatcatacttgaatcaagacttatcttcttggtcactggaatctgacaaattactcatgtaagcttccaagagctcatttgaatcatctttaaacctgaatataaagttttgcaggaactcagcctccgtatgcaacaccatagagtaaaaactcggctctctcttgaataaccttttcgatttcaaaagctgtaaaaccttgtatcgaggaatcacccgttttttcatgctagacatcaatatccatggtgcgtgaatcaaccttgaccttttaagcttaactgtgttcaagtaaaaatcaactccaaatttcaatttctcaggggaggttctaaacagaagtggtgatcttctaaacatctctttacattcaccttcagaaaaacccaaactgcaaattaagtccaactttttcttacatgcctcatcactgattccactgactgcatagagaccatggggaaacattttagagccttttttaaaacccatatctgaaacctttgaaacaagctctttcagtttagaatcttccagagtgaaaatatgaggttgcctcttcattattaaagaaagctgaggaccaacaattccacaactctccagaaaagtacagttggccaacaacctttgtgggttccataaattccatctgcaactgaaaattcgaataaagtctttgttgtttccattatctccaaaaaaattcttaagaatctcaatacagggtactaactttttcttcaaactacgagtcaatacagttggattctttgaaatgaacttacccaactcaaaaccctcaattccaagctgctgaaaaacctcaatctttggtctgagagtcttgttaacatcagaaaacatgatctgggatgacacaaggatcatagactgtatatgtgttttagaaaatcctcgctcgagaaaaaatttgtgaactaattggggcttattgggtgacttgatcaatggatagcgattagatatggagagagcttgcattttggtaagtttgtaggtattaattaggcatatgacaaggtctgagttcgagctagtagttatagcgggtgaagatacagaagagaaatgatagagaaaactgctacatcggttataagagaattgttgcaatgtcacacgtgaagggaaacagaaatgagaaattaaacggttcagcattttcatcaaaagatgatgagataagagcttaaatcaagaaaactggactaatcaaccaaaacccaaccacaacacaagggccacaaccaacagaattccaaagcggccaaaactctcaccggtattttctcaaacacattgtatgcattgccgaactgattgcacttcagattcatacatcaaggccgcttggaaaaaaatacatcaaagcaaaacagggatttcatgttttgtgtgtaactgattagcatctgaaacggaaagcttaagcattattcaatcaaatccagtaca

SEQ ID NO: 266840 - DNA, 4293 bp, Cannabis indica
attattattattattaacaataatttgaaatttatttattttgtcaaaataggtgaccacactcaaataagaagataatcatttgtatggaccaaaatgcccatgcatgtttattcgttgaacgtggaacgaagaaaaacaaatataaataatctacatgcttcagtcaagtcaacgccggtgttctttaggaacaaagtagtatcattataaatagagaataatattgatattacacataaatagtgattaccacctctatgttaaaattatttaattaaaatactcaatatttaattaaactaatagtgatattaatatataagatgattctaagtactaccgttgtgtcttttagtattttttttttaaagagaattgctaaaaggtagcactaatatcaccctcttcgatgtaatattgttattagtgtaattaagtatcaagtctcgtataacttaacaaaataacttttaagaaatatcgctaattaatcgtaggacgtcacttataacaaatattaggcactattactcaatagtaatactcttataaatatataagttttttctttttttttataaaccctcttaactattaatccacttgcacttaaccttttaagctttaattttaacggtaaaactctccaaattatttaattgttagcaaatttaaggtattattcatttttcattgttaactgtcaacatagattgcttatgtattcaacattttacatatgacacatttatattaatacatctaatattattatttaaaaaatataaaaattatttcaaattttataatatttttttatcttttaaatattttatgatttgatttaattttaaaataaattttgtaaaaaaattttaaataataatatattatgagtattaatataaatgtgtcatgtgtacaagaatatacacacaaataatttatagtagcaattaataccttaaatttactattggtctagtaatttgaaaaattttaccaataaaatttaaatttaaaaaattaaatataagtgaaacaataattaaaaagatttagccaacaaaaattacatctctttccttgtccctttcaagttatatttgtttatttttcttattataattccagaacaccgcgtagtaatatgtcttacacgaatcaaacaaaatctttttacaaaaataataataattaaccaaagcccattacttattaaccatatatttgatgaccccatcaaataatatatgcattattatatatgatttcaaaggcagtgcttggaatttcaaagttggagacaattccaatcttcattgccctgtttttgcttcttttccaagtcgtgcattgtttgcttggtcagaaagtcaaagcttttaacaggacaaggtctttgttttctgttcctcttatattccctctctctcttttccttcattaaaagatttcatttctttctctctcaacttctaaaaatcataaccccttatttcagttaattgagttcagtttgattcttactctgtttagtgtttatgttattgaatttgaggctattaaactcttcatttgatttgactttagtcaaccctttctagctctgttatagtttttttgatcaactctggattttgatcttttttttttaatcaatggatgggtcacaaggtagttctactgcaccagcaccatttctaactaaaacatatgaattggttgaagaaccaatgacagacaacattgtatcttggagtcaaaatggttgcagttttgttgtatggaatccaactgagttttctaaagatttgcttcctatgtatttcaagcacaataacttttccagctttgtcagacaacttaacacttatgtaagtaatctctacctttatcacttttcattgaacactcttctatcaattgcagataactatatggcttgctagtgctactaccattctgtaatggattattagttgatgcatggatattataaaagtttaatatgaataattaggatttttgtcgcctgaactattactactactatctgattcaaatcaaaggcgtgtaatttggtagtagtaatagttcaaggaaattcaaatcaatgtaaaacaattggggacacaatttggtagtagctacacaggagtgaaatttctattctatgtagtcttttacatgtgtttctatagagtctgaggttgcacctaatgttttcttatgtgttgtgtttgagcaggggtttaggaagattgatcctgatcaatgggagtttgcaaatgaagaatttattagaggacaaagacatcttttgaagaacattcataggcgaaaaccgattcatagtcattcgatacacaatcaagtgaattctgttcctttaaccgatacagaaagatatgagtatgagaaagaaatcaaaagactaaaaaatgagaagaattctcttcagttgacactacagatgcatgaaagagaaaaacaagagtttgagcttcaaaaacagtctctaaataaccgatttcaaaccatggaacagaggcaaatgcagctgatgtcctccttagctgaactaatgcagaaaccatcatttgcttctatacttatgcaacattcagataatcacaacaagaagagaaggttgttgaattcttctagtaaccattcagatgaatccaatatagacgaaaactcgaattggaatcaagaagacacaaagctgaaccacattgagaagcttgaagggtctatagagttttgggagagttttctatacagaattggtgaagagttcaacagtgttgctggtgtgttctcacaagcctctcctatgattgacacagaaatagtacaacatgttgagctcaacttctgcagatcatgttcacctttgtcacacccatcttcaccgaactcattcgataataataataataatgttcattcatctcccgaggcgcctggctcgcccattaatcatcttgacattgccaacatattctcaatatgtcttgatgctgttgacaccacaccgaaatcttcaaagctcgatatgaactcgagccccgcttgtggtgctgaagttgaggcctctaaggaagaagaagatgttggtgtaactgaggtttcgcctgctaaggttaatgatttcttctgggaacaatgcttgacagagaccccccctgcctcttctgatttacatgaaatccaaccggagagagttcaaatcgatgagagctcgaatggaagcaaggctgcaactcacaagacaaattggtggaacatgaatagtaacaacaacacaacacaaagagggcatctcacttcagctaactaattttcagttaaatgccatttcatatttgatagtgttctcatgatgatgatggttggttgtatgataattgttagtgttataatgatgagactatgttaagaaggcattagataggtttttagacattgcatttttgtagcaaaaagactttagacatattcatttgattttatgtaagtattattgtggattctgatgttagattgtaaatattactttttttttctttagacttgttcatgtgaaatttctcaaactaaatgttaaaatttgtaaaataatcttatttaatttactctatgcgactattatgattgtaccgtataaatctatactcggtttgcaaccttaaaggtcgttcatgatcatttctgcaactatacaagattattttactaataaattttttggaaaattattttattaataaaaaaaattcataaacactatttttacaaaatatgttcatctctttcctgttgtatttttctttgattacatttagatacttgaaaatctttgttgaaacaaaattttcattctagtggttgtgaatgaatgacctttgtattcacgtgtttgatattgtctaatatgtttgaacaaatttacaaatcaccatcgtttttggttataagaatattcagttataagttttggttcaaaatttccaatatataatgaaagaagcttcctacaaccattaatccagtccaaacatgtcttctttgtctatctattttctattttttaacataaacacaaagaagaaaagatttttctaaattttggaacctttgactgggtggatgccctaaacatattagtcaccacaacctcatttgggtgggattatgctaagcttttgatgtgttagtaagagttttatttggtgagttttagtaaagaggagttaagattaagagaaggagatttttcat

SEQ ID NO: 266841 - DNA, 4918 bp, Cannabis indica
aaaaattctaaataggatattcacctcaataaattttaaataaaatcattcacctcaaaaatttcaagtgatgtcttttaccttaaaatctcaaaggatgttttcttatcttaaaaatttcaagtgagatcatttacttcaaaatatcaaactaagttagttcttcaaaaaattatttaatttgtaattggaacgaaaaggtgtttcatttagataaaagtattgcaattaaattaagaagttattcttataatataaataaaatttatgttataaatttgtcatgaaatctataagccgaacctggagactagggtgagtaccattttatatggtctggaaaggccttaacagccccaaattctattaatacaagcaaagagttttgagggctcaacctcatgaatgaatgtaatctaaatccaactaatatacagaatcaaagaatgggtctttcatgataatgtttctgtcataaatcagtgtagttaagcaatcaaaactgttgttatactataaattgattttgatttcatggatacttgatagcacaaaccaaaaagggggaaaagtatgtttaccttagatctgattttgactacacgccagtgatttctgccattctcaaaataagctagcaaatgggaaaaaaaaatcaaaacaaaaaatctatccaaggaagcatgtaccagaaactccctatttaatagcagcaaaagcagcagaggtaacagctgcctctgctattaaggagactggctgacgagcctgcaggcaagctccaatgtcaaaagggtgtaactcagagccatcaaaaataagattaacaccaggaaggacaacttctctgttatcaggctcttcttgctcaactttcgttgtgatcatccctgaaggtgattcttcaattggccttgtagcagcctcatacacaggtgctaaacaatatgatctaaggatactcccatcaaagctcaacacttcagttcggcaacgatttctgttagccagttttaatctctgatgttcgctcaaggctcctgaaatgggagaagaaggatccacaagtggattccaccttccacttgcataattcatgagatgttgtcgagatggctccttgtttgatttctctttctggtaaagaagttttgctgcatgaccagttgcttgatactctgcacaaatatctctcagtctctttcttaggctttgcattgcatcatgatgctcgtgtagtgaatctgcttgaagtaattgagatgatacaacccttttgcatatatcgttgcataattttggactgaaaagtggaacaccaaattccacacttagcggaacccattcatacttttcctcatcaggagaaaactgttccgactctttttccttgaaaagtttcagaagccgaatataaccaactgtccacaactccatactgttagccaaatcagcaaacaaatagttaagcttattactttcctcttcactcagccccatttccttctctacacgagcagttgaaccatcagaattcttcagcggcaatggaatatccagagtaacaactcgtccagattcatcaaggtcgtacttgctgagtggctgcactaacacagcagtgtgtttcagaagtgaatttaagcagtgtaaaagtatacctccctactaaatttccttcaaacttgccccccaagcctcctactgtagaaccatcccaagaccatatgagagccttctcacaaccagccaatggtgcaggaagtaagcgcaagcattgccctttcattagaacaacagatagaggaccacaagccacagttgtgtacagcaccaacttcatccaaggcgtcatagatgagtgagagggaggaccaaaatgaacagggaacgttggtccagggagaatcgatgaatgtggaagtggaataatagacacaacaatatcatagtcacgtaaaaacaacctttctaaagttgtgggtgcaagagatgccaagctttcgcaacgaagtatatctacccgatatttctttatcttctttgacaattcttttccatttacatctgatccttcaagagttatggattcagagacttcagttgagacctcagaatccatctgagacacctctttattaatgggatcatcaccactaggcccatcttggtccaagcctgcaggttctgatacgttctttaaggtaatatcagcaaccatagaagtagtttcctcattgcttgaagctatttcatttatattgttgaaaaactcatctgttttctcataagttgcaactccacctgactgaagacattctaaaacacaacgaagactagaagcatgatttgcgaattcctgaagttctccctcaaacttagctccctctaatgtactcaaatccttgcaaagatcagcaatgctagcatgaccaagttttcccgcttcatagagtgtcacagcatgagatttcaagcctggtgaaacagatcccatcataagatatgatgttatgttagcatcaacaatgaaggcaacacgaacatacattgaacctgctgctgccccatacttctctgctcctgaagaataagcttccccttccaaagcattattattatcaccatcaatgaaaatatctgatgagcttgcattagcttgggaagcctcttcatcactaagaatggttctaggagaacgaggcacacttgtttcttgaagaatagaagctggatcaatcactttctcagcccatcccaaccgacaagcaaaagatgcagcagcttggagctgtgaaagctcagcctgtaatgtcgtagcaagctcagcaacagttgcattttcgctagaaacaacgaacactgcatacaataactcctctataggatcttcataagactgttctctgtttgaaacaaacccttcaagccttgaaactttaaagcggtcatccgaataaacaggcacatcaaagtatatcaatcccctccgaaaaagacctttgataatgtctggatcaaacacaatatatgaattggcttcttccttgcaaactttatcaatggtggccaattcttcttccgagagtctcttaaattcctcaatgtaaagttcacaagacaaactccccaccatgattcaatctgtaaatccacaggatgagtaggtaaaagttcttttgcgattgatttgttaatcttccacataattttcttagatctgcacttattcattatatcaataaattcatttcttcctatacctgtaagtctcaatgcatctgcagcactgaaattgggaatgctatcataaggttgctcgttcttcatgacctcaaaaatcatatcgcagtagtatttgaaaggcgataccctcattacacggcaaacatactccgcaaggtgataaggaaacagagctaaattctttcgcaagtatcgcatcaaatcttcgtagtattcagtttctttgcatattttgcgagcaaaacaagcgttccattgaagtctttttttaatacaatgctcgacaacccttctgtgccattcttccttggaagataaagtggcttgaagccttttgggtaagctctcccaagggcattcctctttgattgctttcgattccaattgttcctcgatcgtcgctggaacacgctgcatccttgcttttaatcaatctgatcgcagaaactgaaagtgttagtaaatttgatcaagattttggattgagaggaagagatctgtgaatggaagatgaatgtgggttgttgtaaacgacaaatactctatcggtattggtatgcattttcctcaactgaatcctcagtattgggagactactcggtgtgggtggttaatacagatgaaacggtcactcagtcaaagcctaacataaagttgaacggacccccgatcggatctttccgacccaattgacaactcaacttgacccgcatcatatatttactcttccgcacgtagtgggatctgaaccagtggatcctttaacattttccatataataataagtgatgcgtaagtttaaatttccagatttttgtatttttctgacaataaaatctttcattgaactgaaagtttcttacttacttctattattgttccatcaaaaaatggacctatattgcatcggcccatttattactgggccggaccatgaagtactggaaaagcccaaacgcacaaatcgtagataacatataaattagggcagccgcccgaaaccggtccacttcgccgtcgagtgtgtttttgtttcgtaaaagaagaagatgagcggcaaacaaggccctccgaagcaccaaaacaaggttgcatggaaaccaaacgccggcgtcaaaatcaacgaaacggtgccgtttcattcttctccttctattaaagtacggaagtaaaatttagtgtatttatttatatgtattcttttcaggaagttggagggaggttcaggccgttatcggaggtcactggagtctgtcctcgctgtagagatcagattgagtggaaacgccgctacggaaagtataagggtcttactgaacctgctaaatggtatctttcgctctttttttctctggtgttttttgttttggtatattaatgtgattaatatacaattgaaatgtttcagccaaagttgtactaaacgagctgttcgccaagcttaccataatctctgcaatggttagtttcaattgtagtctgtttttgagtgaagcttaaatgggttttggatgtgctatctatgggagtttaatgggtttttgtcatgtcgtttttaggttgtgccaaggagcaaggtgtttgtgccaagtgtcgctgcaatgttaaacaaatagttggaaggttagttatgaatgtcgatacttacacctctttacagctggagtctgtc

SEQ ID NO: 266842 - DNA, 1943 bp, Cannabis indica
atttgttggtctatcaacacctttctctgtgtactatactatactatttggttttcttttcccttcacactaagtctttttcctattagctgttttgtcttgactcttgagatacggcaaaggatatgtcatttgtcaaattaatgcattgaatgaacacattacacttattaactattcatgccatttgacttcaaaacattatcatcactgatttttatctttttattagccactttaccaattacataatagatttgaatatgtctacttcatattattcatataatatgtatgctatatcttaaatggtgaaaccactacaacaaagaatggtctataattgttgtttgtttgttaatgcttttcttatagataatccataattaacaacaccaacaacaacatctattattattattatttattaaaaattcatataggaaattgcctttgtcattggcaaaacttgaaggtccattaatgtgacatctaaccaaacatatacaccaatttgagcttaaaagacattcacaaatgaattgaaaacctttccttttttacaattttgttgctaataatgattaagctatgcttaaacaaatccccatctccatctccatgtgaacgcatatataatagtttgttgtcttactgttaatcatcattatgcaatcattatcatggccatacacatatatacatatatactgtatatatatatatatatatcaaaggccccatctccacttactaaccctctaaccgaccttaattataatgccaaatgaccattttgaaaaatcaatggtgtcatttttagagtagcattaactataccaacaaacaaaatccaaagttgaggtcaatagatataaggtgggcatacacataatcacattcaacaacaaaaagtgtataattctcttagcttagtctaaaaaactttcgtagtttcaaagtcttaaaaaaataaaaactaatcaagggaagaagaagggaacaagtttgcgtactatgtacttgccttgtgggggttgcttaatcacaatgcttttacattgagagagaagaacaattctattaggaggagagttgcttttcttgtgttttgtgagtaagagtcattcattcattgattttgattcatgtgataagaatatatatagagatgagagcctaaaccatagtcaaataacacatgcatctttcttcataaatcttttcacagggctttgtttttggttaaaaatggagtctttttaatacatgaagttgttgagtgacacaacaagctcactccacatgtctcagactactaccaccaccactaccactaccacaaccccatctcggcttagagctccttcaaaatttaaggactcaccaaaaccttcaagagcaaaatcagtaaccccagatgcaaacgacaacaattctaggcctaggaggccacttgtgctgactaagcctaaatctggtgaattgggtttgggatctcaaaagggtagggagcttgatgagtctaagttggtgggtcggcttggaaacaggccggttgttgagcaattctctaggccacgccggttgagatcatctgatgttgctagttcgaagaaaactgaggattttaacaacaacaacaataacccagatggcaaaaacaaggatttgcatgataagcttcaaatgagtgatgctttgattagagatttgcagtctcaagttttgagcttgaagactgagctggataaagctcatggctttaactcagagcttctttcccggaacaaaaagctggctgaagaacttgaggctgctgaagcaaaaatagcatctactagcagtcctgaccaggtgagaattcctactctttttcataattatgcaaaattcaaccttttctcctttatatttgacttttgagaagaagaagaagaaga

SEQ ID NO: 266843 - DNA, 1476 bp, Cannabis indica
aaagctacgtgcaaggcacgtatgtttagttttacgttagttgttatataatttaattgaaaatgatacaaaaaataattatataatttataatttattatttggtctaattaaattattttaatatagagtgattaagacaagaaaaattaataatattaactattttgtagtgttaattttatatttaatcaatacatgtaaatgagtattacaacctaaatataaatactttatgcaatatattagtagtattgtataaaaaaaaagatttaaagaaattatgataatgtaattgtaaattattcgtaaattattccaaaaaagaaattgaatgttaaattcataaagcaaacattgcttaaaattgggtaaattttacaaaaaggaggaaaaaaaattatttctaaagtgttaataattgaagaaaatatttgtataaaaattttaaaaaagaaaaataagagtaatcataattacatactctatttttatacggttttttcaataataattatttaaatattataaaatattttaatttattttaaattacacttaagaaaactattatactaataaaaaatctaagatattttgacaattaatattttcaaatatttaactcaaaaaaaaccaaacaataatatgaagtttatcataacaattaagagggaaggcaggaaaaaaataaaaagtttgtatagaaagaatgggacaaaatctatttgagttgaaatccattatggtatctgctgtaacaatcaaagcaatctaacaatgtgggtaaaatttaagaactaaacaatggtataataattataaaatggagttggagaaaagatctcacaacagtctgttgtggtaattgagcacaaccaattaccaagacaaatgcaatgaaaaactttgtgtcaattgaggttatcgcacatgtagtcagtgtcacttcgattctttctcttatgtccaagctacccatctacataatcaataaaaaaacaataaaaatagcaaacatgtaaactatataagtattatgaaacacatatcagatctataaatgaaaatgatataatatcactattcttcaatctctgcactataagtactaatcattatgtaacttatatagtttatgtaagagcccaatatagatgatgatataaagaggacaaaaactataaatacataatagatgaaagtcaaacaaataaaaatgaattaattaagtaagaaacccaatataaatgaaataagcaattcaactttttcattagatcttacagtttccaatatagatgatgatatggttgtaaaaatcctaatataaaattacagatagtttgtataaagctatacaaataaaattgtataaaatacttctttggagccctgaatatatatgctccatctctattgacaaaaaatgactgagacggctagatgctccaaaaccatgataatgccaccatg

SEQ ID NO: 266844 - DNA, 1624 bp, Cannabis indica
aaaattttataaaaatataaaaatttagttatttttttttatatttataaaataatccctatacataatgccttttaaccaaaaaaaaaaaagaaaaaaaaaatccctatacataatgcgaagttaaaaggggaaattgtctaattaccatggaaataaaaattagccaaatgtattcgacattattcatcatatagggttggtacagaagtaccaatcgaaagtaaatgacaaagttgttaaatgcatgtattccgggtaaaagcacaaaagtatcataaccctattaaaattgtctttattaaaaaaaaacaaaataataataataataaataaaacatattaaaaatgaagttaagagcccctaaaattgtctttaatgatgtatatttagtgttcaccacaatcacatcattttgattaattatacattagtaagttgtatatatttattaatgtaatagattattacatatatatctaaatcagggtcaagaaattgaatcacatgcagaaaatgcattaatgtatagtaagcaagaaggtaattgataattagctcctctccaatctatgtcaagtgggtcccccaattctcatggcagccataatttatatagaattacaagtggactatttgtatgggtttttttgttgccgacatggcacgcataaaactaagagtttccaaagtcaaattaagttttaggcaagttgtgtacgttgtagttggccagcattagcattaccaatatcaccattttttattttgtatttttcttttcttcttctgttgcagataagcatttatctttctttgtcaatcgtcatcacatatcccatactactagctagctagctacctatactatacaaatgccaattcaaacatatactcacatatgtatatataggtttatacgtataggtatataataataactacgtataatttggtgtgtacagtggagaaagttatgggatcaaggctgggaagctacacttattgaaatcatgatatgcttatatcgaggtcaactaagtcaagtaaatgcaatttaattaaacgagtttttttatttatatatatagagaaaaaaaaaagtcaagtaaatgcacagctatttatttgatcattttcacttacgcaattatagaaaaagactaaaacctaatctataatttgatcgtttattcagcaaagtacttaattattaccattaatgttttttgtacaagttggatataatttgtaataaataatattttgttcgggctttgtgtagaacaaaatttatctaatgcaattataagaagtcaaatatcaattttgtggctaattattagaaaaatatgtaaaactgattcaagggagaacaatgggatattatgaataaataatggttagatataactatatatatatataggtacatagcccaatgaggaagctgcaaattaatgcttctcgagggagcactagaaaatggaagattaataattaatatatattaagcaataggcatggttttgacggcatttttctaacccaaaagaggagaaaattaggttttaattcaattattcaagaccttgctatgatctaataaaatttgttatgcaa

SEQ ID NO: 266845 - DNA, 1230 bp, Cannabis indica
aatgttagaactcaagaagaatatgtcatatgcaactctttaaataatgcctcgatgtttaaaatcatccaatgacatactacaaacaaatgccagccacaagcaattcacaaataaattcccatcttgaattagctaatgtttcctattttattaacaaatatattgacaatgatctaatgtgttgagcataacattagatctggtgtggtgtgtcctaacttctacagttctactgcacttctgatgagtaacttgaagctagaatgtgtcatcaattaaacaatgccaataaagaaaattctacagctcgggcaaatgaatattcgaattcgccttttcttcaatctgtggctccaatccaatatgtggtttgtgtaaaaataatctgcccctacttgatcttgcccaacttctgattcataacaataacgaaagtaactcactagctggacctcttgctggccagggcttccttgagttttctacctaatgcatatgccagaggaggaggtacagcatttcctatctgtctgtgcttgtgaaggatattgccggaaaactggtaattgtccgggaaaccctgcatcaggcaatatcaagagaatttttcaacaccatgataacactacatcagcagtttttatctgactatttacaatctaatgatctattattctgtctattgagcctcaattatgacagctaaatagtagattttttattattacattcgtctcttttactggctaagttatacttcaaagtttatggccaagtaaattgtaaaacctaaccctatttttcatttctattgacaacagcaaagacttgcttaaactttggagcatattctaacggtaaataaaattatttaagaaacataaacttacttgtgatcgggcacactctcgaaccgtcagaatcctgtcttggtcagggtgaaagcacatcccaaccttacccattggctgaggatctgtaatggaagttgggaaattcccttcccaatccaaccttccaaacaggcccttccactgattgtggcgcttggcagtgtttggcaagcaccatggtattaaatcaaccatttggccagtggacaattttacctacaatttgtttgaatgtgtaagtttcatcattgataaacagtgagtttctcactagcaaaatttaactacttctttgtagaaaaaaaaaaactaactatttctattgcaccttttc

SEQ ID NO: 266846 - DNA, 705 bp, Cannabis indica
ttattttcctgaaaagtaaaatttaattaaaagagatttagattgatcttagttgagtacttttatgttgatgtgctttgctaaaagaagattttgtttctgtgatcgtcaaataaaactctctgttttggttttgagcaatgatagtgacacttgtaaattacaataataatactatttaatcataaattatactaaaaataaattgcacaatttcatttagtttaattaaaattagtttgatgctgatctctatattttcttgtcagcatgggttttagaggaaccaatttatttttttctttctatatgatttttctcaaaatttgactattacttcatgaaatgtgctagtttagtactactttattctgaagagtttttctaaaagaggaatttgaatcaagcaaaagaaatctatttgtgattttagtgtttagcacccataacttataacaaaattgtacacaagaatgtgacttaactcataaatggtagaactatataatgtttccattgatgtgagctgtccttttcttgtcagcttggatgctaaaggaactaaattgttttttattttcacgaataaaaaatcttagggtttgaagaagaattttatgaatgaacaacaaaaagaggaagatatgtatttaacaaaaattcatttgaaaaataagaattgaaaccctttatgaagtcatttaa

SEQ ID NO: 266847 - DNA, 2798 bp, Cannabis indica
attgattaatacaatcgtattggagattgtaactattactattattattattttactgtttttttccacccttttcccaaaaataattgtttgaagttgaaaaccaagatacaagcactgtaactctccactacatatctaatgaactgtgaagtgcgtgcctagacagtgtagtgattagcaacttaccagataccacaaatcccaaaaagatgactgcctgcatttaccagaagaaagaacaaaaacatgtcataatcagaatacataccaaaaaaaaaaaaatcaaagataaatatctctctgggttaaagaaatataaagtttttccccttataatattttagctagatattaacaaaatggctacaaattttttttaactaagcaagtccattttccctagtttaactaaacattattagtttaataaaccggacatggcgaaacaatgcgtaaattttattctttttcaagtgtaaattgcttgtaataatgtcaaataacagaagtgaacttggttagaattgttcgactatctacatgtagttagggtgaatcacattctccaaaataactgaagaagacgatttagtaattagatgctccataagataaactatgggacttagggaacaagtgacaagtcttagtaagcaacaaatattattgtcattactaacttaagtaatcagaacaaatagtctaataggtggtaagaaaggatgacatgttttgtaagtcttacccaacgagtctttgaaaactcactccacccatgtgtcacatcagaaagatccttaagagtggttccaacatatactagagcaagtgtaattggctgttacagacacaacattgaaaacattatcacaaggaaattttattcagtttgtttacttctgatttctttgagatccttttatgttttacattatcacaaaaccaacattacaatttacagatcataataatcatggtaagtgttgaagtaatagctcaaggatatagaatataccatcattcctaaccatgaggccagcatatattctccaattggaacaggagtcacagataagaggtagtttaacatgttgaatggtaataaaggtacaagccgaagcaacaaaacaatctgtagaataaagaaaaagatcatccaatcagaataaaaaactgagaccgaataactatcaaagcccaattaacttattgcatgcacatatcaaaacagaaatttatatacaacttataaagaccttaaatccagatcttcggatagcaattgccactgaactaaattgaggatagtccttcagcttggagacaacatatgatttaccaatctgcatagaaattccattataagatactcaccatcacataacatgaatacatgacataaatcttcctttaaaatttcaatacaaaaataacacgaggtcaagaaactcacagttcttcccagaaaaaatgctgcccctgcacctagagtagcaccaatagaatcagccaaaaatcccacaggcagcccgaaaagataaccaccacctagctgaaagatggagagcaagtgaaatgagagtggagatataaagattggctaatggcagaggtagtagtatgcttacagtaagtactgaagctggaacagctaagatggtcaaaggaatgtatgccacagccctgcatatcatcaaaagaataataagttgagaagtctaggcattgaatttttcagcaacaattgataagtaaaataaaaagataaatttgaaactacttacagcacaagagggccccaggccccaagatcttgctcgacccaaactaagaagtcctttaaatactgaacagaataaatattgttttcatcattaacttaataacctagtcaagctaaatataaacgtatgaatattggtgcaaaaaaattgaaactatttctccgatgacagactaaagagttataactgaggaccatcaactatttgaattgcatagttgaagcatatttatctcttggtaatgatataagaaacaccagcatgatcataaggggaaaaaatgagtgaactccaaatctccaacacatccacttggtaattgggttcctctaccacattgtgttcaacttgctaatggccaaaattgtgcgtgaaaaacagttcagattgtgtttaactttctataggattcaaaatccccaagtccacaaactaacaaattcaactaatcatgcaattgaaaaagaaagacgcccaagtacccaaaaccaagtcatacatacccagatactggcaaacttaaatacaccatccaaagttcctaaacaaattcaacacatatgccaaaagcccatttcaaattcaagaaagagaaagaagaaaattcagagacgatccccacaaaaagcaaaatcaataaagaaaaggcgaaaataagataggcccagatgaaaaaggcctaaccttttcaacaggtaaagtcaaaaaagcgaaaacaacagcggcggagaggaggaggagaacggtgatcctgagagcggaagcccaagtgaaagccatggaaaacctgcaacgccaaggcctgcagttgtcgtcttcgtcgtgatattcaatttgagcttgcttgaaggacaagcgaggcctcaaaccctcaggggtagccagatttgtgtgtcgtttgaactatgatgatgataaaccaatcattcaaatgagaagaagcaaacaaataataggaaactgcggaggaaagtggatatcgagaaattggggaaatgggatgtgagatta

SEQ ID NO: 266848 - DNA, 3099 bp, Cannabis indica
ttgtttttttgaaattatttttatatttttacttttcttttttttttaatatataattaaactttgtatataaatatatttattattcgtaccaatatttttttatatagttaaagttgtaattaaatatttatacggagaaataaggctagtatggacttggagtctcaaaaggaacaaccacttggatatcagcatccgacgactggtacaaagactccaccaccctcacatgacgacatggtacgtaagtttatttgttgttactttaagtttgactgtatttcatattaaatttttacttttttgtattgtcattcaaatataaaattataataaatttgttacgtaatataaccatgcaaatataatattgctgtagggggactcagcgccgaaggagtcagcagaagacgccgtcatttcagccgagaacaatattgacgaggacgactcacatctccagttcaaaaacattaacaacatcataaaggagaaggatgtgggttctttacttgagttcggaggtgcaccaggattcgcagaagctctaggcaccgatatcgagaagggaattcctgaagatgaccaacactgttgttttcgccaattagcttccaaaacattcaacccaactccttcaaaacccttcattttactacgcctatttagatcttcaaacaactatatcatgttacttcttctactgtctgcaattttctccattgggtttggaattaaggaagaaggcctcagaacaggatggtgtgaaggggtcattctcttaaacgccttaatcatactccttgttttcccaatcatccgagacttgttgaatgatctttttaaaggaaagagaaagcagcttcaagatgatcgagagaaggaaatgatggttgatgtcgttagaggaggaacgaggaagaagatctttatgtcagatatgttgttgggtgatctcgtatgcttggaacgagggcatcagattccagccgatggtttgttggtttctggtgattacttggaattagatgatggctccaatgttgtagttaatgcttctgacccttttcttttttatggggcagaggttattaatggccaaggtagaatgattgtgactgctttgggagaaaacactgtgtgggctgaaatgatgagtgtctcatcatgtcatcatcatgatttggtgatcaagaagcagagtggtccgtttcaagatcagcttgataagatcaacacatggaaacaaatagttggtcttttgatctccatattcattattgtggtgttgttcttgcgctttgagctcactaaacaagaggccaagtcaggaatcactgatatcaggggaaaaccaatcactgtcgatgagttcaaagatttagttgagaggattgtcacgaaaccaaatgggaagattactaattccttaatctcatcactcaccatgctccttgtaggtgttgttgaaggattaccattttgcataacacttgctattgcttactggagaagaacaggcatgacatttgctcaagaactgtcggcttgtgttgcaatgggctctgttacagccatatgtacagacagaacaggaggcctaacattggagccactcgaagtggacaagttcttgatcggagaagctgaaataaccgatgaatcggttatagcttctcatgtaggagaagctattcgcgacggaattagctccacacttgttctcccacaagcttttcgttctgaaacagatgagcctctgctttcctgggccttgtttaggttccagtcaaagttggaagctttgaggcggcaatcatgtactaccattctccaagttagggaattgatcgatgatgatgaggaaagaaaaggtttactattgatgatgacgaagaacgattatggtggtgacactgatatgactacgtgcatgcactgtaaaggtccagcaacagagattttgccaagatgttcacgttactataacaatgaagggattctaaacgatatgaatgaccataaaaggttggaatttaatcatattgtcgagcaaatggagtcaacgcatcttaaagttattgcttttgcttacaaacaaactattgcgcccacaacgattgaggaaaatgacttgacacttctgggactagtgagtctcaagatgtcaatccgggaagatattaaagaggccatcaaagcttgtaagattgctggtgttagaatcatactcgtctcaaaagatgatgtggaaactcttgtggcaatcgcccaacagtttggcatccttgaggataatccaacagcagaggaggtgatcacaggacatgagtttcgtaatctaaaagatgatgaggaaagaatgaagatggtgggtagaatctcagtgatgggaaactcactcccttcggacaagcacctcttagtaaagtttttaaggaagaatggagagtcgctagctgttatcggtatcggaacaaatgatgttccggctcttaaagctgctaatgttggactagccatggggagttggagcaacaatgtggtcagagcaagtgcaaatatcatcatgtgggatacaaatattagtattgttctccctatgttgaggtatggaagatttataaataacaacattcagaactacatcaaacttgagctaaccatgcttgtttcagggcttttaatagcaaccatcacagtagcatttactggaaatatgcccataacgaccattcaatcgtcttgggtgaacatgttagtgccattgcttggtgggctagctcttttgactgaacccccatcagaaaagttgatggagaaaccatctgaaccaaataaagaagcggttattataacaaaagccatgttgataaatataatatcacaagctatatcccaagcttccatactagttacattccaattcaaaggacaagctattcttggcacaaatcaaaaggtcaacaggactataatatttaatagctttgttctttgccagctttttaatcaattcaatacaagggaaatggtgctgaagaatttgttcagggccatgttttgggtggcttttggtgtcactttggtgttgca

SEQ ID NO: 266849 - DNA, 2181 bp, Cannabis indica
gattttggatatgtggtgcatgctcatgttatgatatatataaatatatatatatatatatatatatatatatccatgaaaatacaagatagcttaattataaatatatttcccttgtttggaatcgtttaagatgcacatacatacatacaatatatatttgtgtgtttgtgtatagttatgagagagaagagatgagaatggatccattttaatttggttttgtaagatttagaaaacgaaataaaaataaagttgaccaaagtattgcattaagcacagtatttataatctttttgacatgaacgcatactcttcaaaatcaactagtaaagagcacagaagaataataaacgaattattgtactgatgtagcctgcgatttaaaattgtcggctatactatagctgacagttttaaactgtaggctatagtttccacgttgttgacagttttagcccgtcaataattgttttttgccaaggtttttccacagttgcctgttttatctatttttgtgacggtcgaataggcgacagttatggagaccgacaacaatacattaaccgactgcttaaaactgtcgggaaaatctagttttttagtagtagcttaaggtatctacacatttagctcatgacactttaatactcaatgatccacaattactaaaataataactttatttagatcaaaatgtatatagcaatacattaatacatatgagcccattatgaggattttaatctaacaatttcccattatgaggatttgcatctctgcgtctagctccttcatttttttcttcattttttcatgagagttggtgagtggaacttgagttttccttgtagtttacatggggcttatgagtattactccacttgtctcaatatcatgcggcttcctgccatggttaaaggataacgcctttcgtttactttgctcttgaaagaggccgtaggcgcgggcccccctagtaagagactatttgggtgaagtcccttcatagaatcacaggacgtttccatcattgtagtattactccggtgggtaggctcacattgccttgaatgacctatatggtccttgtctcgtgataggccctttcctctctcatcctttggggtgatatttgttgatgacacggagttcctctcaccaacatgtttagttgggatcttgtgttcttgttggtgatttttgtgcagattatgtgaggcttgggtttcacctttgtgtataccgcttaacacctattgcatgtgagccagcgtagttctaacctttggttctttcagtggagatcgtttatctcatcttcatagtggcgagtttggaattttaagctcatcgagtatgtttgcttcttttttccgagacaatgtcgcgaggtaccgggatcttgcagtattggtggtggttattggcaatatttttttttcctttgcagactattctcatcaacaagtgtaatggatgcacttactccatcttggtgcgtttttgtcgaatcctcttcatgacggtcgccctctcctcttgtctgaggtacttggttgttttggccaacttcttcaaccatgggtgttggtggctctcttctgaaggtgatcaattgagtgttatctagatgaatctagacgccctaaaaatggcaaagcatctaggcatcttgtagcagtggtaagtaagaaaatgacatgacttgagctagggctgaacatttcgagcgggttcgacccgaacccgagcaacccacctgaacccgaactggtgaacctgcaaatttttttaaaaaatattcgagcaggtttgcgggttgagtttttaggagtaccgggtttcgagttgaacccgccaacccacaatttaaatatatatatatttttatttttttattgcagtttatatatatatattaaattatgaattaaaaaataaaaaaaattaaaaaaaaaaaaaatacctaatttttttttaaattttaatttttaaactctcaaattctttttttatttccttttattttttataaatttattttcttaaataatataaattaaatatatttttatatataattttttattgaaaatttatatattatataaaataatttatattcagaaatatataataattttttaataatatatataaattttattttaatttatt

SEQ ID NO: 266850 - DNA, 2771 bp, Cannabis indica
cgtagccgcacctacataaaccctcctattctaatctaataatctcatcatctcacatttaatttgtccctttctttaccgcttcactagttgatccctcctaattctcttcttttttcattttttataattatataaataaatcttaagaaaagtaactctgaaaatgacctgttgggatcaataatcttgtatattatacattattgtatttttaattaaattggccttacttttttcttagtagtttcacaatcaacaagctatagataaatagatatatcattattgtagctaaataatattgcccattacaagtagaagtagttataatattttccacacatgtatacatcaccaacttacagtcgatcttcatattggcattgaccaaactcataatacatttatttttccaatctgtttttccagtttcctgaacttaaatttgaacaatcatgacataaaaaaatagtcaggaaaaagatgaaaggagaatcatgtaattaagtatcataatttttcagggtcaagagaggatgatgaataagcgggcagtgaaggaagagcgggtactgaaatattaatgttgtttgtaacagtttggtgatgagcagaggcatgagaaaagaccaaagagacccaaataatgagtggggtaataaggagaatgagtccaaagggcaccatccatagctgtctattatcagcgtgatattcagattcccaccaagctagtatcaacccacctcccaaactcactaaaagagacacaaaacaacctatgcttaccttcacaatcttctccactactttctgatttgtatctgatgatgatctaataatctctgccttgttcgatcccatcaaaataaaaacactcaagtaaaatattatattcctgttgtcaaagaaaataaccaatttaaaataaaaacccctgttttaaatttctacatattcataaagaaacatacaacatacctagtattggttgaagggatatgaatcaaaactcaaaagggtcttgagttttggagagagagagagagttatataagtaaataaagtaattgggatatatgaagctatatatgagacgtggctttctattaaagttgttatttggtaaagggactaaatatgtaaaccagaaaatgattacgtctttcagtatttaattaactcaagctagccacaggtgaagtgaagctatctggggtagtatttgttttaaatgaaaaagaatgggttgttacatacggttcatttaaactacttttttctaaaaagaaataatagttggggggtgggttaggatattgagttattatgattataaaaagaaagttttgtgtaatagttattcttgtcagtgtaacgtagatggcaaccatagctggactgcgacgttttggcactctattttcaaattaatgctctctttatatataaattcaattgtttattgtttgcacttattgctttacctctatatatggcactctatatataccagttttataaatgacttaataatcttagtcacaacctgactaaattggaaatataaaaagctacacttttaaaactctaatcgccttagtagattatagcttcatttcacaaaaatattgtcgttgggataattattattattatgacttttgatattttgataatgctgtcatgaaaaaatacgtcagttatagccgatttgactttgtggggtcactatactggttttcggaaaaaatgatattaacatattgttttaaaaatatctgctcttacgaaaatattttaacacaattaatttaaaaataaattataattaatcccaataaaaatcaattatcaattagttcgtaaaggaaacaaacaacccattagtttagtgaaaatatgacgtgtataagtacagtgaacatgtgtgaatatactatacacgtcatatatgtacgtgtgcgcatatactgtacacgtgtgattatatgcacacatgggcatgtctacacaaaatatgtagttgcctatgtcgtttttctcatgaaaaatgctaatgttcaaacttaaagaattcaaacgacagaagaaatatatgagcttcaattcagtactttttttaattaaaaaaaagagagtaattgatggttaaatcctcctaacttttatttcacttgaatttaactttttaaacttaaattttggtagaaaaacttaccaaactcattttctgtttgtatttttaaagtaatgtattagtttatcattttgcctatgtagctagtgacacatcaccgctaaaattcaatataattactaaacactacaaaaaattgctatttttagtaataacgttttagtcacaacataattttttttgtgactaaatgtgacttttagtcacaacaaaaaattatttgtgactaaaacataatatttagacacaagttgtcactaatttagttttattcacaacaagcattgtgactaaaaatatatttactcacaacaagtattgtgactaagtctaaaactacatttagtcacaacaaattgtaatttttgtgactaatacctttagccacggatattttagtctcaacataagaataataatttataattaatcacaacttgtacttttagtcacaaatttcgttgtgactaaaagtaaatttttttataattacatgtatatctgtacacgaaagtacaaatatcacatttatattgtttaattaatttatattattttaaaattaaaa

SEQ ID NO: 266851 - DNA, 3201 bp, Cannabis indica
tttttatttttatatataaaaaagatgaatgcgtacatacatataatgctcaaagctaattagggtttaatatattaactgagaacctataataaaaggaaaagtgtatgtacgcacaatagggtagctgtaccctacgttttttttttctctcgtgatgaataagccctcatcagaagaggtgttatgttaggccattttcaagaatttattaattagtggcaccaatattataccctttttttaaattgtaggacccctttgattgctaattactgtcgtacatatatgggccctttgaatggaaccaatcaataccaaattaataatgtctccccccctttgatcagtgtcgttttccaactaaatatcgttcactttagtgtcgctataataagctatagcttgccctttcttcttccaacttcatcaccactacttgttgttgcaccagtagtacttctacttctacttctactaattatatataactccagaacattatttcaaaagtagtagtagtagataagtcattcccaagcagtgtagcagtagtccaacagttgttctgatctctatcatgtcaaatcatcagacttcatcaaggtcatcttcacctttcatcaaacccactgatgatgagattcaccaccttgttttgaagctacaatccttgttacccctccttaatagaacacccaatgtacgctactgtttttgtgcttatatacatgacacactttataacttattatatatatgtggcaattaattaatcaacttttttgttcaaacgtatctatataataatctatgttttggtaaattttatatgtttgtgtcatcaaaaaaagttattattagggcagtgagtgatatatatataaatatagaacaaatttattaatatatttttacacatgcttaactacaatatgcttttttttaagaaataatgttgaaaattataaaccagctgcattaaagcttattattggatatgttatatgatcacattaattatcagattataaattaaatgaaattaaacttgattgttttttattcatacatatatatttaaaatagttatttattaggcctaagttatctattgtaatgaatatgtaggtaccggcttcaacaattttggatgaaacttgcacttacattatgaggctgcgtagagaggtagatagcctgagtgggaaactttctcaattacttaatacagcagaaatcgacgatgtagatgagcttattagaaaacttcttcaacaataaaaaactcaatcccaaaacctttctctctatatatatagcttcgcgttccaactattgatcatgaaagtctctaccatgattcctaataagatcagtgtagtaacaaatgcaattcgagtcttattattaatgataagctctttaggttaaaatgttttattttattttatttctcatgcttttaataatgtttataataattggtttattatgtattttactttttatatatttataataaatttttggattgtaccacactgctctctaattatgattaaatatctgagaagctttcttagattgactaattataattaattcattaattatggaccaaagcaatgattaccaattggaaggcgaagttgataaggaggaaaaaccaaaacttaacatatataataatatatatatatgctatatatgtatggtgctttattttgtttctgccgatcgatgtttgttaatgttttatatatataatatttggtttggtatggtttatttaataacaataataattaacgataattgatgcctgatacattgcttcttggtggaacatgtttcatttgtagtgggcatgcccttgacatcaagaatattaaaacatatatatatatttgtcttaaattctccataaataataattattaatgtataatataactaattatgtttatatatagtatatacaaactatcaagcttttttttcttcctgtctggtaacttaggaaataaaaatcaatgaaactcaaagtctatcaagaaagtatgttaattgaattcatagatccttatattagctatgaatataagaaagagatgatcttttgaaaaattagacaataaaactctattagacttttaaataacaacttgagccaaaatttgtacaatgtacgtgtttaattcctaaagaattcaagatctcacagttcgctctttagtgaagttctgaacatcatgagcagtcttaccaaacctagtgctcttagtcttgaatattgataagctacttgtatcaaaaccaataactataaagaccttttcttaatgcaatatggcttaaagcttaataatatacaacaacaatatctttacatgttatgattttacgagaacaaaaagctaaaatttatatgcatgtgaggtcttacaatattatcaggaactaagctgactatattgactttataaactaaacagactatactggccttgcaaatcagacatatatatactagcctcataaatcaaaccgatcatatgtttactttacaaaccgaacttaccatactcattttaaccatatggtgttacaaaccaaactcatcacactggtcacccaacatcaagacaaaaatcataccacttcaataataaaaatttataattacttacggattttttaatcacaacacaataatgataatttataattagccacaactttttatctttagtcacaaattttattgtgactaaaagtaagatattttgtagtgattatagataaagtatcttttttatttgtttaagaataagttggatttctgtatggagttataaattttgtaaagacctctcttttaaactctttttggggaaaaaaatcctctatcctttaaaaattattgttgtagatatatccctttttacattctgttcaatttgttaaaataatttactattgtagttttgatgtataatatgacactaattttacataaaattaggccagacaaaaaatgcatacattttacatagtctaataacgaattttggcaatatatctaaattgttagatctaattagtatttgtatcgttaataaatttaattttaaataacttaaaacagttatatactagactcttatataacctatggctaaacatatgaaaaaaaaa

SEQ ID NO: 266852 - DNA, 3960 bp, Cannabis indica
tccccccgattcttcctgaggtcacaccgtcttgggcacctccgccggaggactggatcaaaattaactgtgatgttaaagttggcggagactccatgtgcattgcggccctggccagagatcactcaggaacggttctgtgggctgctacgtcctcccttaatttcagggacgctctgattggtgaggcggcggcgtgtcagcttgctttggatacggcgaggcgaaggaagcataactttgtcttagtggagagtgattcagaagtggttatcaaagctctgaaaggattgcactatgtttggaacattgataattatgtatctgtgtgtaatcaactctctaattatttttcttcttgtaactttgcttttatttcccgtgtttgtaattttgccgcccataatgtggctaaatgggctttcacccaaaacttttcaggagtattggagtcaccctccatacctgattctatcctttgtaatgaccgagaggtctaatgcttctttatctatgcaacgtcttattttcaaaaatatatatatttatatatatatatgtatgttttgtgactctacctaagcattttttatttttaaaaatttaattttgtaataatgtaaaaaaataaacaaagataggataataaaaatgtaataataacaataaataaagtaataattttttatgaaaactccataaaatccgtttcgattttttcttttttttttaaaaaaaaataaaataaaataaaataaaataacctccataaatgaaatagtgcatttttaactattctcttgagtgaaaaattggttcttactcggaggacatcgttccttatagagaaatctaccttactcagaatgttacagtacacaaatttttgtctataacatctcaatttgaagatgaggagccttgtcttttgtcccaaacactccaaactaaacaagacctcatggggcccacaaattacgtgtcatctataaaatgctgccatgtcatcattatccttaaacattatgtaaggtccaagaacttcaaaccatgaagctttcttggcctctcacctaagcaacacactatctttttttccaccacaacatcatgtcaccatccgaatccaatcaactaagctctacaataatatagtacactctatcagccaatcaaaaaacggtcaatgcatttaaaagtcaacattccacatggttagcgaatcaggtaaatgaagactacgtgttacagtggcatgcacctcaccctataactaaatgggacattatttctgagctgcccgacagtcttacatatcaacaatatcaactgagtgagctagctagctagcatagaagcttcaatggcaaaaccagtttcgattgaggtgtggaacccaaatgggaaatacagagttgtcagcaccaaacccatgcctggaactcgctggatcaatcttttagtcgaacaagactgtcgagttgaagtaataatattacaaattcttcatacttcatactcggctatgtttttttgagtattgggtgtttgatgaaattattgtttgttttcaaatcagatttgtacccaaagaaaacaattctgtctgttgaagatatcattgccctaattggtgataagtgtgatggagttattggacaggtgagtttacttattggtgattataatgatatattagtgttactctccctcttttgtaactagattttttgtttttctcttccttatatagttgactgaagattggggtgagactttgttttcggcactgagcaaagcagggggcaaggcattcagtaacatggctgttggttacaacaatgtcgatgttaatgctgctaacaagtatggagttgccgttgggaacactcctgtgagttttaacctttaatcaaacatgttatgttctagtagtacctttttcacctcttctatttcccatgttatgcatgtgttttatggagatgtatatctatgctagggagtgcttactgaaactacagcagagctagcagcatcgctttctttagctgctgctagaagaatagtggaagcagatgagttcatgagagcaggcttatatgatgggtggcttcctaatctgtaaggctcaaatctttccacttattttggaaaaaagaaacaactatgatattcttaattttctcttaaaaaaaatgatatgctaaattcgatgagcataaaaatgtgataggtatgttgggaatttgctcaaaggacagactgttggtgttattggagctggtcgtattggatctgcatatgcaagaatgatggtactacttttttcataaccaatccgttaaaaagtttttttagttatttctaatttgtgagctagatgattctcaactgtgaggcttaacaggttgaaggtttcaagatgaacctaatttactttgatctgtatcaatccacgcggctagagaaatttgtcacaggcatgtctcagtttatttgttcttttaaaaaagtgaaataaagatcttattgtaattgtttctcatacttgtattttaatccattgcagcttatggtgaattcttaaaagccaatggtgaacagcctgtgacttggaaaagagcatcttccatggatgaggtgctccaacaagctgatgtggtatagatatatggttactctaatttccaccctttttttttcattggtcagtcagtcttatatatgacttatatcgaaatctctgtctattgatgttctttctagataagtcttcatcctattctggacaaaaccacttatcatctggttaacaaggaaagacttgccttgatgaagaaggtgaaagtctctccataaatgctactcatttcaaataaactcataaaaatgatatgttcatgatagcttaaaaattaaagtatgttgaatctttatttgtaggaagcaatccttataaactgtagtagaggccctgtgatcgatgaagttgctcttgttgagcacttgaaacacaatcctatgttccgagttggacttgatgtcttcgaggtaaaaccagatcatttctcattgaaaaggataaaaaaaaacagcaccgtatataagtcaatatgggcatgatcatcatgagtaagcaatgaagttggtgtgtatcaggatgaaccttacatgaaacctggactgggcgacatgaagaatgctattgtggtacctcatattgcttctgcatcaaaggtaataaaccctctcaaaactagcttaagtagcaagatttttcgtatcaaacaaacattttactttattaatataaaatatgtatcttatgtagtggactcgagaaggaatggcaacattggctgctcttaatgtcctggtatgtggtcaccaaacttagatacatatatgatatatttgtacacctttcttagttcaaattgttggttaagtactaaacttttattttgtttccttaatctttagggaaagataaagggctatccagtctggtcggatcccaaccgggtcgaaccatttctgaatgagaatgccagacccccagctgcagctcctagcattgtgaatgccaaagctttaggtaatagttcttatttgggtacctttaaaactcattcaatactttagtaggaaaatttcttttgggttcaaagtttgtgttttgtttcttcttttaatcaggtttaccagtgtcaaagctctgagtgagaatttaaggttgatataatcacatttgggctaaaacaagagtgatttttctagctgatggaacagtgcatcatgggctctattggtaaatgaaattagaaaagcagtaacaacatattaatgtatattaaaaggactatttttacatgaaattactattgtgtgttatgtactccactaagctgtgttgatgttcattatattgggttataaaagaataataataataat

SEQ ID NO: 266853 - DNA, 2711 bp, Cannabis indica
aacgttgtaatttctatttggagcacaaatcctttattgtcctctcttggagtgttgctagaaatttcaaaaagcttctttgtgttaataatgtttagttatcttctgttaaaagatcgagctaatcttgtttttaagttgattgtattagtagtgagaaatgtccctactctgtattaaagtattgagtgatataatgtaatataattattggttgataaggtaacattttttacttactgaagttattaacaaactatacataaagaagaaaaagagaagcaacgttttattaaatatttttgaagaaaggaaaaatgactatgagatgtttacacgattgaataaataacaaaaacctttcaccaagaaaatgctttattccaaaatttggaatacacagtgcacagcagtgtaacttgactttcatcaaactcacttacagagtcagtctcccttgacttttatcattattcgtcattgtcatcataacatgtgccttctctggaagcttagggtgaactatcaatggcagccctgttcaccaagaagctccaatatttagtgtggatgccaatttgcataaaagtaaaaccagtatcatctaactaaatggctgctctcttcttgtattcaaaggccttagttcctctcctcttggattgtgaactatctctttcaagtctataagattgcaccctggcatgctacccactattttttcctttaccatttccttcactcgggcaacttcttcccatctacccgctgtggcatatacattcagcagcaatctatagtatgaaagattatgaggttccctgtcaataccagattttgcaatttgttccccaaaccaaaaatctctttcgaatcgacatgaactgagcaaattggcccaaatcaatgaatcctgtgactcgtccacaatatgatgcggaatgttcctaattatctcctctgctggcttaacaaggccaacacctacaaaaatattagccaaacaccaataatgagcaaaattgggccttatcctaaaaaagttagtcatttcttcaaagtaacctctcccttcttctaaaaagtctagcacgagcacaggcacaaagaacaccaataaaagtaactgcatcaggtagtatatttcctcgacctttggcaatcctttcactcttaatacagttgccttctcgatcttgtaatcttcctttgcccaccattctataggaaaagcttaataccatcttcaggatttccctgtatgcagtgccccaagatcattgcattccagcaaaccaaattcttttctggcatgctgtcaaacactctactagctactttcactctttgacatttactatacatatcaattaaggctgtatcgatgaatatgcttgatttcaaaaaggcagtcctgattagaaatccatgaacagatcttccttctttcagtctagctgatcgaccacaagcagtaagcacattcaccatggtagtattgttacctctcattccagttttaaccagttgtctatatagcttcaacacacaaccaggaataccactcttcaaatacccactagtaatcacattccaagatgccacatttctctctggcatagagtcaaataatttatgagcaacatccatataaccatgtctcgcatacccatcaacaagagaattccaagacaccaaatctctagtggtcatttcatcaaacaccttatatgcaagttccactctctcacagcaaccatacatatgaatcaaagagtttcgaacttgcagcacagtatcaacgccattcttaaccacttgcccatggcacttccccccagtttcaatgcaacccatcttcgcacaagacccaataagcggtacgaaagtatggccattgggacagaacccttcccccaaccattcaaaatagaaaattaaagcttggctgggactcaaacccaaagagtaagcctttaaaactgtgttaatacaaaaagttcccggaaaatctatgaacttgaaaatcaatatagtataatcaagatggccaaaatcccagtatagcttgagaatcttcctggcccaaaaggagtcaaaacgacctaaagtaatcaatttggcatgaattttggatacctggatcacgctccgagaggcgtcgagaagagcaaaacaattgcggcgctgagatgattttgcggcatcaacggaaacttctggggatacagaagaagataatggatatgaatgaataaagggtctggagttcctgaagcggaataggtctcgtatggaaattcttgccattcatttggaatatggttttgatccaatcgttttagggacttcctactggttatttccattaccgcatagtattctctcttgctttttttgactcagatttcagttaatgcttcgttcgaaaatggaatgaaattaagatccatcctccacggactcaactcgatcgatcttcaatggaggtgacaaaccacagaatcggcttagactacagcgcctaggcatttagccattacagtttacagggtacaacaaagaatggccaaaaacggtgcgttccatgttttggatcgagggaaaattagcttaatgtcttttaaacatttatttaattggatattacttcaaaaatacacaaaaataaccccccaaaaaaaaaattacaaaaatatatatttcacata

SEQ ID NO: 266854 - DNA, 3184 bp, Cannabis indica
ttagtttgtggattctcgtcgtgatttcccattgattgggacgtgagcgtaatcctctgtttttacgtactaatctatgctaatatgttacttgttaaatattggaactacgaatagcgtgtgtactgtgtatgcatgtcaattctttgggcttgttagttagtccttgatattattgagggaatctattatttataaaaacatcgtttaatcgaattatttattaaaaccagaaaagaaatatcttggtgacaaatcattataacattttctttgagaacaaatagttttgtaataattagtaacacataaactcttcttcaacctttaacatgcaatacagggccagaaatcaagtgagcctggaaaacagtattcatattcatatgccttttgtcctatgctacgccttaatattatagaaaataatataaaatattttataatattggccaagaaatgcaattagcgggaaaagaaaaaaaatactcatgagtcatgaactggcacaaatattatatattatacttataagtgagtcaacaaccaagaaattttcgttcgcaagcttattgttatatgtatctaaataaatagtacatgacttttatttcttaagcagaaccatggacagcctcctaaatttccaagaaagaagtgactgtcttgaagccatgattctctgggagaggtccattccctggtcggatagaaattatcacctccaatcctgaaaaaagaggattattactattattatatttttcaagaatatcaacacgaaatagaccccagaagtagccaaagtgctttcatagcagccaatttctactactaagaaatgaagaataaaccatactggcttctctaaacattatggaacattattctcgaaaacatgtctttggaacatatcattcttccgtaagagtcatttatttatttattttgctcttaagagaaaagaaatagtagatcattcttccctaagttcatattctcatactaataaatacagaaaccgaggttcaagtagggaaaaactacccctattctccgtagttcagtctatcaaccgtcaagtagaaaagggggaaaaagaagtagaaattcattacctgcagcctttgctgccactgcttcttgtaagacgtctgttacgaataaaatctctgatggcttatcgacccctagagattgtgtaatttcaacataacttcgggtctctcttttgttcctgagagagcagaagggcagaggtttttgatcaaaacggagtaggaaggaagcagataagaggcaacaacataatgtaaagcaaacaaaacaattgcgacttataaactcaccccactgtagtgtcaaaaaatccagacaaatatttccttaaatctccatggtttgtctttccaaaaataagcctttgtgccagcctgctaccacttgagtaaatgtatgtctgcagcacaagaatataaggtgaaggtagttaatttaagatcaaacatgaacctccttcaaaatgtatggtctgccgctataaaggtgtatagtatcaacggtaaatccatctgcaacaacttgcaaataataataatacacaaattccatccccaaaaaccatagtttgattaggcctcaactatatcaactatacatgaactattagataattatctgcacaaaacagtgttagacacgttgattaatttatggaacatgcgaagagcgtctacattaatttttaaaaataattaattgatatttacatcaacaaatagcatccatcaatcaaaatttcaaccaaaatggcaaaaatacaccagtcaataaaagtcagtgtacaaagtaggaaaatcagtattgaacttatatagcaacacacttataactaataagtttagcttcagttattattttcaggatcatcagtcacagccaactgctgcaatagtcaattaaccctcactgatgccacaaccatacaaccagccaactttatcaaaactgtaatgatataaagaaagtgtgaggagacttcagggttttattgtctaggtaagcaagttgggtatgggacatattggaccaaatcactgacttatgtggcatttttgataccatgtcagcagtaaattcaaagcacatgtgcaagtacctacatggaggttgttcactatgttctaacaaggttgaacctattaataatttattttatgaaatctataagggtaaacctttgaagctcaaaggccattagcccagacaattaacaaactgaaaaaaaagggttagctgaatctacctttatcccggaatcatgccatctagcaagagctgtaggtacatcttcaaaaactacaccctccagttcattattttcataaccagttcgccagatatgaccctgcataaccaaaggtcagccatattcacaaaattcatgctacatgagaaacatactaccatattttcttacttgcaattgtttcaatgcagtgatcttccgatcagcttttatcatagcttccacatttgcaaccaaagctgcaataaccttctctttacctgcatcataagaggggatgggagaagcaccactaacaccattttctaagtcatcttgaacctgccacaatgatgatccaaaatcttaacattcatatcaatagagttttgataaagttgggagttctccgtgtatagcatagactgcaatttaaacaattaatccagactattcaattctgctatgaattattcagttttgaagtagaagcaacatattgatcaaaattttatgctcactttccacaaatttaatcaactgataagatgcaaaacggattgttctcatgtcaccaagtcaaatcatataacctttagcagtaaagctttatcaaacaagaagaatgttagcatatacaaaagaaaatgtgtagagttaaaaattaactagagtatcttcccatatgtgataatgaaaatgaatatgtgaaacttttgctatgagtatcttcccatatgtgataatgaaaatgaatctagtacccatggtagcgttagtaataaacattgatgaatattccacaaatacgtgcatgaaatcaacacaactgaaaaataaaattcacacctgcgagcgcagcaactctatgtcctccttggtttctgcagtgtcata

SEQ ID NO: 266855 - DNA, 4863 bp, Cannabis indica
ttaattaaaaaaaaaaaagaagtctctgagctagcatcgctttgaatgaatcagtggatttttttctgtcagtattttggtcaatatgattaaaaaaaacttatagcaatctcaaaagtaaatatactcatcaatttagagtgattaaggttttcaccagcaatagccgcatttaagaaacccttcacatttcacttgtaactttacacggtttagatgatacatgaaaattttatgttgttcttgagacagaacagaactgcaaaactcccatccccttcccccaaaaaaaaattagaaaaaaatcgagaccttaaccttaagtaaccttgatcgcctattgtttctgaaaagaagatacaacaaatggtgttataaaaatgatggctcgacataaaattgttaaaataataagaaaaaaaaatctatccctgctgctgtctgtacttttcgcctgctaactcttccatttccaacgtcagccttcgcaatggccgccactccaagcagatttgttcaaggccttcaggcttaaatttctattagcattatatcccgagttctcagagtcgataaggccttaaaattttgagctggatatgttcattgttcaggctttgcacatgcatggagttagagggttctcccacaagtcatagttagggaaggtttcttccggcaatcctgttcgggtctggtgggtgacaattacatcctcggcgaaggtagcccatcccatatatgggtctccaaaagatttagacataagacccttgtccggttttatggacttttgacggtggcccatgtatcgtcgagctcctataatcagcttagcgaagttacctccatgagtcattacaaaaacatcagacttcaagcacaccaagaaatccagtgctgccaagctagtcacatgcttcctgaatttatccaactcttcttttgttgccaactcctgctttgttacctgtcacaatattcagatttcacaaaactgagaattgagttcaaaattcatgggtaagagtaacataatgttacaatttcgatttgtagattggattgactatttattggtttacaaaacatttccataccagatttggaaacatgttctgagaggtgccattctgttctgaccaccgtagacttgtcctgaagcaacataaatttgagtttccttgggataacccattgcacggagaatgactgccacttcccctggctcaagcggacatcgtccttcctttctcttctgcaaggccagttgccatagatgggaaccattctgcagggaccacaaatgatttataatccatgctctttttaagttctcctctggacgaaaaggatacatcagttattacttattaagttaccttataacgccgtggccattctttttttctgtattccgccatactagctttttcttctcttgttgccacaaaatcacagaaagacaagcctaccatccctttctcaaacctaagatgaagagccctgttttgtggaagtttgttagcactgttaggtttaaaatttgtacacctgtacaattaaaggtaatgtttccaatgccaactcttacatgtacggatttgaacctccagtgcggtttctcatccttgcagccaataaatcagccatctgctctatctcgggcagaaacttcagagcatgatagttcaccctacacctcaacctattgatctccgaaggaacattatcatacctaaaagaatacaacttcaccatcagctaaaatgatctatcaaaaccatgttattattacccttttttccctcttaaaatagcattttcacaataaggcttatacaattgaattagtgttaagacttgagaaacaatgacttacccaagtcgatcaacaaatggctttagggccattatcttcttctccttgactcgaggaagaacattgtcaatataaaattgtgcgggtgcatactttggtatattttttaccgtccgtctggaaaacaaacacatttgctacctgtcagtgccaaattgcagcaaaaaggtactaggccaaccaaattcaattttaaggactcttctaaacatgccacaaaaagaaagataaatttctaaggtctagcctctctttcttggcttgataaatcacaactatacagatatttaggttttgtcaatcaagcaggtcagactaagccctttattatagttcacacttaacagatatctttattgtcaataggtgtcaaatcaaaacttcatatcttgctctttacaaaatgataattaattacattgatagatacataaaccatagaaaacataagactaactaaccttatgcttgtaaaaagctctgttttgtctgtaaaccactcaggaatatcacgaacaattcgcacatcgtcctttaggtaatcaatgaaatgatccacatcaaagatgtcttcaaaattcctgtacacatttccacattcatgagcagcaagcaaacattagactcactgaggactaactgaatctacacaactgcatggtggctgcagcaagaactatgtcatcatcaactctcatccaataaatttcagatattatattacccttatttccaaaatacaacaatgtgtactggcaaaatcagaaaacaccagaagttatgagaaaatttacaaagaaatcttacgttttgtctttccaaatctgatcctgctttagtactggcaaaatcagggtcgcattcattatcttagccacggcaactgcattgcatatctgcatccaagaaactgttaaattaaatggctcaaaataactcgtaataaacacatcacaaaaatataaatctaagaaaacaaaaaatagttttattgccagtaaatagtttgatgttacgtgctactttaagctcttactctatagaaatgggaagctgaaatgcagccgtatacaaactatcaaatcaatccttttagaaagcagatgaactgcattctagaaccacccatctcaacaccatacaatgctcatttagtgattcactcgactgagtctagtgtcaatttccacgatcaagttctattggaagtggggaggtttaacaattatatgtaattcagaatatggttattgtagccacttggtcggcgggaagggttcaagtccagaatatggctattgtaacaattattttgtcaataagattcagttcagttcatcaaaacatgacttacagcaattctttgttgatttagacctccctcagcatggatgaaaatgtatccatttgtttcattttcaggaggaacatctgtgcattcccagcaatgtatcaaacactaaacttataatctatccatagatacatatatataactttagaaaacaaaatttaatcaagtacctgatagaccgccatctcgacgctcagcacatggcttccaagaagtggttgctgagagaggattctcccatagagacggagattctttaacctttgaaaggaaacaccaccataaatttgaattaaagggttaatcaggagcattgctagcaacaatcaaattaaagatcttttaatacttacttgagggcaatgaagaacaatgccatctttcctacacaagtatggagtattctgtattaagttgaaaacaaagttgggtaaaatcagtaatcagtagtcagtactaacaaattattaatatcatagtactctccaacagtatcaaaggcgccaaattcaatcaaattttatttcaaaacaagctaaaaaaaaacaaatcccaatttcaaagcaccaccctagttctcaatcaaataacaaaaacaccaaacaattcaacatttgagattcaactacacttctaattccattaacctatctctaacgaaagacaatgtacgaaaattcaaatgaatgtgaataatggaagggaactcactaaacgtctaacgacggagaaaatcgagatcgaagcgacgagaacaacaaaaacgagcaagaatagtgagatcctggagctttgcgtagaaaccctaacatcttcgtttagaaatgggcaaagagagtgaaaataagagcagaaagaacggtcaccgcgatctttgtgaacatggcgaccgcgtgcgtcgtcgtctgattgagtatcggagatcaaaggggaggaatcctcgtcgcgcttcatcggagaagatgaggatcgagctccgatcgaactcgagtgcctcaactcagccatggctcgcttcgggctgtgtgagccagagttctgagtgaatcgtttcttgctctgctgaagaggttcgtcacagtccatgcgatttcagattttcttcactaccgaaaaacaaaattgaagtgttttggaaacttttggggtcgaatcgtaattaagtaattaactgagggtgtttttgtcatttcatggtggcgaccggactggtctgaacatgatattaaaatgtgagaatctacggctgagattgatttgaacattatggtaccttctctgtgttgagtggctctcagaactttcataaattgttttcacggagtaatatgcacgtgatcaacgttttcatcaaacgacaaaaccatgaacccaatggattataaacgacacacaaaagggtatcttatttatcttctcttatttctcttttcataacaaaaacatttccaaaacagagttcaataatttgtatttttgaaaatattaatgttagatgtaaaaggcgatgttgtcattttgtcattatttttttagaatagtatattttgaaaagggaaatttgattttctatacttacatatacctaatattttatttctaaactaatacatatcatcattgaaaa

SEQ ID NO: 266856 - DNA, 2507 bp, Cannabis indica
caaaaaattcaaagctactactttgaattgaattagatatgctttgtatgtaactagtgaggaacttgcataatttgaacaaaaacatatcaatcaaaacagttgttgggaacacccgagtgtagtaataggaataaactaattacaacagcaatggcttcaactctacatttggttcctctggtctcagcctcaccaaactccataactactgacataaccaaatcgaaaaccataccaatggacacttcatcaattgggtcgttgaagaacttgaaaaccatggaagaactcaggcaattacactgcaacatcaccaaaataggtctcaatcacaaactctctgctatcactgagcttgttgctaaatatgctgaaatgggcacctttgaaagcatggattacgctcgtagagcatttgagttatttaaggaagataaagataccaatggcactttgtttatgtataactctctcataaggggttactctgcagctggacttggtgatgatgctatttcactttatgttcaaatggtgatgatgggaattttgcctgataagtatacttttccgtttgtcctgagcgggtgtgccaagcttgaggctttttccgagggaattcagtttcatggagctgttgtgaagatgggtttagaagatgatgtgtttattagaaattctcttattcatttttatgctgaatgtggggagttggttcatgggcagaaggtgtttgatggaatggctgagagaaatgttgtgtcgtggactagtttgatttgcggttatgctaggagggatttaccgaaggaagctgtttcgttgttttttgagatgatgaacgcgggtattaagcccaattcagtcacaatggtgtgtgttatttctgcttgtgcaaagctgggtgatcttgaattgggtgagagaatatgtgcttgtattgaagagtcaggagtgaagcttaatgcctttatggtaaatgcactagtagatatgttccttaaatgtggtgatgttgatgctgcaaataagcttttcgatgaatgttcagataagagtttgattctttgtaacacaatgatgtcaaattatgttcgccgaggactacctagacaaggtctacatatattcaatgaaatgctaagacatggcctgcgaccagatagggtcacattgttgtctacaatctcagcttgttcgcagttaggtgattttctttctggaaagggatgccactgttatgctctaaggaacggactagaaggctgggatagtatttctaatgcaattattgacctctatatgacttgtggaaaacaagagatggcatgtaaaatttttgatcgtatgccaaacaggacagtggtatcgtggaactcattgcttgctggtttgatcagaaatggtgatgtagaatcaacttggaggatatttaatgagatgccagagagagatctcgtctcttggaacaccatgcttggcgctcttgtagaagaaaataggtacgaggaagcgattgaactctttcaagcaatgcaaaccaagggaattaaggcagacagagtgaccatggtagaggtggcatctgcatgcggttttctaggagctctagatcttgctaaatggatccatagctactgccaaaaaaatgaaatacacagtgatttgcggctgggaacagccttagttgacatgtttgctaggtgtggtgatcctcataatgcaatgcaagtcttcaatagcatgccaagaagagatgtctctgcttggaccacagccattggtgctatggcaatgaatggaaagggagaaaagtctttggaactttttgatgagatgcttaggcaaggggtgaaaccagatggagtagtttttgtggcactattgacagcatgtagtcatggtggatatgtagaacaaggccaggaacttttcaagtcaatgaaagaactccacggaatctctccagaggctgttcactacggctgtatggttgatctactaggtagagcagggctgctaaaggaagctagtgatctgataaagagcatgccaatggaacctaatgatgtaatttgggggtctttcttggccgcttgtcgaacacataggaatatcgaaatggcaacctatgcagctgaaagagtgaaagagttgaggagtggaattcatgtacttctgtcaaacatttatgcatcttttggaaaatggacagatgtggcgaaagtgagggtgcgtttgaaggagaaagggatcaccaaagtgcccggtacaagcctaatagaagttaatggaactattcatgagttcacctctactgatgatagtcacccagagcagagtcaaatttcagatatgctggaagaaataaactgcaggctaagagatgctggccatgaacctgatttggctaatgtgttgctcgatgtggatgagtttgagaaagagtattttctaagcaggcacagtgagaaacttgcaatggcttatgggcttatcagcac

SEQ ID NO: 266857 - DNA, 1855 bp, Cannabis indica
aacacttttaaaagtgttgctatttagatttacatagttaaaaaaaaagtgttgccaaacatcatttttctagtagtgttagttagatggtttttagtgttaaccaactaactctgttagttaagtgttctttggttgtattgttagaaggttgttatcttctctaatgcctataatataaactctttgtaaccttcttaatcattaatgaatacagttcttccaatctctttttctgttcttgtctcaatccttacaataaatttctatgttatttttttaattaaagatgttaattcaaaatttataaatgaattaagtacttattaatatttcatgatcaatgcttttaattgttattattatttgtctatcgtcagtaaaacttgattgtgcaaagaattcataatccataagaagagtaagtatataaataataattccacataatcataatttttgtggataaaggagacataataataggtaaggttgatattgaaagcaatttagcaaatctttttatatagatattgccattaactatatgtgaaatataattggttaataaataactttaatttcaatttaatcttattataataatttcaagtgagagtttactagattttactaagtacgttataaaaatagtggaaaattttttttcattatattgtttatccaaagtgcacacagagaaacttaaggaaaactaaacaataaaattttaatatcagaaaaaaaaaatatttaacttttgactctccatattaccaataaaacacctataaaataaatacaaaagttagattagtatcaaatatttaacaagtatataaaaattttagcatataccattacaaactcctatgatgtaaagactagtacttatcagctgtgctcatctctgttgagtaggcgcaaaatgaaactaggtaggtggtaaatgaaaagagggatataattgaggcacaattgttagagctaaggaataagaagtctaaggaagttagaataaaaaataattcgaccaaaattaggctcagggtattattatctcttcttttttttgcaaaatacatccaaattgtcatatagcataatgataaagttggtgatcgataacttttacaaatataggatccaaaatattatttatcatatatatatattatatatatctggtaataagccagttttagtaagaactctaccagaaccaaagtaaattccctttttttgcttcagttcataattgaagcaaaaaaacatttggcggtggttataaaccgaagccaaaaaaaaaaaaaaaaacaagaatttgcgtctatggctatagcatcggttacacaaaccaaagcaaaatagtggtagtttgttgaaaggctgatcaacatcatcactctggctagtagaatcgtcagaatttccttttttggtggtagactttcgtggtcgagtgtgagatttgtctttctatgtacctctgcctctagaatcagtatattaccttgctctaaggcattggttccttgtgaggatcatcagttctatgatttttaggatcacttttccctgcattattatcccgcgaattagtattgttaggaatgttatcgtcaggaaacatatttcttgctgctgcaattcatgcttccaatcctgctactttctcatgcatcagtagagaaaagtcttcttgagctgctaactttgttcaattagtctcaattttctggtccatgatgaccacaagatctgtcttgtcaggctcacttttctaattagcattgtcatcttcgagattcgtaggatcagctcgtctcttcattgcctcatcgatgggatcatc

SEQ ID NO: 266858 - DNA, 3015 bp, Cannabis indica
tcttttcagaaaaaaaaaaaaaaaactaccaattgattttatttttttgaaaatggattcttaataaaagaaaagaaccaatacacctaaaaaggcaagtctgcaattaggacaatactaacaacgacaagatcctcattgaagaggcactaactcaaccgagaatgtatatttctttatgtatatatttattgaggttcatctccaaaaatatatatattgttaaaaatgttctattttgtatttttaaatatgaaagataaattaatttacatttggttgtttttaaataaaataaataggatttgactttgttgaattataatacttgtaaaagtttgcacctcagtgtccgcgcaaaaaattaatatattaaagttattaaatagattttcatactgtaattgtactcgtaacattaacatatgcaaagtgttgtgttttttttttcttttctttaaaaaataaagcagaatataactaaagcaaaatatttacaattaaaattaagaagaaatttttgtaccagacaaaaaattagagactaaaactatggtaaaaaaatatcttatttatccttaaaaatataatcagaattattattattattttgaacttaaggatctaactgctaaagaacaatcttaaggtgtaaactgaaaatctatgaacaactcaagggcaatagtgctaaaaatgcaataaaatataatttacataacaagttcttacactttcacatatccttttgagtttttgacaatttttgttatttgcaatataatcgttatttaattattatatttaatacagacattttagttccagacttttcaaaagctcctaccatagagttgaaaatcaactctgactctcctctcccttctcatttctccgaaaaagcctcctcaggtatggttcttcctttctcagccattccttattctgcaatttctattttgttaattcaaatatttgatcgatttgtttggttagaactgtattacattatggtttgctctctctgttttcgtgctgggtttcatggttgaaccccattcagattttctgataaacattccagatctgtacgtggagattttgtagtctattaaattttagttgatgcataatgttatctttcatattttgttataattttggagtggtttggttcttaattattgggtaatttttaggatttacctgtggttgttttgccatttatgcttatggagggaactgtattgactctttggaatgggactatttgcatgcacaagtatgatgaaaatatatatgacttgttaaggtttgtgtatatgtaatgcagagttgtgcttggttttcctggcttgtgagtcagttaaagatttgaaagactaagaggcaatgtgagaagcttcttttgaatttgtttatggattggtactgaagaattgttgtggatattagaattggtttgaattgttttgttgaggatttgcgtatggtactcacttactgaggcataaaaaatgattggaaggaaaaacatgggtcggccatccccagtgcttcttgttcttttggtgcttggatttttcttcgctacatacaatctattaaccatcgtaatgcaccacaaagcctctagctcagagaatttgagtgctgatggattgaaattggtagaacccgtaagactaatgcctgaagaaacgaagacagatgagatttcaaaatcaaagtatcatgtcgcccttacagcaactgatgctccttacagccagtggcagtgtcgaattatgtattactggtataaagtgatgaaagataagcctggatcagatatgggaaagtttacccgagtcttgcattcaggtacccctgacaatttgatggaggagattccttcattcgttgttgatcctcttccacagggcttggatagggtgagaattgtttttgtccatcttgtcattattgtctcattttttttatgagataagattctatgatatttgcatgtaaaatcttttggatttttaaatatttttgtattaattggattccttgcttcaaatagtttgttggttgtatttaaactcatatagtgactagggaaggctagacgacattatttgcatggtctaaatattgtattaggctgaacgcacaaagggataatagtgttattcctgaaattactgaacccacaacatgcaactaggtttgaatgatatcatctactgaaccaattgtgtttaccatgacatcctgctccttcatttggcttatgtttgtaatgtatttgttctaaatccatttgttattgctctttcttttttcattattttatttatttatttatttattttccgacaatcaaacttactaacttgtactaatgttgtaaccagggttatattgtcttgaacagaccatgggcttttgtccaatggctggagaaagcaacaatagaggaagagttggtttctaaatcttatgtctcctgaatgtttagcctttctcaccaggttaattctgatatttggcactttcatgtatgtgacaactacaggtacattttaatggcggaacctgatcatatatttgcaaatcctttacccaacttagcaaaaggaaatcatccagcagcatatccatttttctatattaagcccgctgaaaatgaaaaaataattagaaaattctatccagaggagaatggtccagtgaacaatgttgatcccattggaaattctcctgtaatcattaaaaaggtacaattctctcaaagaagtgttatactcaaatttctgatgcagacatttcattttttgtgcttgttgctgaagaaattaagattctcagttaatacaacatcaacatatgaattgcagctgtgctgttttcaatttttttcacatcatcaaaagttttacaatatagtattaaaccaattcttctgcttcagtccattctggaggaaattgctcccacgtgggtgaatgtttccttgagaatgaaaga

SEQ ID NO: 266859 - DNA, 4976 bp, Cannabis indica
acctttggacacatagatatctcttaattttttttatttctccaggtttttgaaaaaacttctcactgaggatttgccacgactatttgtacgaccaaagaagattgttttagatttccaaaaaggtaaagcagttggcccagatgcaaatgattcaaaatctggagagatagaaggaacaaaaccaggagagcaagaaggaaacaaggattttgttggagagctatcagtgactcttgtcgatgccaggaagcttttcgttctctatggtaagaacacaaacccttatctaatctacctacatttctcaagaagagaacactaatttaataatttttaattctcaattacactagtaataaactcgtttaattgtacttattatagataatcttaccataattattctaccacttcatgtactcgacatactctttgctagtggttagattcttagcatcatattattctgattcctgaatctattaatatattatatacaaacaacaatccaacttaatgcaaatcagccatcatttacacttctttccctttttattttttaatttgctctccaggtaaaacagacccttatgttactctaagccttggggatcaagtaatacgtagtaagaagaacagccaaactaccgtcatcggcccacctggtgagccaatctggaaccaggtgaagcttcttagcctgactgcttcatgtattaagttgtacatggaaaaaaaaaatacatgtgaaatcttttgctttctatatgtgatataattatatggtgcaaaattctacctctaatatgtattatgtgcttgtgttgtgggcaggattttcatatgcttgttacaaaccctagaaagcaaaagttattcatacaagtaaaggattctctcggatttgcagatttgacaattgggacaggagaggtaatgtaatatatgtcctttacagtctttgatggtaatgaaagttatctattgctatatttgtttttattattttcatttttgtaggtaaattttttcttaattatagtttttgttagataaaactttccgaccagtatcgcatttaagattatggcattctctagtacgactatggttaatatcaggtgtaataatgtttcaagctttttgttaaggtcttatgtgtgaacataaatgttttcagtgaaaattagcagtcaaaaggaagttgcaattattgttttaacaaattattaatttatattaatcgtttacaactaaattgcacttttaggttgatcttggatcccttaaagatactgtaccgacagacagaattgtggcattacaaggtggttggggactgtttaaaaagggatcttctggagaaatcctacttcgattaacgtataaagcatatgttgaggatgaagaggatgacagaactgagtcaaaaacaattgatatagatgcttcagattctgatgatgatttgtctgagtctgatgaattgaatgcatcttttgtagtaggtcaaatagaggatgctagagaagctgaagagtcatttatggatgttctagctgccttaattgtgagtgaagagtttcgaggaattgttgcatctgaagctggaattacgaaaacattggatgacacgccaagtacaggatcaacttcccctagatcaggcgttcgtgacactgaatcagtttctcaaattcctactaacagttcagaagtttctcgaggtaatttccattcaccgctaacagtaatcatcgacatgtttggattggtttcttcttgattcacagtaaagaaaacttgtcgattgcaggattggctttgttctggctcgcagttgctactagtgtatctatactaatctctatcaacattggtggttcaagtctcttcaatccttaatgtttgccaatagtcctcggggaagtactgattttagtgcttttctttaatcaagtaattattctcatccttcttgactgcatttatttattttcttcataaacttcttcattgcttcacttgattcttcttttattgtctggtaaatattaataagtagaagtagtagtactagaaaagataagtcttaagtcatgcaatgcttggtcaaagtgcattttttgccatctttcaaaggtgaattagaatttttgctccctaaactttgacatgtaccaaatcatgctctttgaactttttaagctgttaaaaattcctcctaaactattgaaattgttagatttaaggacttttgtccaatttcattcaattttactaatgtggcgattgtccatgtactaaatcatgcctcttgaaatttaatatctactaaagcataccctttgaactttaacatgtaccaaattgtgtctcttaaattttcatccacgtcaaactttctttagtaaaattggacattagttcttaaatccaacaatcttaatagtttgggagaaatttttaacgacctgaaaagttcaagggatatgatttgatacatgtcaaagtttaaggggcaaaaattcaaattaacctctttcaaatgtagtagacagtagcagctagctagttagtagtagtactagtagttagctagttatgagatttgatgaaatgttgtgcaatttcaaattggacaagttaatatctcaaaatagtaatgataacatagtttgaacaatcaacttttttgacatcgtttattctgtgttcattgagttttcaaactaaagcatgttagccaaaagcactgttgtgaacccaaaaataaagcatcttctttcatggcaggttcgttcggcaacaatcggtatagtagataaaatttcaggaaagggtcagcacctcccagaggaaatggttttgcattgaatcctagcatcattccaacctgtaaatttgtagttttctagctgaggaatgtcttgttggcggcagaaattttttgctcccttgtgagtttatacacaagcaacaattttagtttctatttataaaagagaaaagaaaaaatccctctaatcttatataatatggtgttttttggcctcaaaatcaatttattttggatttgctaccaaaatatttatgaggggtcaaaacaactctaacataggtttttatattcttgaaaaattgtaaatgtaaggttgttaaatcgcaaggagcttctatagggtttatttgtaatgaagaaagtttatacaacaattataatcatgaaacatgtcttattgttattaattgatcttcttttttcctaaatcttagcctaaactcacccaatttgttttgctaacttttaagatatttccaatatgtaatttataaattgtgaggttggactagtgaatagtagtagcaaatcaaaagattcagaattttgagaaaaagaagtcaatttttaattgatttttttgaaacattcttctttatttatttttcaagcgattgaatcaccttaatgacatgtttaaccatcttcaatgcatgtcctcaaaaatgctaaatttaataataataataataataataataataatagttaattagctcaataactgattgatataaaagtcttactcaaaaaaatatatggctgattattttttgttaagagtcttcccacaaagttgtcaagccggctgggaactattagagtggccctcactttggctctctctcaaaaggatggcctatttgacaaattgatgttcagaatgctttttttaaatggggatttatcgaaaactatttatatatcccaatctcctagcttcattgataaggattatccctcttatgtttgcaagctcaccaggactctctatggccttaaacagattcctagtacctggttctcaaagttgagctctgttcttcctacttgggggttcatgtggtcaaaagttgataactctttgtttattctacatcattcatcacgtacaacacttttatgttgatgatattcttactggtagtgataagcatcacactaataggtttatcttttcataatggtgaacctcttgaataccttatagagaatagaagttttgtatactctttataatatgttcttatgactcgttcaaacatagcctttgttgttaacagggcatgtcaatttatgcatgctccaaccactactcacttagtagcaatcaagagaatactttgttatctttggcaccaaatctcactgtataactctgtctgcaacttctctcttcaccttttatagccttcacagatacagattgagcatccaatccaaatatcatcaaagcactaaagattactttgtattccttggagatcgtatcatttcatggtcttcctccaaacaaagagtagtatcctagagcattgctaaaagtgaatatccaacatttctttatggttttgagcatttctttttattgtctcttgttttgggcgttgtaaggaactatgatatctagtatacttatgaggtggcatggcatccgaataagtagaattcgatattaaatgacactttttttaatttaagaatattataaatcattctcaactcattgttttattttttttactatgaggcatttgctttataattagataatgatttttaataatatttattaaagttaaacaagcgggactcgatattgagttataccaataacgatattacaactaagcatcatgaatgcattttaacattttttatttttttttaatgacaatgaatagctttattaaagtgaaaattacatgaaatatgggatttcataacaaagttagaaaaatatggcatttttaggtttgccacttttctatggcattttttcacatttaagttttttatggtatttgatatgccatatttttataaacttattatccaatcccatattttatgtttttgtttttagcttaattagttttatttatttttttaatttattttacacttacat

SEQ ID NO: 266860 - DNA, 1280 bp, Cannabis indica
tatgacatattatataatgtcataggttctaattctattaacacttttttttttaatatttttttatatatatttctgaggctgggctccaaaatttaattccttttatgctcatatattctcagggccgactctacttgggggttaaggaaatttttagttggatcaaatttaaagaatggcagcaaagctagtgtgcagacaaatcgtcttggtgtagttcaagctctcagaatttcattcaatatgatttcttttccttatttggtcacattattagtgattgtaaatttttggctttctgttgagaaacattccctttttttttttttattaaaccatcagtatataagggtacaaaaaatcttacttttaatcacaacaaaacttgtgactaaaagtaaaaaagttgtgactaattattaattatcattcctatgttgtgactaaaaggtccgtggctaaaggtattagtcacaaatattataatttgtggtgactaaatgtagttttagtcacaatacttattgtgactaaaagtaaattagtgactacttgtgtctaaatgcaatgttttagtcacaggtagttttttgttgtgaccaaaagtcacatttagtcacaaaaaatttatgttgtgactaaaaagttgtcactaaaagtaactgttttttgtagtggttgttcatgcttttgcaaaagcttccttattttatcttgtttgtactttttagttggaggatgtttcaattaatttgctaccttatttagtagctaagtttgttaattaataaaagttaattttctattacaaataataataataataaatgtgactcaatattaaattacaccactaatattagttgcgggcaatgccattatagcatttaacttcttaaaatgatataccattatagccattgaaaatgcaagggcggcttccaaaatctccagtgacatttaaaattcccgctagagcagctaacaagccatattatagaataatttataatacaataaaacaagatcgatcaaaaaaaagctggatcgatactatataataaaaaaaaaaaaaaaacaaatagccaatgcaaatacagaaaatgtaactaattatataattgtaaaaattataaggaagaaagaatgaatatataaacctgtgaagatagagataatattgtgagcctttaagaatggtgtccttaatttacatatgtttcttctccatcttttggttttggtgcattttcataagctttttcatttatagcata

SEQ ID NO: 266861 - DNA, 3863 bp, Cannabis indica
aaaaatttaaattcagtttgtaaacctgcaaagaattccctcgaataaataaagtctgcaaggaaaggggagaaaaaaacgtaggaagcatcgggaggaggcatggccggacgacaatacctttcagcgcccgacgccattacactccgggaagcctctcattcgagggcaaaacctacaattgccgacgcacgcctcctccaccgtgtcgctcaaccatcatcggccgctctagaagaccgaattgcaatccagcaccgcgagatccaatccctacttgtcgacaaccaacggctcgcagctacccacgtggcgctcaaacaagagctctccgccacgcagcaggaccttcgggttttatcggcggctgcagcaagcaccaaggccgagaaagacgctcaggtgcgagatgtctacgagaggtcgttgagcatggaggctgaggcgcgtaaggtcgaagacgtggccgccgagctggctcaggtgcggctcgacgtccagacactcagcgcgagtcggaaggagctcgttgtacagttgcaggccgtcgaagatgaccttgccaaagctcgccttgattctaagccagtcttggctgtcaaggctgacattgaaggcgtgaaccgggagattcaaagaggaaggtagtttgtttatacagttctggctttaattcgttacatatataactaggtttgatgaattagagaattattcccaagtacgaaagtgaacttttaatacatctgtatgtgtcacaacctttgttaaatatgatcatatagacttgaatactaacttttccccatttgatactgaatgctactatttgcatgtttgttggtttatgaattcggtttgaggaaccaataagaaaagccattcttgtgtgtcttttccatcttttctaatttttagctaaataattttattcaatgttgtcaaatttaataggttgtcttagcctaactggtaaccacactccacctccagtattgaggttgcctcacccctaattggtaatcaagttctggctgctgtgagaattttactttttctttttcgttaattgtggatggatgatacctgaaaacctttttttgcactcggttatgaatttaataataatctataactgcttagaactatgtgtttattctaggaagatattgataacatagcagcatggtggtgctttagttttttccatttatagtgaatgtggaactcccgaatatagtatcttttaagggaagaaagcaactgaaagactttccaacaattttgagatgcatgtttgaccgcgttctatcattctatgcatgtgtgtagggatgcaatcgaacaggagaagaaaacccgtgtccataactctaagcatcgtcagataatggagaaacatatggcttccatggctagtgaaatagagaaactgcaaattgagctggctaatgcagaaaggcgagcaagggcttcagttgcagccactgtagcaaacccaagtaagttaattccagataatcgtttcctcttgagctgtaatcattttcaaaattcaactacacttgagggtctttgtttttttttttccttctccttttcaaattggtcttcaattataagttttttaatttagatgcagggtatggtgcaatctctggaagcactgaaatggtctatggaggacaatcatatcccaacccttatagcatgcatcaggtatggccttagaatttcatcattctctttcaattataagatgtttagggaaatgtggtttcctaattgttagatttacaccgtgggaagaaagatataagactattagcatcttcaccaagaagtacacggccacacatgtttgatattctctaataagaaaataataggtgatcaccttatatgtcattacatacttgtccttagtatcatccagatagatcctataaacagtacataacatgtttcacaaaattatatattatgagcacacagtggtgcggtggaacccctaatgattgtagggaacgcacactaatgagggtttttggttagaggaacaaaaacacatgaatatgtataagaacaaaatggaataaaatataatgtgcataaaaaaattattattttattttttatctagtattggaatggtatttcttcctattttttaagcagaatattcattccaccgaaataatagaaaaatcattctacaaatgacattctaataatttaaaatgcaactaaataaaagaataaaatgaaacatttagaatattttatatttgaatttgaaatacaattaaaaataaactaatattttagaagatattttgttactccagtactgttatagtcttctggttgcctataatttcttaaggcagcttaatgtagcaggtgacaagcaacaagtgataggtctagctcgtagttcttaggtagcacattgaagtttttattgagaatggtgaggtccttagagagtagagagcaagaagctcgttactatggagcatgtattcatgttgtcactttgtcattaccacctaatattatgagatacttgatcactttcttagacggtatatcagttttctagacagtgtttgttgtctttataagttaactgacatgtgttgtcggaacgagttcattcatatagtcgagtttttaatcagcttaacaattgtctctagcttttgagtccgttaaagtagagctacaagttctgtgcataatatacatgttgatcttatgaggtatttatcagttgtatatactttacaacctaaagctaatggaagatattgttgcagttcaggtgtacagttattaataagtggtgtaaaaatgttactgacggagtgctctcttgacataatcctccaatgatgaaatttatagaagacacaataatcatcttaaccctacaagtagttttgaatgaacaacttagatattttctacacttaatgatttataatagacagaataatcatcttaaccctacaagtacgttagattgtgaattatgcgattcagaaacaccacatgagattaacaagtctactaggcacaaagttttagctttacttcatggtctttaaagctagagcaactcatgaggtcagcgagtattagtctagaaaattgatattcaatctcaataagtgatttaacatttaagtgtctaaacatataactaagataaaaaaattgaattttcaatctcaataagtgatttaagtgtcttaacatataactagataaatgtgaggtgactaatggatagtttgttatgagggtttgattttttggaaatgagaatttaaaatcaaatttatgtttagtatgatttaagtgaagaatttatatttgtgtgggtccaactttgaagtttatttttaggtaaactcaaattaacactttgagatacccaaacaccccataagtgatgaaaagctaactagaaagctacaaccttctacattaggaatgctccccaaggacctactccttgcatacgatatatactcttaagaatttcgagatgttacctaagaattacgagctagatttgttgcctatttgtcacgtgtaacacttaaaaatttgaacaaagaaaaaaaaagaaacagaagagataatgtaatattatttgtatgttgaatttgaattatattattttttatatttttttaaaatggaatattattttgtatttaaatagatatggtcgcatttgaaagtgattatcttgttatttaaaattggaatcagtcgacactttctgaaaacatgatgggaaataaccattgtaaagtggcttttgttttctctttacaaaaaaataaaaa

SEQ ID NO: 266862 - DNA, 4593 bp, Cannabis indica
cctcgagccgacttcttgttatcagtcctgcaaccattagaaacatatacccaattatcctaagaattttaaaaagtgactaattacagtcaagtatttacaaaggaaaacttttcaaaacgaagaaaccaggaagtgggaaatggtatcaccaacctgtaagacttctccatgcacagatgatttaaaggcctctagtaacctccaaaaggaacaaattataataattggattcaatgctttgaatttgaaaccagagagctgatcgatgaattttctgcaatcccaatttagcatctctatcttgaactgcaataaacagacaagtcaagcaatatacttcatcaaaatttacaagttttgcttgctttaaacaagttctgaacattctacaacatgctataaaataaaaaaatgatgttctttcatacctcttttaaagagccatcgcccaaattttcaaatgcttcccattcagtctttagtattggatagcaggcttccaacaatgccacaaattgaccagattctgagatacaagaaaaattaaaatcaaggcattagtactgaaaatatcagaagagtaaaaacaaaaaattgtttctacagcatgcagagatctacccccgagagacaagcaaatcaaaatgatagattaacctttaaaaacaagaaaagaaaaaggagaagaaaggcccgccttcacaaatacattgcctaatattttttttttatttattttgtgcttccgcaaaattattagagcaagatttgtttctatcaacatttcacttaattttcttttaatcaccaaactggatgtccatgcattttaactaaatactactgcaacccgtccaaaattcattaagtgcttaaaatgtttgggacagctacttacaccagatatttatctaatgaaaacatataaaagaatatgcaaaagaaagatacaacaggagaaacatagagaatcaggcaccagaccaaaacacaaaatcataagaatgacttatttacaataattttttaaaaaaaataaataaataaatcacaacaaacaaaacaaaatagaggaaaaagcatataattgtggctgaggggaataagaaccatactatttttttgcattaaaaatgactgcataataaccaacaagaaaagtgtctttgatgatgtagattctttaaaatcctcagtaatcaaagcaatatactgttcaggatgcattaagaatctttctgccaaaaaagtaattgtgtccatattcattgaagaaatgcttcctggttgcagcacctgcattttgaatttccacaaacaaaaatagtttaatatctatcatcaccaaaaaaatgctaagcaatcaaaaaataaaaatatttcaaactaggatccccacctaaccctgcaatatttggggatcatgaaaccatagcaatttccatgtaggtacccaaaagggactcaaatgtcagatcttgttggcgcaaaccacatgcctgaccatttgagctacccttcttgggtgctaagcaatcataattgaatcttaaatatatatacaaataagaaatgaaaaaccagcaaattacaagagataaattggaaagttctacttcaaataaattaaacaaattcctacataccaattctgtactggagaggctaggaagattcccaaaaagaggccaagtcaaattcttggctgtttccagcgctttcaggtttaacctctgagtctggattcagtaataatacacttaaaacttaaacagagaaataaaagcaaagaccagttcctggttcaaaaatgtaaaagtaaaagaagtacaccaaagaaagtataggcaaaaaaaaaggacaaccttcggcagaactaagagtagaggacagatcatggcagcaagtgtattcatatgatccttgtgatcacgagaaataaagtctaatttcttcaggcaacatagagcaacatcacaagccagattggtgttctctgatgaaccttcaagcagaaatggaggaattagatgaggttattcccaatttgatagatatctataccaatattcggcaggagaatgcataaaaaacacacccactagaaaaaacaaaagttggctaatgattttcatgccaaactgccgaagcaattattacatagcaaactcacttgaattaagaatacgaatgcaccgcttaagcacgttattcagtacttttagaagctcagttgtatttaacatatcatttattccatcaagagaaacagcagccctcacaacagtaagatcctcatcatgcagctgttgcaatatagcatcttgaaccgatgaaaagccctgctccagaagagatagagaaattattagtaaaaagaaacgtacaaacataaaatttaaaccacaagctaatcaactaagaagtgcagagaaaatacagatacaataattacttaattttacagcacttgcaaaaaaggtgagagaaagaagttactagtatcaaacacaatgctgccaaactgaaaaaggcaccactaaatgattgtttaaaacttactaaagatagttaacctcctatgtatagtaagagtgattggttgaaacctaacggcgatacaaacagtccacagaatgtaaaaaggaacaaatacaatcaaagaacaaattaacttcactaaatacaacctgtgggtcagtagccttggctgtcaagacactagttgcatttaaaccagatagcacagcccgccgcacatcagcctaaaacatgaacgcaagtcaatagaaagaaaattatagaatgcccccaagggatgtgcaacaactgaaacagagttatatacaagaaattattgaaaaatcacattaccttgggatgatgcagtgcaaaccaaagttttgaatgagaaagtgtggcttgtgacaaatccaaattatcatccaagaacttacacaaaatatcatactttgaaacccctttcttggacttgaacctttttttcctgtcaaaagacatgaaatataaaataaaagtatataaaaaaaacgaggggaaaagaaagacgagaatgaatacatactttaaggaatttgcgaagcgcttcttgtacttctgatggataattcttattaagaacaaataaaaatttcttcaccatgcttcctatttatcaggaaagatagtagcagcaataagaaccctattgcaaaaataagcaagggcaaaatgatatgaaagcagagagactgtaaaaactatttcaaaagttggggtttatatatacacatcatatacttatatgaaattccccagccagattcaaactgcttaaatggaccaaagttcaaaactggagtcttcctcctaatgtacctgacaaggatgatgttgaaagggtatctttttctgacgctttcaagcaatgagataggaccttagtgaccagacggttaacaaaaccctttataggaagtacctccaagatcgagatcaatacatgatgagatgattcattagaaaaactgcaaacaaaaagaatataagtttatactaaagaaagaagatacaattacaagtaatgatctaaaacaacaatcttcctcctcacctgtagtcaatattgagctcattaaacagagtatccaaaaacacggacaggaatttgtcaatattgaactcattaaacagttccaaaagaatcccagcgaaatcccttcagattataatacaaaacacaataagaaatttgaaaatacagataaagaagcaatatataaccatgtggaactgttcaagtatgtctacgcaatcaacattaccggatttccatcagaatctccaaagccttttttgggaccatattaatagattgcaactgaaaatttccatgtcaacattagtagaagaagatcaaaattaatagtcacaacatatatatacacaagacaataaccacaagcaagtacatgcagtaacatttataatccaattaaggataaaaagggtgttgggcatctataccacacctatccttcaccagtcaccacaactaagatctttactacaaagacaaagtaaaatgtacagcaaaaaggcccaccttccacactgattcctcaaatatgatacttaaaaaggaaaattataaacaattgtgtggcccacataaccagaaatataaatttccagttttataagttcttatcttacactgttctaattttccctcaatcagtcatttgccataataaacagaatttcttgttatcttctgctgacgttagtttctctttgtttttctttatctaagcattgctccactaaattgcatgaacaattcatacacaatacacacaagtgatccctttcatcttataacataaatgagcttgaaaacattattaaaagaagaattttcacagcaaatatcaatgaacttaaacattatttatgctaactaatcaatgcatcaaatttagattcaacaacaatctccagattttctattagaaacaagacttgtattaatgctcggaaaaagaaaccgcaatgaataaaacaaaataattacagaaaaatacctac

SEQ ID NO: 266863 - DNA, 2039 bp, Cannabis indica
taagtggaggtttaatccaacacatatatatgccaatggattgtggatactttagttttaccaataaagttcacagttaataaattcagtacacacaatagataattatatcaaactaaaattttgattatgtctcactagctgattaatagtgaatacatgttatacatttattgatgaaccttaaaattataaaattaatttgataattaataattttaaatgataagtttgtcattaattaatggcttaaacaaaacttagttcgaagcgaaaacgtgatatttgggacagatcgataataagtttcttccctaattaataataaatataagtctatcctgtacatatataaaatattattaatacacgatcataacgttcactcctctaaaaaaatataaaaacaaataatgttttgacttaaaataagagtttacattaagctattcgaaaaccaacatgtttgcatgtcttgacaaaattttgtgtatattagtgcttcacacgtattccatatatatatccacaacaagacctataaaacacagtgtcttatcagaaagaagtataattataaactcacattttattctaagcttaaccatggaaataatgaagttatattacttgatgactctctttgtttcaataatttctccttttgtggtgttagccattaatcctattacttcaaaaccaacaacctcttcatctaaatcatcaataataaaccctaataatctgcctgcggaagctcttttgtctgtgtctcattataggaagacatgtcctgatgctgaggccatcattcatagaagaatgagagcttggatcaacaaggaccccacattggctcctgccatcattcgcctccattttcatgactgcgctgttagggttagtgtcatgtatatttatgcacaatattccatatatatatatatatatatatgattaattttctactatttttgatctaaaaccatatcttatatattcttagggctgtgatgcatcagttctactaaaccataagggaagtgagagggcagctctatctagcaaaaccctaagaggttttcgggagataaacgatatcaagagcgtacttgagaaaaagtgcccgaaaacagtctcttgtgcagacattctagccgctgcagcaagagacgcgaccatctttgcgggagggccattctgggaagtcccattcggccgcaaagatggtcgagtttccttagccaaggaagctgaattagttcctcagggccgcgaaaacaccaaaggactaatcaaattcttcgaggcccgcggcctcaacatgctagacttagttgtactctctggtgctcacaccataggaagaagtgcttgtcatgctttccaacataggttaggcaaaacgcctgatccatcacttaacgtgaccttattgaatgtggttaggagaaaatgcaaaacgggttatagcttggtggatcttgatgcaactactcctaagaaatttgatacaatgtattacagtaatctgatgaacaagaaagggttgttgtccactgatcaacagctttattcagaccaaattacctctccttttgtctcagctttggctacacagcctaatctctttgagagccagtttgcagtttccatgatcaaacttgggaatgttcaagtcaagaccaggcctcgtgataagggtgaaattcgagtgaattgcaattttgtcaatgcttgattatttgagctatattataataagttattttaacaagtaatattgaataatatatagttatataataaagtgaagagacagagagtttaatgtataagtttctaatactagattttttttctttgaatattataatacaaataatttggaattcaaactcaaaacctctaacacacaccactatactattttccatatgaagtatacaattatagagccctaacacgatacaaaattccaagggtaataatataaatatccatatctatatatataataaatgtctactggataaaaa

SEQ ID NO: 266864 - DNA, 2071 bp, Cannabis indica
aatttaatataatacaatacgaactaatacgacattagttaactatatatatacgtacctttattgttgaaaaatctataatatatattaaacaacaaatgatctaatatgagaattaaattggctatacatagtgcaaaatgcaaaaatccaacaccgcccgcaacatctgacgttgaaaaacatgaatttaattagaaaattatgggacagattaataaatatataccatcattattaacttggccacgttacttttttttaatgcatgtaacaacaaaaaaatgaaaaaggaaaagataagtatatataattaggtcttgtattttttaaaataatattaagaagaattatagcaatgtgatctcggataatatatatctactgcgtatctggttatatttttgtttattatttgatacatatatatatatacatcactgtttgactaacttcgctatctcttaagattatgttagattgctagtttttacttaatgatacaacaatctcaaaatattttaaacaattgatacttaatatttttatttatatgtatgtatttatataattatggaacaagtatatgtgaccatatatgtagtacaaataatcaaattgtaaacctcctaaagaagaaatggacggttggactttataaaagtataggctaaaattttctcactatttttccctgattttttttaacacttttctctccaaacggataacttatgtgtgtttatataactttatatttatataatttttttaggatcaatcaggagattttcgtgcaaattttatcccctttttttccttttctcttctatagctaagaagtcatatgaaaaattatcttttgtactttcaataataaatcaattaaattaaacttaacccaaatttatttaaaagagtttaaagagcttcgagattttcattgaaaataaatagaaactataaactcaaatatatgaatggtgtttttttattattaattataattaatggtgttggtttcaactgtatatcgatgaactgactactttttgattattattacaaaacaactgtaaaagttgaaaggaccaaccaataattgttgagcagtttaagtcctctgatataattcatgtgccacgtggcacctttatatatgagttcttgttgttgctgccctgatttgatcatatattccaacctagttgtcagtcatttgtaaagacaaccttaggcactgttaagaatacaagagccttgccacgcgtcaaaatcctgacgcttctttttcctttttgctggcttcctcattgattagtattcataagtgataacactggtgttcttttgggcctcgaaagatgcgagttccataagaagaaattaggcccaaccatctctaaaattgaaagcgctcctttattttcattacaaatatggacgtatcctctatttaattttagggacttttacaaaaaaatctattgaattttaagaaaaaatttataattttactttcgaatagaattttttataaaaatattttatataaaaattgtaaataataaaatagaataattaaaataataataaaataattaaaaaataattgtgaaacaactgtaaaaatttaacacagtatacagtataaaacttgcacaatttttttttttaaaaaaaaacacaatatttttgaaaaaaaatctgtcacacagtgaaaaagtaaaaaaattagaaatttcagtatgtggtataaaaacccctaaattgaaaagaagaaattatagtaaatactttttttttttaaattgatgcctttaattttattttttctttcaaaatttattatgtttatctttttttttttaattattttaccaattttatccctattatttcacgatagtctccattcttctttaaccaaaatttttgccctaacttttttcacaaacctacacatccatctccaaaaaacacaatctattatatttaaaattgtatcttaattatatatgagtgtgagggtaatttagatacagtactcataaaaggaagtacatttgaa

SEQ ID NO: 266865 - DNA, 2490 bp, Cannabis indica
caaatttacccttacactaaaatatatgatggcttttatgttaaaatctggtacaagtttactcattattttcaatatatatctctcctagaactcaacattaaaaaagttaaaagcatcatcaccgtcatcataagaacacagctcctcttaagcactatacagagggagttattctagtcaacacaaataatctatattgaataattctaatgtaaaacacaaaatatcaactccctctccataacattagccaaaaaaaattaataaaagaacccataaaaaataaaaataaaaatgcttgttcacaagatgtaaagaacaaaaaagtatataaaggtttagtgtaaatttcactaacctgcaagtctccaattgcagtttcactaacatcttctagatttggataattctcaaagaggaattcaatcaacataccaaactgaaaaacacagaatatttctcatcaggaaaaataaaaaattgaatgatgatagtagtagatttataacagatatctaaatccattctttaaccatgaacgcctagaatgctacaaagctagtagtgataaagtacaaagcagacaactcacaacatatcttgccttcaaccaatttgcaatcatcaaaacatgtaatatcatgagcgtaattacatctcaatcactatagtactactgaagagcagcgcatacagcagtaagctagtgctgcctgcaattagctaatgtcatccaaccatgtaatattacaactgtaattatgtttatacgtaagcggatataaatatgttgccaaacataaaaaatgcaggaaacaattcatgaagatttacaacacaagaaacacctccctcgagaactatctagactataccagtcaatgtcaatatactgtttacaaaactaccatctacctgtgttccccagtcaccaacatggttacgccttaggacatcaacatttgagaactcaagcatacgagctagagcgtccccaatgatagtagaccttaagtggccaacatgcatttcttttgctatattcggtgatgaaaagtcaactacggcccttttgacttcaagttgtggtgcccaagtttcaataccatcgcgaagcatattttgtatagtctgcagcaccagcattttacaattaataatccacacatgacagagctataatcagtttccatatatataaagcaatatgaatacacaaattgcaaaataaaatatatgtttcatatgaataaacaaaattaacaaagaatgattcttctaaaagttggcgtaaagtttcaatcaccaataaaattcaaaagtataccttagctatccaactctttgataatacaacattcacaaatcctggtccagctacagagcatgattctacaatttctgatggcggaagatttttcatgatggcctataatattgaataaccaataaattatccatcctaaacatgtgaaattccacaaccaaccagaaataatcaagttcagacgaagaaaaatgtacaaacaaaaaaaaaacagaatctttacctgtccgacagatggaggacccctaaactcagtccctttgccttttattttagaccagaggcccatggcattattacttcaccaaagaaagatatctcaacttagaattcaaaacatacagaagtatacatgaaaaaaaaatccaaatccacaaatatgtccggtaagaatactgaagaagatgttcatgtgcttgctgcttaccactgatagtcgccaaattttccagtgcaaggagcgatcaacggctctacatcggactcatctgggactattgctctaagcgatgattcaaacagtttggccaactgccgcttcacatttccaactctttcttcatcctatatcaaacatatccaaattaatttcaccaccatcccaatgatcaatacattgattgagcttcatattgaataaattctattacttccgaaaaaaaaaactgacacaaattaaagttaaaaatggtaaattgaaataacttacagttgccatagtcgaaagcggttgtgtctgtgttgcaaatacgagttttttagatgccgccttcaacaaatctgtctagtttacataccaccacattaaattaactaaaaattgtaaacacaaattggaaactacatacatttctaacaatattgtctggtccaaataaatcactcgcaaccgtcgaaatatatacaaaactgaaattttcctcccaagaaatgcatgcagcaaagtaagttaagaagtaaaatgaggaatccggaccctcaacagttttcagcaaatttgttttcaaaaaataaaagcagcaacactaactaacttaacttcaatttctcttactcactcaaaattttcccagtgcccaaacagaagagaattaaagccgaaacatttagagatagagaggaagaagtaaatagataaataataagttagagcttaccag

SEQ ID NO: 266866 - DNA, 1096 bp, Cannabis indica
tcttagtatttttttttatatatattttaataatattttataaaaacattacaaaaataatagaaaaacaaaataagaataatatacaaataataaaaatataacataaaactaatatgaatatataaccacatatcttttcttttattttttgaaaaaaacgtttctttttttgttgttttgaattttgtcatttcgtggtaataagaaatgtgagaaaagggaaatttaggttggaaacacggtcagttaactcagtgaatgagtgggtcatttattataaaacgtgtccccaaaacaaaaagattgaaaagttgataattctaattccaatacgaatagtaatagatttagaaaaccacacgttaataaatcccaatacgaatagaatttaagaaacttcaaataattatttgtatatatattaggttgaccgcgttcctagcctaaacaaacccattataaccatacacgttttttcataatataaaaactttcctttcaaattgaatctcaattctcatataacaaagaatattcttcttcaactgttttctcttttaattttgtttgtttggattgttaattaactaattaattaattaatgattgcaaacgcaagatcaagtagttgttgcagaggcatggagggtattgctatgccaccagagaataagaggttgaatatagaggcttctagtagtaacccattatctgctatagccgatgcctttgaagatttgtctaacctcattattaaccatcagattcatcatcatcatcatcatgatcatgagtgttttcggctgagattggataccttttctgaagcttgttctcttatttcctttctctttggttgtcttggcttagctttcaaatttgccgagtgtgaatacgtctctaaggtattaaatttcatatctcataatatttttatttatatttctaaatctgagtctatcttattatcattaataataattttggttaacggttttaaaaaaaataataatgttgaatcttgttttttggtacaataaattattttaaaatttactaaaaatttgtgagagattttttataagtacacttt

SEQ ID NO: 266867 - DNA, 2570 bp, Cannabis indica
cataagaatttgacccaatctcatattcgagccccagaattcaaaactggcatgaccccaagagaagaacctccaaaaataaaaataaagttgtagtagagaaaaagatgttctattattatttcttcttctttaccacaaatattacaaatttttattaataactgtttcataaaattatattaatttttattaaatgttaataattataattatcatggtaatcataatctgtgttctaatattaaccagcaaattaattagtcatgtgttatagacatgattaataactacataatttcttctgtattttcatgtatattatataatgttatggttatttatttgaacatgtatttaccacacaatatgcataatgcatctgaaaaattgaaatgctattataatataataatggagatcaatttcaatagagtcatctcttaacatagaaaaacaaaattaaagaaaaaaaaagtgatcattaataaaaattaatcttttgctttaagaaaactcagctcctcaaattcctttctcagtctccaatggttgcttcgatttagttctgcatgcacattcattcaaattaattatcacacacaaatataattaatacgtaataattaaagtaccactaattcaaattattaagttatgaaatatttcataagatttgcatgggtaagagatcatttcttacttatttatctgttacattaatttgacattttaaatattattaccctataagttattttttatttatatatatattttttaattttaaaataaattttgaaataaaaatattaggtgtatcaatataaacgcgtacaaaaatatatacataaatagtttattttagcagttaactggatatgacacactaaatttgttaacagttcaataatttaaaaaataattttactgttaaaatttgaacttaaagaattaaatacaagtgaaacaatatttaggagaatttaactcgtgaaaattctataattaatagggttataatatttatgtacacaaaatatatatgcaccacaacattataaccaaatcaattaaatgagatgacaacattgttattgttcggctaatcattatatttgataaagattacttatacactaatcaaaaaaaatttttggtattcaatattaatatagatcaatcatcttaagtattgtggtatatatataaaagagttatgaaagaataagttggatttagtataaatagtgacataagaatttaaatttttaaatttgtaagcggcataaatttagtgtttatttttagcgaaataagtagctaatatttgtaaaattgagatttttattcaattttgtcagtacagactccgtttagaccccaggaccagccctaagctaaggtgagttaggcccgacgcttagggcccaccctattagaggcccacataaaaaaacttttaataaatatacatattttttttaataatttttaaaaatataatttattgttataaaaatagtctcaaaaattatttttttaaggcccaaattaactcagggtcggtccttctagactcgatgatctagaattagggtcttatatgtaccatgtttaagacaataataaaatttctactgacgaaattaaaggaatattactattttacaaatattagatacttatatcgttaaaaataaacattaaatttatgttacttataaacttgaaattttaaatacttatgtcgctatttatttttgaatttacctggctcttttattctgaaaccaaactgaaacctgttgtggagttagattcaattcatttgccagtgcatattttgtggtctgcatttaataataataaatgagattgtatcatttttcaaaaaataaaaccataattataacatgaaattataacaattgaattaatagtaataatatatcatacccgatcaagattagaattactcaagttgaaatgattttccaagatagaaaattggtctttggtgagcttcaactttttcctactaccactattattattaggcttgtaaacgtcgtcgtttcgtgggttgtggtcttcaaagaaatcatctttttcttctggaaaaaggtcaaagcaagttaaaggttttttctccatcttcttctgtgtggcactgtacactaatccaatgcccaattgaagctctgtgttacatacttcatcttcttcaacaatattattattattattattcatgcttctttcttcaaattgatatgagaaagttgagtatattgcttatatatatatatatatatgggagaatatataataatattaagagattaaattttaatcaattagtatcttttttatttatagaatataataaatgtaatttattataatatttattacactaacaatcaatattacaaataattacatatttgttatactcaaattctctcaaataacaaatattcaagtttccttattttaaaataaaaaattctttatttattttggttttaacaaagaccattttattttccttaatttaaaaaaaa

SEQ ID NO: 266868 - DNA, 1686 bp, Cannabis indica
gtgttaatttttttatttgagttgtatatttatttatttggctagctcaagtattttataatattgtttatttttttttagttaaacttaaaaaaaaaaaagaaacatttattttatgtatataattaatttaagtttaaaatagaaattttacttgttaataatatgttataacagatcataaaaaaaaatatagtcacgattaatggttatatttttactctaactattaattactctattaattactcactatcatatatatgttgttttgaaacttattttatatacaatatacatatgaataagtttctttggaaacttatttttggattgtaaattattaatttgaaatttcacaaaaatttgaaagaggtcttaagattacaatgtacacatttatatgaataagaaaaatattgtatttctccacatataaaacaaaaaatcagatgctcctcttatcaatatcatcacatccttcctactgcccttaacctttttctcaagaaatctctcccaagcccttgttgttctctttgtcgttgtcctactgaatctgtgactcatgccttgctagattgttccagtgctgccaagatttggaaagtttctcctcttaaacacttctatgctaattatcgacatgttgacatcaaagagttcataatctctgggttttcacattttaacaaagaggaactaacactcttgttgaccactgtctctgggccatatggaactttagaaataaaaaactgtttgcaacttataatatgtctcctgctgatgttattgattggattaactcttatctttcagattacaatgaagcctagctaaatatgaggaagcttagtccatcccaaaccttacctgctcattgaaagcaaaagcaagtcaatccgggtttctatcagcttaatacagatgcggctttgagctcagatcaaggcaagcttggttttggggttgttattaaatattggaatggcaggattattgctgctctttctatccatgccgctggtgatctttacctgctgatggctgaagctttagcgctaagagcaagtcttcactggtgctatcatatcaaaattctgattgctgtcattgagaccgattcaaagcttctagttgatcggatttgtggaagcaagcgagatctttttgcgttatcggatgtagtggatgatattaggagttctttgtttttcttccttgatgctagccttcaccatgtaaacaggaaatgtaataataatgctcacttcttagcaaggaaggcattggggctagacaacgaattgagctggaacggatctgtcccagttttgtaatctctcttgttgctgaagtatccttttcgtcaaaaaaaaaaaaaagaatgctccaaaaccaaagaaaattcttatgtgtaccactacaaaaaactgttacttttagtgacaattttttagtcacaatataaattttttgtgactaaatgtgacctttagtcacaacaaaaacttacttgtgactaaaacatagtatttagctacaagttatcactaatttagttttagtcacaatcaatattgtgactaaaaacacatttagtcacaacaaattataatttttgcgactaatacttttagccacggacctttcagtcacaacataggaatgataatttataat

SEQ ID NO: 266869 - DNA, 938 bp, Cannabis indica
aatagagataaaattttgtaaaaataacgggaataaaattatgagttataatttcagttttacgcgtctaactaagcgtaaaatattatcagtagacactacaaatttaaaatggtatagtttagcaatttttacttgaagagaaatttgtaatatttaatatttttgcaaaaacaaaaatagtaaaatactatatttatatattaagtgagtataaatataacttctcatcggacatagtgatatgtgataaattacaaaatattaatttccaactaaaaaattgatagttttacaaagtatataaaattaaaatagggatgaaaaattggaatttaggtgcgggaaggaataaggttgtgggcatctatggcttcattatttaatgggagaagatactcgcataaatgcaaggaaacagatcttacaatattcttattgtggataggatgactaattttgcccactaaaaaaaagttgaattaaaaatagtctcgaaagtgaaattgaactatgccactttgttctcaactttgattcatttttttttattattattattaatttgcatcttctaaagtgggtatctaacattaccaacattacttagtccggtaaaaaaaatggacttgttaaagagtaaaatttaagcgcataagattctccaacgtgtggaaatctccatgttattatttgtatgtatactttgcatttattaagttatgtttcttattaactataatagaaagaaaataataatgaaaaggttatactagtaacttgataaaaaaaattatactagaatttgaaaatatttttgttttacaattttttaaatcacaaaagtgaaagtggaatttcttttttttttctttatttttgaaataaaattgtgttctctaagtactttgtttttcaattttttttttttaaagaaa

SEQ ID NO: 266870 - DNA, 2281 bp, Cannabis indica
atagcaataaataagaaataaaatttaaagtttgtttttatattttaataagtaattgcattgttatattctatagtttattaaatgtatgtgcactattatatgataaattttagattatattaaaataaaaaataagctttattatgcttgattaataatcttattgtattttactcaaaaaaaaaaaaaaaataatcttattgtattaattattattagtgttacaaaagtatattataattgatatttgtgtatttataggttttggtatcaattccgacgacgatgaaataagattattttagggttagggttggaacagacattataaagttaggactagggttggaaaaaccgctttaggattagggttgggaccgacattataaattacaactaaatgcgacattatttgggactttagggccagagatagaaatatacatgttacctatagttcataatttatagcaattgatataatcaatgtagttttggttcaaattaacttttaaaaaaatattatattttatgagtatgacgaatgataagtaatttataaaaaagaaaaattaataatttttttctccattttaagtattttttcatgtaataattaatatagttaattaccagtatgggacttaaaattataatttgaagaaatattcacaaaattaattgtataaaaatatttaaattctcttcatcataattaatttgtcaagttttgttgaagtactaaacattattattaatcaattaattaatattgtgcataaacatgcatgtagaattgtagtattaaaaaattaagaaaataatccaaaaataacctaaattgatagagacattgttgaagccaaatgacagcccccattagatacagaaaatgacttaatattctttcacttgaaaagggataaacccactcgtttgtgcttatttctgacctcaaagcaacttgtttccaaagtttgagaggttagttttagatgtcttttagaaatgagttttatagttaataattcatttagttcatatacaattacacttgcttcttcttgtttcaaattttaatgatgaattacagaactttggttgaaatggaaagaaccacactacaaaaaagttgtctctaaaagtagaagttttttgtagtgacatatcaaagaagatgaatatgaaggatttttgagttgtaaagaaaattctatgtttgaaatattaaacactctccgtttgtgctcggtaatgcttgtccaaaatttcaagctaattgtttttttactaaccttccttcactttctagcaaattatcatatgatcaaaagttgtagataatttgtttagtttttgaaatcatcttgaatcgtttaattttaagttagatcaagtgaaatatggtccaaatattattgctatacttgcagtacaatttcatagttaaatacagtcaataaaaagtaaattagcgcccagcgttattgagttccaaagaggatgttttcgggtttcaaaatttcacgtcatcgccatatgacagtactccagcatccaagtctgtacggatcaaaaaaaaattgacattgtaaaaaaagtaaagtggtctttcacacaaaatcgtttgttgagtgtacaactaaaatcccactattaactctataaaatagaattatttttcatcaataatcttctgtattgtgttagtttagagtcttttaggtttatttcttatgttttgtttattttattcattttgtttagttttagtattaatttaatatgttggtgtttttggtaggaaaactttgcaagcaaaataaagctaaaacttcaagcttaaatttgatcatgttctaagcagattttggaaaaagtgaaagtataaaaattttagatcttcctccgctttccaacacatcttgaatcagctcatttggagttcgtatatgaaagttatgtgtgctttactgagagaggttggagaaaaaataccttgacagagcgcaggtcatttacacgcaaatgcggatctatgtcggctgggccttttaattacgaatttagggttctttagtcaaattttagagagtttttcaagcaatgaacgacataggacattagagaacatagagacaagaagaagaacgaggattggatctgaagattggagcaagacaactctaatctagttttttttctttctctcatcatttaatttttggttttaatatctcttacattatcatgaatattttattgagattatgaacca

SEQ ID NO: 266871 - DNA, 987 bp, Cannabis indica
acccttattagttgacatactaaaattctatcgggtccgggtatatgatagtactcgtttcttccctataaataaaacaagaaaattaatttcttggaaagaagagttaagaattagggttatttaatcaaatagggtataatcacgtgtaacaaatattttggaacttttctaacttaatgacattgaggtgtattaaaattcgttaacactcaaagcacttataaatctgagtattttcttcttaagtttatttatttttataattaattttaaaaatctcaataaatattaaacatcattttcctagtaacaatgaaccaaatatactgttgtaagtaaatgttatattactattgatgtaaaatattgattttgttaaggttcatttataaagtgtcttcatgggcgatggagaatgggtttttggttatattctgacgtatagtatatacatgaagctctcattatcaatgacacgtggataagttagcagtactaatcatttgacacacagttttgtcggtattgccactattatatatattttaagctgaagagaagagaaaagaagtggaaactagacgcaggcgtttttgagtgttttaattaagatatgaccaggttcattgaatctattcatctgtctaggttcattcaaacatatttttttttttctctcgtttcccttattcacatttacattattatcgactgtatattttgctcttactcagccaacatacacagtactaattcatttcatttttagataattaaagcataggcaattcatttcatgtatataattagaaatctcgattcattcattcatattttatgttatttatgaacaagttagttttttaaaggagggattatagggagatatatgttaattaagtatttttttttttataaattcaactttacattttaagagttcgtttaaatgagattggttttctataagagagagagagagag

SEQ ID NO: 266872 - DNA, 3077 bp, Cannabis indica
gcatgagaaatgtgaagtgaagggagaatttggatacatgttgaagaggaggtcgttaatgaaggaatcaaatgacaatgcttacacatggaaaggtacaagattgagtacgaccacgtcctcaacatggcctggtggtgagatggtacaagtaatggagacgtattgtctgtaacccctgacttcctgacaacaggtactttgcaaccactactagcgtaactcgggaccacctgacatccaacaatagtacaaagcgcaagaccacctcctgcacttgcaactcgcagccacataaggcaaacttatcccttgaggacctcaagtgtatctcaggccatttgagcctataaataccccattctcaaatgagagagggggttggaaaattattgtaacacttgactccaagaaatacaagcattcctcttccacaattattgctttatacatttctttaagtttttgaatttttaaactttcatcttcatcctaagtcttgcgttttaattttgattttctggccttatatttgttgaggagttttaaacgtcaacaacaatgtacatttagaaaagaaaaaaaaaaggcattttactaaatattgtactatagacttcgtcaattttttataatatagatatttaaagtgttatagaatattttacaaaatattattattgggtgtgatggaaagattatgagtatataaggatgaacactatctccactgatatgagactttttggggaggtacccaaaaacaaaaccgtatggacttagtccttaaacggacaatatcatactaagagtggagatggatggcccaccaattataaattaaacaaaaatacaaataatttcataaaaaatatattctttttgtcggtatctatatataaaattattggaaaaatttatggtgcacccttcaaaaaaatgggtgtaccaataaactatttttggtactttagatatcaaaatagttttattgttaatcttttatgtacagtgtaaatcatagttatttaaaatattttacaaattttttaaaaattcaaaataatttatatgtcaaaaataattcaaacactctatttttttttatcacatcttttattttatatgtatacgaaataaattgttctaactttactttttgtatcgtaaaatatcaagaagttttaaattgtataggatgtactatgtacaatgtcatacaaaaatattaacattaaaactatctatggacatcaaaaacataaagaaagtatattattacatttattttgtaggggttcgctgtagtatccaaaattgttcattatgaaatctacttagaaacatagaaagtatgacgttctttttttatttttttgaacaacattcttatctctttcttttcacagtatttttttcttatttaagggagaagagattgcgaagaagacaataaagaaaagaaagagaagaaaaaagagtagataattataacaatgacagagttctgtgggtcgactaacctctttgttagtgcactgtcggtggtgatgacgacgatgcttgtgcttaatacttcaactcaatgcggagctaatgatacaatgtcggtgagcatcctcaacaccaccaccaatatttcctctgtctgccgcagtaaagaatgcctcatcggccaacaagaagtggatctggagttccaaatgccttctgaaataagccgaagggtcttagtggcaactgttaaaccgtcacaggctgttttaaacgctgaacatgccgggttttgcatgaatcctcattgcacagggaaaagaaatatcggatactcaggctgtaaggcaaaatacgatcgcacctgcttcccgaagaaaaaactaggaaagaaggtgccatgttgctcatgaactccctggttaaattctataattggatgtcgttttcataagtatggctctgtttgtttaataatatttcatcttattttcaatcattgtttgcgtgtatatttgcgacttaattaacggaaaaacgaaaaatgttttggcagaaataagcttcatttttagattttaagtatgatcacttctattcgcatatgtataacataccgattctcaaatgtagcaataacagcagttttttttttttttttttctttttttgaatcgggcaataagagcgattcggagtgctaaagttgtgtgtgcatatgcattttttagcacatcacttttataaagggattatttaataaatatataaaaatagtaattttttttacatttttacccattttaattatttttgtaataaaaatatgaaatgttgttttttttttgttattttcaaaacaatattattttgatattgctgagttatggaaaataactttacttttttaacaataatacaaaatgttatgtttatattgtttcaaaacaatgttatttacaaattgagcttgctacaagaaaacaaaatgaaagtaatatatgaaaatctagaaaaaaaaaatcggtaaaaaatataaataaaaaaaagttggtaaaaatgaaaaaagcttccgattttaagtttattgtgtaaatttctcttttagaaaattcaactcctcacagttatattaagtttgagagtaatttgctttataaatacctgagtttaacttttagttacaatttaatacctaagttaaaattttggttgcataaataccttctgttacacttactttcagacattctgtaggtaccttgctgttatcttgcatactgaacaccagatggcatgacacgtcatttaaaataatgtcaattcatcttattaaatatatccacctaatattaaccattaaagtaaaaattaagtttgctttacaaaaaatatttacatttaaattagtttaataaatttataataaaatctgaaataaaacaaaccctaaatctatggaactgagtcgtggagagagaaaatggtggcggctagacgttcttcttcgaccacgagcagtgtcacgggccgcctatttggacacccccaagtaggtggaacgtgcggcacttgctggcaca

SEQ ID NO: 266873 - DNA, 2129 bp, Cannabis indica
aaaaacaaaaaaaaaacaaatcctaatgaaatgaattttacagggaagagaatattgaagaagcttccgtacacacaactgaataaatattcatgtccttgttcttgttcaacaactaaaactgaacttatactgttgcccctctttctttttcttttttgagttggatgtttataaatgccgaactaataataatactgcagctgtaacaagctctcctacaactaatgatcaaatgttaaaaagagttgcaaagttttcacgtgtgtattttatatgatatattaattaacttaaaactgtcatacaattacagtaaggcattattatatatcaatcctggtccttatcttcacagggctcaagtctgacatgaggacaacatctctctggttctcctcttgtccagagaattttaagatcacctctcgtcttccccaacgtcaacaaagtgcctacattcaccaaatcaggaccacattattacactaagtattacaacaaacttggaaattgtaactcctcacttttaggttatgtttggttggaagaaataattaaaaaaaaaaaatgagaatagaaataaaatcataaatagaaaataaaaatattttgcaattctatttcattacatttaacaaaatgcactcttaatgtctcacgatgaaatccctaaatccccaaggatagttgagttcgaaaaaacacgtttgacccaaagagtgaaaatgatatgtgtgcacaaattacaaactgtacactaaattatttttacacacaacaacatgatatgctttaagatgtgacctattacgtcaaaaaggcgtctaatgtgaataattttgtgtggttgcttgatgtgaccgtgccagacaatagtgtaaaatgtaaatcactttaatggaacttttacctattgtaaatggaactatgtacaacaaagctggttgaccatgcccatccatcaagttcaaagccacatatgttatgaggagccctgcagcacagtatttcaaaggatcagtaatatatggtgaatgataagattgttactatttgatggtttatatgtttctgtatttcatacctaaaccatatgcagtcattgcccacacgaaataaccagctttaagcttcttgttcgccaaccaatcatacctataaaagtcgcacgagtcagcaaactttagacccatcaattgtaattacccgtttattagaaacgtttatagagaagagttttatgtgagatagggtaaaccatctacatcagaatgcagatttcagcaaaatccaaacatacagattgtaccttagtgaaaatgctaccaccaatccaggcaggataatatcaccaaacccaatgatactgtagccaccccaaggatcaaacattcttgggatttttagtagcatcggaataccatcctctccactcctatcaccacgagctacctgcacagaaacagaatattaagattctagcctctcttggtacaatagttacaataggccagcagacctattgactttttcaaagtaaaagaaaatgttctaatttactgaccactatcatcacgctctcatggaaccaccacttcgaaacaaatacccagaatatgtcatacaagaaagcacagctgagaagaactgttccaacctgatcacatgaaccaacaaaagaaggaaattttcagtatctaattaattaatctctagatagcatttactgaaggaatgatctttcatgtctattaatgtaaaatttatcactctattaagtagtattgtaattagagggagggagagatatgaacacaaggttttaaacctaagcagataggtgaataagtagctagatcccacaatgactaagcatatgatttttagttactacaactatgttggcactatcttctcatagagtgatcttttatgcttgagttgtaatgaaaatatttttcataatctccgtagaaatttatacaatctagcagctatcagtgtccctaccgcatgaatgtaaacacaagataggccattttttttagagaattattagtgagaaaacttaagagaacgtcgaggtggactaaaagagcgaggacctacaaatatcaagatatttc

SEQ ID NO: 266874 - DNA, 2559 bp, Cannabis indica
ctctttttttcgataggtttaatcgcgcaataaccctttaatttttgctcaacaggttggggttggaaatggatcaaactcaaccatcaaaattgttgaggatgaaggtttatgcagcagtagtagcagtaataatcagatgagttggataaagtggtatgggacttgtatagctaaattgccagaagatgttagtaaggatgataaccctgtttctcaaatgttagttgattcatttgggaggttgcatacttacctgagaatctcattaaccgaacgttgcaatttgagatgtcaatactgtatgccagcagagggtgtggaccttacttcgaaacctcagcttttgactcgggatgagattcttcgcctggctaatcttttcgtaagttctggagttaataagatcagattgactgggggcgagccgacaattaggaaagacattgaagatatttgtttaggcttgtctaacatgaaaggactaaagaagcttgggattactaccaatggaattactctttcgacgaaacttcctaagcttaaacaatgtggtttgacatctttgaacattagtttagatacattaatccctgcaaagtttgaatttatgaccaggagaaaagggcatcacagggttttagattctatcaatactgctattgaacttggttacgatcctgttaaagtatgtcttcattttcgtgtttcaaatatgtatttagtatacaatgcacattattatctttcatttgacatgttgatgtatgttcatttaggtgaattgtgtagtgatgcggggtttcaacgatgatgagatttgtgatttcgttgaacttactcgtgaaaaaccaattaacattcggttcattgagttcatgccttttgatggaaatgtttggaatgtgaaaaaacttgtaccgtatgcagaaatgtacgataaagtggtaaggtacatctctaacaggtattcccgtctatagatcttagagtataccttgttcgataagctaagtattttgttgttgttttaacaggaaaaacaatttccaagtataaaaaggcttcaagatcatccaaccgagacagctaaaaactttaaagtagacggacacaagggtgtcgtttcgttcatcacatcaatgaccgagcatttttgtgctggttgcaataggttgcgaattttagctgatggaaatttcaaagtgtgcttatttggtccctcagaggtattttttattcttatgcttgctggaatcgcctttaacttttcgttaacttgatgcttttgttgctgcattttttactggtcatgaacaataatttcatagagcatcttgcacgatcgagtgcatcgagcacatatcgctatgctacattagaagttctaacatggattttctctgtctcttaagacaattaggtgaaccaaagaaggtcttgttagtattttcttcttatcattatttcgattcgaatttctttttgtgatttgtgttgttgtcatgaatgatattacttttcattgtagttgttacttttcgaaaatcatatctacattcactctttccaagtaattcctttattgtgatgaaatttatttttcctttctatgtggaatgtacttgcctcatcttatgctatcggtttaactcatgccatcacggttcacacattttgctcttaaattcctcggctaaccaaagaacgaccccgacccctaagtaattgaatcccataagcatccaatgtcttattggttggctttgtttctaagtaattgccccataacttggttggtttgttctcaccaaattctactagttaaatctaagaagtaactcgaaaagcttatttaccatacattctccattcactgacgatgagaaaatgaagaagcttgtgtatgttaccgacttagttcgcctaagttcgaaatttggcaaacggggaactataacaatcttattagttctttttttcaatgcaggttagcttacgagatcccattcgaagtggtgctaatgacgatgaacttagggaaataattgaggcagcggtaggtgttttactcggtctcttcacttttctctccaaagttttatttcctcttgcccttgtttctttctgtaccgaacatggggcttattgcccacatcccgaactgttaattattgtgttttgttttgtcccgtctttttaaactgattgttgctttaggtgaagaggaagaaagcctcacatgctggaatgtttgacattgccaagacagcaaataggcctatgatacatatcggtggctaaacctttgatgccttccgaaaattttgaaggtgccattctttctctctctcgctctcgtccttagtttctttctgtatatgtctgtggaacactaatggtgtccactaccaactgatgcgacatacaatgatgttcaacatcttgcaccgatcattatatggcgcatcaagttgacttaggtaaccatacttttctgcaatttagtagtgaattcagtaaatcgaggctggactcgagaaacatgcatgaagctgt

SEQ ID NO: 266875 - DNA, 2087 bp, Cannabis indica
aaactcaaagagcaagcaaaaaccagttcaaatgaccataaaataggccaaatcctcaaaagaaacaaaagcagaaaacgactgacttaacacccattgagaaagcttatgagcaaacaagtttcaggagagaggaatccaaacgacatccacctcagacaaaaattaatcaagtacctccatagacttctaaaacaagcatgacatgtgccgatcaggggccttccgagcttgaactccaattaagggccttccaaaataactattttgaattatgtgtacttagacaatcttttattttgctaaatgataaattagattggaccttgtaatttttaaaagaaatattagtggcaaaactacttgaattatacgatttgtcacatttactcccacaaactcatttttatgttttatttacattttcacaacctaaatttttaaaagaaatattagtgtcataaatatatacttctatgttttatttacattttcacgacctaaattttttatttataatttttcaaaaatacaattttaaaatttcaaaattataaaaatacaattttgttaacaaaaaaaaataaaaagtataagaaaacaaagagaaatcaattatacaacaactataaataaactataaataacgacaaaatcaaccttatgataactataaataaactataaaataaacaaaatagaatatcaaataatagtttattatttttactgaaaaatatatttttataaataaaaacttaaattgtaaaaaaaaaaatacatatatatattaacgtatttttataatttattttaaaattttggtgtaatatgtaaaaattttaaaacgttccaagtaatccaattactatgaaatccataaatgaaagcttcatcattttattctctccccttaaaagacaagattcataggttaatatagtagccattttcgaatcctatttaatcaatgagcataaaggtcatgcacacaacaaaacaaattcatatacactacacacgtgcatgccaatcaacaaaagaaattaatagcaacttattattacattacgtacgtaaaataatccactcggttattatgacacaacacaaagctctctttatggaagctccttttgtcgcattgtaattgtttttccttgttagaatatttaggtaacaatcaatgatattaaatattaattctaattgattaataatcaacatttatagtgtattattcctagttcatcatcactcatatttattatatcaaattaccatcaaagttgggattgctatagttgatttcttatagtcatactgagactaatgtttcattttattatatatacattattattcattcttatttcgtagactaattagttttttgtgttcatcaagtgggtcgcccatataattgacacaataagaagttacaaagaagagttaattaataaacacaataacaaaaacgagagagatgtagaaaggtagctaattaacactttaagcaataaaatagagaataaacagggaaagaggttttagaaagagaacaatattatacattatttaaacgaagattgggtcagattcaaaagtactgatcagtccttcctttgaatccaatttgcccaaatgtgaggacgataaatagacccagatgccacgtcaccagccacaacctgcaaataaatttaattttatcaagttctgtaattaatattacttgttttctcaaatcgacaaaccaaaaaggtcccatggtctagtggttaggacattggactctgaatccagtaacccgagttcaaatctcggtgggacctatttttgcgtttttctttttttcccatttctcgaagccctacttcgcctttattttacgagataagttaaaaaatacctcttttgtatccattaatcaaaaatactattatattattttttctattaaaatatacttatttttttaaatgaattgcctaatataccctcactctctaattaagtatagcatataattgagaaatttgcggccaaacccctttatgtttgtatttgtagacacttaaccccct

SEQ ID NO: 266876 - DNA, 1679 bp, Cannabis indica
gaagatgtgtgagtgatcatagttcatgggtgggacttttgggctaatttgtaggacagtgtggatggttaaagcccaatccatagccacaaagaaaagtcaagtggacctaagtgagaaggacagtgagggaccacaacagcactggagccagtgggacttgtgggaaatagaggtaaagattctgtttaaagaggggtccaataaaatccaaaatccaaaatcaaacatcctaaaaggctaatggcctttgttgttgggctccatatcataccagtcatgtgtgggacccaacttttcaaccaatatatatgcatgtctctatggctccataaaaaaccgcatgcttatgtggttggttaaattagattaggaagctttaaatgaagctaccttcgaaattcgaaaatatatttttcaagaaaggagaaataaaataaagttattccaccgaccttatcaagcattgtccaattgtattgaaactctttccctcttgcatgttcactttgtccacattatacttggctttactacttcttaatggctgacaatgcctaaggtgaatggttatcatatttagctaccaaattctgtattggtagtcttttttagggagaatcttcataactaatagtgacagaacggtaataaatagatgcacactatatgggaaaagatacataaattaacatacacatatacataccctcaaactatttaagtttcctaattaagctaaaccacgtaagtaactaatataattctgcaagtaataagtataaccagctggtgctaatgttaatgaagctttttaaatcacgggttgatataattaaagcattctgtgagttagtgtcattgtgcattggatgtatgatgagaataaaagttgtgttgctgcctcatatataatatatattatgataattgataaagttattttaattgaaggattagcatgccctagctcgttattacaggtcatgaccacttgataataaagtgagtacataaaaaaataaagacaagaaagaaaattgtgaattttcttttcatattctgttgaccaataatacattttcatgaagccctcagaaaacgacaacatatcaacttgtctctctcttttcctataaatatgtctataaggcacttgttcagcactacaaatttcaggccttcctcatcactcttcatcgtcatcttttttcctttctctggaattattaaccttagctacaagagccttcttttgagtttgattcctcgtcaaaaaaccagccatggaaaacaagttcaagaaatcacaagtcctagtgctttcactcctagcaattcttcttgtcatagcacctcttctatcttcatcactaaggcctacttacctctacttcatcaccaatctccttataattgttctaggagccgaggccggccttctctcattaatattttccaagcctttagaggaaaacaacaacaaaatcaagaacactacgtatgttgttcctcctactcctcctcatcatcaaaagccagctggaataataatagcctcatcatcagaagaagcctctcctctcaaaattacttcccataatgtagctgttgccaatattaattataataataataaaaatgaacaagtaaaacataatggtcctgctgatcaaaca

SEQ ID NO: 266877 - DNA, 2415 bp, Cannabis indica
gttaacttctttttctctgcatccaaacataaatgtaggaatcttacttctcacgggccatgtatttgaactgttttatgcaatatttgtgagtacatatattagtagtcgaaacgtttgagatctttatcaagcaaatccttttctttctacattttatgctcaagtttaagacccagatacgaaatctttttgtttttcttggaacttttttctgaatatagagtgaattttatggaaaatgtgattcacttttcagattaccatttgtgagttaatatggagaatgataatatggaggagtgggagagtgcatactatctgtctaagaaattgtccaggttgtatgaagcaaattgtgaaggttcacttcctttctctgcatttgttcgaaatgggcctaattaactaacgaagtataccaatttattcttctattcattggtacccataatgtgtttgttgtttgtttgtttgagttattataatcagaaaagaagaaggtgcaagatatttcaaaggaaaatgcaaagttgaagcagaggattaaggatttggaaaatgaactgaaggtgagctttgtttgttaggctactaatattgataattaataaatctttgatcaatctaaactgatccttactatattttttgtgacaactaacaaagttgttcattatttgtttgttccattatcttatttatgtatgtacttattattatcatatgtgattgtgttgttctgatttgctgaggtttcaaaactaattgcatgacaaattgttgcaactttctctccttttacattactattgtcaaatacaaacctgttctgcatagggaaaacagaaaaggaacaaggtagttgtcaaagaaggacctgaggctgacaaaaagcttatcggtgttcgtattgcaaatgagaataaaagtgagcatgagttgaatgtaataagaacgctcttcattaaggtaagtgttaattcttttataaaaaatttagtttcatagccattaaatagattgtagtatttaagtatagctttccaaatttgttgcatatgtaaattatgatgtttaaattttgaatatgaaagtgatgggttattctttgatcacatttgctaatcagtcattatatatgtttgcttgctttgtgcttttcctttaaaatcaaatgcatactctttttcatgatcagtgcaaaattaagcatatcatcaaggtgatgctaaaacattttttaaattgacttttagtactttgaaagtgttttgccttctggtcatttcggtgttaagagaattggtgaactggactacaaaccattcgatgaagcaatgaaattccccaaggacaaccagaatgaagctcttaagaaatggaagttatggagaaaatgccttagagatccactctggaaacctttcaaagttgtcaacatccaagggaaacctacggtattttatatgcttttgattattgtctatttaatcctatacattattgtgtgttttggttttgtataaatatgaaccctcctatatacataatgaggaacagaaataagaacaaattaacaaccacaaagaatcgaatcataagcacagatgaaattgagcatcaatattatgtcaacatggttgatattctattattatttagataggtcaatggaaacacttttccttgtttggtttgagattttagttactaatatagacagacacttgaattgatgtatttttcacttattaattcagaaaattgttgatgagaatgataataagctgaaaagactgaaggtggaactgggggaaaatatttacaaggcggtcaaaactgcattaactgagatgagtgagtataagtaccctggtggtcgttttataataacagagctatggaattttgagaagaattgcaaagctagtttgactgaggtggttgagtttatgatcaatcgttacacacctttaggttggtaatatatattatataatatagtttcgaatgtttcaatttcttccctactacaatattcttttgttttattaaattgcaggaccaccaaggtgaataattcatcatcaatgcttttgccactgccttgaaacttctttagcaacaagataattttgtcaatggtgaatggtttaggctaacaattttcatgtgtatagatatattttgggaagtatcttttatctttatgttcttgcttttgttttgtgatcttagtgttaccagatgataggctggtcaatattatgctttttttggttaaaatggactttgattttcatcttcagtttatatctttaattttctaagctctagtactatctaatgcacccttaattcgttcttttcattcctaagtaacaaattataaggggttttttatttattttt

SEQ ID NO: 266878 - DNA, 1150 bp, Cannabis indica
acgacaacgacacgcatttaattcaccccaacggccctctttactaagctcttcactttcatcccaaataaacaatcacaatcccctagaaatcatcgaagatggcgcaccccatatcagaggccaacgacaccagcccttttggctcatccacgcctgaagacttctacgctcaccactccgtggcccacgattcacactacattaccaactctcgtggcctcaagctcttcacacagtggtggaccccacttccccctacacccatcactggagttctcgctgtcgtccatggcttcaccggcgagtccagctggttcgttcagctcacttccatattcttcgccaaggctggctttgccgtttgtgccatcgatcaccagggccacggattctctgacggtctcatcgctcacattccggacatcaaccccgtagtcgacgattgcatcgacttcttcgacgagttccgatcccgccactccccttcacttccggctttcctctacgccgagtcactcggcggcgccatcgctcttctcatttctctccgtcgtccaggatcctgggacggggtcatacttaacggcgccatgtgcggtataagcgccaagttcaaaccgccgtggccgttagagcacctgctcttcctcgtcgccgccgtcatcccaacgtggcgtattgttcccacgcgcgggtcgattccggacgtgtctttcaaggaggagtggaagcggcggctggctcttgcgagtccgcggcgacctacggcgaggccgagggcagcgacggcgctggagcttcttagggtttgcagggagctacaggggaggttcgaggaggtggaggtgccgttgctgatcgtccacggcggagaagacgtggtttgcgatccggcgtgcgtggaggaactgtatcgacgcgccgccagcaaggataagacgattcggattcacccagggatgtggcaccagcttgttggggagcccaaggagagtgttgatatggtgttcggtgaaatggttgactggctacgaacccgtgcccaactcgcacgtgtgagttgacgtggttgccacgcacgcgccgccgctgggtgtggtcttgaaggttaaacaccgcatccaaattgactctgtaattttgaaga

SEQ ID NO: 266879 - DNA, 1694 bp, Cannabis indica
gaattataaatgcaatagaaaaactaaaaattactattttcaaccagcaatccaatttgtaattcaatgataacagattactgaacaccattttcaagcatccaaatctccatggattatcacttaatcatttttaatgattttgaagataatgcaagataattgataacaatcagagccataaattcttgcctgccgaagaatccaatccatgagaaccacttcaacgattagcttagagaagaaagcagcagatttattgtttgattgattgcttgtgattcacagtacaaaaatttaggaaaacgaaaggccttcaactatgaactttgagtatttaaactccggcagcatgttctgaatttgaattttccaactcggtcgcaactatcttacaaatgggcatgtcttcattcttactcaaaagctttaacgatggatgcacttccacatcgcgaatgaaaattctatccccaacatctagcttgctcacatcaacctctattttggaaggaatgtgttcagctgggcaaatgtattttagactagttcttattttgttcagacaaccacctgttcttggcaacaaaaaggaccacaatcaatgtaattattacatcatttatcatacttgaccaatgtagatttagattgactctcattcaatcatatcaactataaaccatcacttcaaatgatgattggattaaccattaattatcaattcaaatacagggcaaacgaagtgaagaaaaaatattgaataatatggtggtctcactcaatcatatcaaatattgaaaagtactgaacaatacctaataggggtctaaagtttgagtacttgttactgagttattgctatagttttttttggtcttcaatggttaggtgttgttacaatttcttgcttcaaatatttatagacaggagagtttatttatgtgttgtgataatgggcaatcagttacaactatgtcgagataatgaaacaagaacctcaaataaaaattagtagaaggatttcatcataacaaaaagagattataatagcttcaccctaaaataaggtaccctctctcttattagaggttaggaaaaaaacctcagtatttttgtctcctaacacactccctttgttaattttctctaactctcaaaaaaatgctttaaaaatggggtacttatatccccgaagtacatatatagctggacatagacggtgactttatacaagttgtgtacaccttgcatttcttgattaaggcaatgattaaatcaaaagttataaaatcaagacaagcaaattatacacaacttgcataaaggtgtgctctttgggcacatataagagaattaagtgatcccacttagaacgacttagagagagactccacagagagaaaaagagaaagcattagaaaaagatatagtgaggttcttacacacttgtaggttttccttgttagagagtgagtatttttttctatcataaaagaaaattatactttgtgctatccttattttagacagaaaattgttgtaatccttttataatagtataatccttctacaatttgcctattttgagtcaatttaattagaaactattattttcattatctcgacatcagttataattaaacattcctaacacatatgtgatgagcttaacattatatgaaagattccag

SEQ ID NO: 266880 - DNA, 745 bp, Cannabis indica
tcgtgcgaaacaaagagtcgggtactcaggtatagaggcctaacattcggggatggaaaaactgccccaacgattctattaaccagagcatttgtgtggaggatctagacccttaagatatataacatgtcaacaactgtaatatcctaacatgtcaactttaccaagacaattgagatttgattgaggatgaggtgagtattgttgtattggatttcttattcacatgtcgattgttaaatgagcttaatactacaaccttaatacttgtcccaaagggaaaatgtcaaacattggttagtgactttagaccaattgtgtgttgtaatgtgttatacaaagtggctgtgaatatgatgtatacaagattgagaatcattcttcctatgctaataactcaaaactaagggatttattcgagggagatatatttctcacaataaaataatttgtcgaaaacctaatgtgtcattatggaaggaaaaacaccttgcatgataatactggacttgaagaaagcgtatgatacgatagattgggaattcattgaagaaatattgagagcctttcacttccctcccacagtcattctaataagaatcatggggttccttctcaaaactaatttgtgataagtggagtagtccatgttcttacatatggctcaatattttttcccctgaactttgacatgtagtaaatcgtgtcccctaaacttttttggccgttaaaaattccccccgaa

SEQ ID NO: 266881 - DNA, 1524 bp, Cannabis indica
tttattattgggatttagtgtaaatgtaagggaccccaaatataatgtaaagagtattttttctttctcatttaaaaaaacccgggaaaactctacaaatcacttctttcccacattatccttccaacagctgcaaactgttgctaaatactcaaggctaaaatcgacatttcacttaaaatcaagactcaacagagtaagcttcacttcaactataaataaaaataaaaggcttttctaagaagtgtaatttccactcccaaacttttttttttgttctttttctttatgaaattcattttctttctttcttcttcgctctgttattctagtgttcctcactcctctgtttctcttcttcaccaagaaaaccataaaatccctctccttccatggcttcttccatacccagaccaagaacaatcatgaagagctccatcatagcaatcaacccatctttcccattcctccatttcctcccaccttcacctctcacagcccttctcttctctccccgaaaaaacccgaaaagcctccacctttgcaccaacttctccaccactctcctcctcttctcactctctctcctcttctccatcacattcttgctcggaatcttcctcctcggcttcctccgctcataccaaaactcccctcttccatgctctgtttcttcctctcctgaattctttgcagcctcgctctcttcaatgtcttcctcctcacttttggacaaagaagaaggagtgcctaggctttcatacagtgccatggtgccattaccggctcacggtctctccggtaacctctctgagccggagagggagttctggcagcagccggatggagaagggtacaggccttgcctagatttcagtattgggtatcgaaaagcctctgccgaaatctctaaggagaagaaaaggtatcttatggtggtggcttcaggtggattaaatcagcagaggaatcagattgttgatgctgttgtaattgctaggattcttgaggcttctttggttcttcccattttacaggtcaatctgatttggggagatgaaaggtaaaatattattattgaaagactctgtttttatttttctttttctgatattcttttcttgtattgtttttaagtgaattttcggatatatttgatgttgaacatttcaagaagactttacaagctgatgttcgagtagtatcgacgattccctcttcacatttaatgttaagacagccaattcactccaagattcctcgtgacatcactccaaattggattcattcaagattctttaatcaagtatttactatatactaattcataattaatggaatctcattcttcttcttcttctttctttcttaattgttaactttcattcttttaattactattagctgaataaagatgggcttctcatactcaaagggttagattctaagctcaccaagaatcttccccctcgatttacagaagcttaaatgtaaggtaaggtataatatatatatagatatata

SEQ ID NO: 266882 - DNA, 2162 bp, Cannabis indica
gaatttaatgtctaccaaatcctcttcaggcatctgaaacgttgactttttttaatccaaaagcttgaccagatgatcaattacgataaagcgaaacccttttacttgccgattaattgggactcgaaaatgagctcatagatcaaaaaagaaaaaaaaaatctgaactttttgggtagaattgaattaaccccaatttacaaaaacttcacaacaaaaatgaaacagacccagatttcaaaatagtgaaaagaaccttttttttttggtggagttgacgatcaagctatgcggattcgaaagaaaacttcccttttctttcttccatgggggtttttcacaaaggtcggtgcgtttattggtgaactgaatagagaaaaagaaaaaaaaaatatcgcgaaaaataccaaccgctttgaaacgacagcgttttggagacctcaaataccaaatagcgtgtataatgtcacggtgacgttttcgggttttgaaaggtgggttctttttgtccttaaacgacatgtcgtttttggtattagggctccattaccgtccaaaatgtcccaaatcaaaattctgaaattgaagagggaatgatgaagaggaagagaaaggaaggggaggtagttgaagagaagaaaatggagatggatatagtttggcaaacccctgcaaacccacctgagcgacacgattacatatttagaaatggtaactccaagaacaaatgaaaaagatactctttttattgtataaataaacaaaagttttgaactttggtatgtttaatgagaaattgactttaacaaatctttggggggagattgtttagggaggcgccatgtcagaccatactacttcgagtttatcgctcatgtatgtatctcagtgagcttgagtgtgttaatttggttattttaatgggataaaacccttgttaaaccctgattaaaccccgttgctgttttctttagctgaactctttaattggttgttggcataggttaagaatcgttgggcgggaaagaccattgtggatttgtttgctgaggagtttaaaggacggccatatgagtactatgtatgactgttcatagctcttctcacttaataactttgtatgtgttttttctatgagcagaagaacatgttgtggtaaatacttgtcataattcttgttgggtatcctttattctgtttaattgaatttaatttaaggtggggcttattgcttaacagtagtatatgtgctaattcagtgagtttgttaataaaggttaaagctttgaatgtaggttagtgctgtcaaaagtggaaggattcaagtagatggagagatggtaccagtttcatacattgttaaatcttctcaaaagataagccatttcttacacaggtgtgtggcagttaatttagttttatccagaaacctcagttgaccaatttgctagaaaagacctacttctttgtcctcatgggtggtctgatgtgtacaatacgtacttcagatagttttgttcataattccttattttgtgctggtgctgatcttgagattagattattttagtttgtttcatgtttattgtgcactttgtggttatttttgtttgcttgatttgaaaggttttgagttatcaagttagaaattgattgcgctaagattttttaggcatgaacctcctgttttggctttggatgtttcaatcctccataaagaaccagaagtggtcactatttgtaagcctgcatctgttccggtgagtcatcacttatctattttacatcttttttcaatatgttaattttgtgttacagttcctaatgaagaacacagatctcttgaatgcttatggctgtcacttgatcttgtttctcatttggtatgacatgaaaaccaacataatgtcttgtctcttctctgtactttgctttgcattctgactttccactggtatctaggttcatccttgtggtcaataccgtaagaacactgttgtgggcattcttcaagcagaatatgatttggcacctctgtttcgtatccaaactaccaaacaaaatgcttcttgatatgaattatgtcttttcacacattatgttatctgtctgaaactttttctatattgttctttcccttgaccatggtcatgttagctatt

SEQ ID NO: 266883 - DNA, 656 bp, Cannabis indica
tgtatagataaaatggttttcttttttaggtgacatgggttgagcatgtagaagtggatgatagaggtgttcacaatctgtataagcagctagtcaactcgggccatggatttggtgcaaaacgctgggttgccactttggatcgtcaatgtgaaagactagctagtgccatggcaaccaacattccaaccggtgatgttggtggtaataataacataatcaaaattgataaaattaatttacatatacagatataaaatataaatatcaattaattggtgtggtgtatatatttttttttttgcagtgataacaaaccaagaagggagaaagagtatgctgaaattggctgagagaatggtgataagcttttgtgctggtgtgagtgcctccaccactcacacatggacaacactctcaggaaccggagctgatgatgttcgggtcatgacccgtaagagcgtcgacgatccaggcaggcctcctgggattgtgttaagtgctgctacttcattctggcttcctgttccacccaaaagagtctttgatttcctccgtgacgagcattctcgaagcgaggtatatatatacacatatatattaccattaaagtatgtcacttaattagtattgatgagcaaaataaaatagccatg

SEQ ID NO: 266884 - DNA, 1620 bp, Cannabis indica
atctatacgaaagggagaaggagaaaacataccctgtagccacacaaatcggtattccttttgcatgaagatgtctgatcaagcggctggccccttaggttgagaacataatattaataacaatgtatttatcatatctaagacaagaacatagcaaaatcattaggcacaattttactacaagaaatggtaaacttcataagcaactcaaaacaccttaggtgttcaggtgttgatggcaattatttgttctgttagaggccataatttgataaactgaaaaaaaaaagtataaaccaagtttcttacttaatagtgacaatatctagctcaaataaaagatacctcaatctgcaacactagaggcatataagggcaacaaacatgaaagactgaacaataaacacatgtacaagaataaaaaacgaaatgggaaaggaagagaaaaggtgggggacttgtcattaacgtactttagacataagaacacaaagacatacatcaaacatcaaactatctttaccatgtattgaatcttttgaaagtttgaaaccattattaaccaagtaagatggccataaggggttaaatcggagaccatattacagcaaagaaacacctttttcgtgaccactcaactaatccatcaaattttttaaattctatcctgattcccaagtgttacaaacacagtagaaaaataacaaaatgaacttggaggggaaacaaataaggatattgatatttaactaaaaacctttaattgtgcttaacaaattcttttcccactagaaatttaacttgtgtaagagtattatcaaagagtaagaaacattacaccaagacacttgtaaagactagttaacatttatagagaaaacctaccacattcgataaggtagaaatagaatattatcaagatcaacaaaattatgttcactatgagaaaaataagagtagaagaccgaatattgaagcatttgcaagattgtgtatgaagtaaatgaaacctggcatgagctcgcttgttgggaacattttctgcaacatcgactctctttcaataagaaaatcttcgggtgtaagagaatcgctaattcccgtctcttcaacaaagatcttagcagattctgttgatttctttcccatcattttggccttcaaagaccaatcaaaagtcttattaaatctagccagtataatttcttggacttcagtatagaacttctctgtgtctgcaatacaataaaaaaaaaaccatcatactttactttttatcacccatcaaaattttcagcagagcaatattcaaattgaaatgagaaaacatttaacaaaagtcatttatctccaaaatattcttctctgaaaacaaacaaaaagcacattgattgtttagtaagaaaatagaatgttctttaatcaaaatgtctacttatcccccaaaaaccatcatattatatcaaaatgcagatcacattcttttctaaaaccaagttcaatcgtacattatcaatatgaatctgtttgatacaccgtattacatcacattatattgtatagacctattcatatttttatgtaagcataccaaaccaagaatatatgcttcaaactata

SEQ ID NO: 266885 - DNA, 1815 bp, Cannabis indica
cattatcaactatttatcacatctcaaagtattggaataacgtcaactttctattacgactattattcttggggacctgatcataacagcccttgttttttttcttttgctaatagcacttggtagcaattatatacagatattgataacacataaatgatgtgaaaacgagaaagcaccaagtgctttagaaatgtcagagaagacttcccgagacgtactaaaatttgtgtacaagtaatacgctacataataaacatgatagaggtacttaacatttaacaggcctgtcatagctaggaggaagagaagggcagttctcattcatgtgtgcatacggttcaactgtgttatattcaggtagttctatccaatactcaccaaggatttggcagaatggaagccgtccattctcagtgttgcaccaacttggcaggcgggtatggttatcctcaaaaattttaagcatgtacgcatcacgaatctgatcgacaagtaagtcattatcgctaggtttagataatgcaacgaccagcaattaataggtttcatccagattaactcataaaatgacttacagtgaattcagtaacttgaatagaatttgcaattgggccaaagattccagcctctttgtacattgcaagaataaaagcaacacatgtggtagactttccatcactgtatacccattcatcttgttctggaatcgcaagcaattgatcaaatgctaacccccgcttttcagtctcagctagaatctcgtacaaatccaaatcctgaaagaacgaatgagtaaaaattaggaacacacattcaatattaagagcagcatgggtctttatagatcacaaggacaccagaattacattggtcccaagccgcttattcaaagcttcattccacatattcgcagcatatgcaggctgcattctagtccacatagacatgacagaaacaacctgaaagaaaataccacgagttagatggagtaattgcaaaatgtacctgttatttttatattacacccatgttcaaacatgaatattagacatgtataatgctgctaaatgaatggtgagcaggtacacattgaacactctttcttaaccctagtgaatgaaaaaggggcatgcaaatcatgacaagataacaaaaccaaagcaaagcaagataaaaccactgtgaatgctaattcaatctcaagaatactaacaagatataagttaaatgtgaaataaataacaatgttctatagttaacttctccatcactagtagatctattcgtaccaagtgagcatcaagagggggaggatagttgtcagacatagtgtcgatccaactaaatatcatgttatggtatccatatggctttccagacatgctccgagcatattcccaagctgctgttgagttgaatttagcacgcaactcagggtgcaagggaagcaaggctatctgcggattagaattatcctcaagtgctaagttccaccattcatcccaaggaattaccactataatttcctcaccctgcagatacacgagatcatcatgataattcactacttatccatgtataaaataggacacactcaatttacacttcttagaagcattcacatcgttgcaccaaaaaaaaaatagcagtaatcataaacaatttaaatgaacaccacatatccaaaaacattatttgcggcaatcaataataacacaaataaaatattctaaatcataataacagtaatactaaaaacatatcctatataagcttgagaggtcaaggcatatgcgtagatgtgtaacagct

SEQ ID NO: 266886 - DNA, 3727 bp, Cannabis indica
cacagaaaatgtagctaattatgccacgctaaagcagctacacaattaaaatagacacccaattgctctttaacaaagacatttaagttaaaacatacctcttcaaaataagtaagctcgctgagaaggccagaaagtagctgtctaagtttttcaattttcttctgggtatttccacgtacatttcttacatctctagtaatagaacacaactgagcagtcaattctgtctgacgaactaaactttgccataatttaaatccatcttcattcccattcacaccaggaggcaactgttacagagaggatatagttattgaactgcacaattattcagtctaccttggatgcatttttacatttatcaaactttacatatatatatatatatatatatattttacagatgcccatatttgtactatcaattgcagctacataaaattcatgcagtgagattagtacataatatttcctttcaaagagaaacagggtataatgcacaagaaaggtaagctatgaccttaatattaaatgtagataaaggcagaagcatagcaaagtagaactcacctttatcatgttttcttccaaaatctcataggtactgtagaaacgtttggcatatgctggatcatgaagttccacagcaacataccagcgaagaaagctggctaactcaatgttccttaatgctgtcaaaagaccaaagtctcagagataattaacaaacaagtaagctgaaaatatttttagtgttgcgtgggaacatgagtgcatgcacacacaattaacaagtaaagagtacatacagcgctgcacaagaaaataagaaagacgagatttatcagagcgctcaaatcgaagagcctgaacaagttgaagtaagtagcactgaagttcttcatcatccgctctttcaaggacactgacagcataagcacgaacctggtacaagaagttaatctaaggcactgtacaaaagaaataccaaatcccaaagataatagcataaaagatctgtcttatcttgcacactgacctcctcactttcgaaaacaggggacagcagttccaatgcatcagaaacatcaatcatttcccacctgcccataagctctagtgcctgttttgcttcctgcaaacacatcaatatatataaatcttgagtaaatatgtattcagtagtctacaatgccaaatagtgagtccccctattgaaaatcaacgatcaacgtgaagacaaagatggctcaattaatggcacaccatttttcttttctttttaaatcttcaagaattcgagatatgccttcttaacaagctcaataatcactgtaaccaaaaatggattgctgacctgaacatcactccactcaacacatcgaaggaattttgtaagagccctcttttcagacatcaatgagaaacgaaatttccacaataattgcctctcatctccactcaaagtccttgttggtgggtatttaagaatcctttgtatcgacctaaaaataaacataggaagtcatatacctcaagattcttacattaattaaaaataaatccattgacagactagcagaggaaaaaaaaaaggctaagatattttagtgtaagactttgaagcttactttctttcattggagctaggtttaaggtcacggtcaataactccacgggttaaacttcttgcaagctttagttgtttgtgctcagaaggatttatttttcccacttctggatcccaaacaatgacaatttcatttgttgaagcaataggtgatggtaataaaaaatttgctcctgattcctacattccaaacaaataaacttcatgacaatttccatgaactcaaggacaatgtctttttggataagcaaacaataaagagatacaaacacattaactttaactaacaattgcctttgaattcaagaaagaacaggcaagcaagcaaacaaacacaacaactttcttttcatttgaaatgtacctgaaaaacaactcgatgctcaaagccacaaaactcaacaacaaggtataaattagaatttccatttatagtgttttcacgctccttgattttatcaatagatttgaaagcaagacgatctagccagtcaacatgcgggatttgtcctctctcatacttgttcataagcttctccaagcgctccaattccccacgttcatgtctaggaacctgtaaataagctttattacaaaatgatccataatcttaccgattaaattcaatagaaatcgctacaaaacctttccaggagtagttgtactaaatgatccatctgcaacttttccttgccaaagcctgagcttctgttttcctgttttgagctgccttttgctattaaagagaagaattgttgccccaccaactaatccctcatctttcccacgtgaaacatcccaaacctacattaacagcaagagcatcaatatctatgaccttgaatcttacgaaaaaaattagggaaaaacaaaaagtgattatcaatagtttaataaatcaacaaaacattataataatcataaaactattgatcaaactagagatataaagaccaacaaaaaagagaggactgcttcaaaaaatccatcttttaactcataaatgccataagatttacaaaggagagcatttcattccactgagtaacacaagtatattaagtgagaaggccagcttactgtaaaagcaagctgtgagtgaccagttaagtctcgatatttggtgctaaatgtgattagttcattccaacaatatgaaggtcctgcagattccaacctgagaaagagtaaagaaaatataaaaatcatcataactaaacgaaacaatataacagtaagtttgacacaatagaagagtttcagatgttatttcagtagatacaattacacaaaaagatagataaactatatggtgaaaccttgttcttgtgggtaagccaaatggagcaccatcaatgtacaaagcacactccacatacaactccgcttttctctcatcagtagttgaatcatcatctgcagcaaaagattaaggctaattaagaaaaaaaaaaaattctattttggtagaattggccaatttttgatcgaaatgacgtaatttctgaataatacagattgcccaatattgcaatcaagtgctgaatcgcttaaattacacgctgagttcatatcaaagtcccaaacgcaaagaatttgagtaaagcggaaaaagagaattagggattgaaatcggtaccggaatcaagggatttagaaggaggcaaatttccttccaatttatcgattcggaaagtcaccggaagattgatatcgcaggacaagaagaaccggaactcgttcccattcatctttctcgttcatacgcttttttcaaagcttttgtttttatcatgactagttacgagggcacgtgtaagtataggggttgaattttttttttttttttctaaaaaagtaaaaatttcttttaatttttaacatgtatcaaaattatttaaaaaaatttagagcattaaaaaatttcttaatttaagtagcataatttttgtaaattgtcaaaactttaagagtacgatttgctacatattaaagttttgaaaaatatgttatatagataattcactgtattagtaaaatttgaacgaaattgtacataattttttatatctaataattttaatagttcaaaag

SEQ ID NO: 266887 - DNA, 2718 bp, Cannabis indica
agtcttcagaccagaccccatcctccactttctctctcttccccccaattttctctctctctctctctcttggattttcgttgccagcttcgtttcacggccattctctctatgctttttgcttatgttgtttatcgattttgctccaattgaaggtatgtggttgtattttctttgatttctctctctgttctcttatatatccattccaatttgcttctggtgtcttacccggagtcgtacggttcaggttaattatctggctcgaaattgacgtttaggttagggtttattgaaaggggaacgagtatggggaaggtgtctcctaaagagaggagtcggaagcagaaaaacgatttaggggttcgagcaagtatttgaaacccggagctctgctcggctccggcacaacaaggcgtcggtttctaagtcttgtctgatcttggaagaaaaagagtcgctgtgtttgagacagagaaggctgagggtgctaggttggtggaagagagatttgttgatagaagccctctaatgttatcaccggtgaatttggttaaacagatagttttattggtacgccgaagactcctcgagttgaggactgtgactcggaatcgcggcttgagtctcttcccatggaattactggtattttttctttctcttatacagttgtactattcgttttgttttgttttttttttctggtggattattaattgattttcaattttgcaatcctgatagcttgttttctgcttattatcatgttcaactacacatattcattgttttgacttctttgttgccgaaattttgttactgaatatatttgaaaactggttcattcgatccttttttaatgaattgaaatttaagtccataagaagtaggcttgttcaaaataaataatcgtcgtttgatctatttgtgctatccaatttagttagttgatagtgtttgaaaattgattcatttgatcattggctgtgttaagctggagttattgattattcatttctgaattgctctgatcgtatttctaatttttttgtttgtcaaaattaaaggtgccgacgtttctagaaaatgaattaattaatatgactaaaatcattggaaagtagccataatagtggaacaaattagttactgattgtggccgtaatattagatgacaataatgacaaatcagttagatgacaaccgttcacagctatgtataatatgatggacatacattcaattgtcatttatgtcaacatgttgtatttcggatgtattagcatcatgaaaaagcttcaagttacattggttcagtttgaaatttctcatatgtttgtgtattatgttatatgctgcctgcttataactccttttgatgcagtattgctaagtagttctttctgactttaaatgtaggtcaaggtactttgtcacctgcatcatgaccaattgagagctgtttttcatgtgtctcagcgagttagaaaagctgtaagtttttctcacttccttgtcctaacccaattccatttggtttcttggttccatgtaagtctttatctttattagatgaggatcgttaacctgttaatgccaatactgtatacaggttttgcttgcaaggcagttccattttaattatacaaccccagatcgctctcgccaggagatgttgagtactatgactccccttcctactgagcattggccattcttggggtaggactttgccatttgttctcttttttaatattctcttacaatgtgtttactaatattttgatgatcatttgcagtaggggagatggaaagggtatgctgttacctagtccacacacacccaaagctccaaggcatggaccccgccccccttctcgcctcaaagcctctgaggttcgtcaagttgcagcagtccttttccaggagtcaagtctgcctgcaaggtgcatggtgccatcagtgttagggaagcccctgtgtaaatctttggcttcgaatagggttctattctacgaggacgagttatgtcaagctgttgctcagaataaacttcggtgaagtggttgcttcttcttgttcattgtatatatacagtagtaagtattatgaaacagttttgtagctttgctggggaatgcaagcttagctttaggttatatgaaactagttttcaattaggatatgatatggttgtgagaataagaccagttccaatctggtcatttttgtatatttgctctatatgtcaaaatgaatgacagtcattttagtactatctcgaggctgctcctatggcttctttagacattggctcagtagctctagctttatgacgtggtacaggctagtgttggtgatggaactattatcatacatacactatttaaactttttcctttagttgtctttgtttataaatatgtaatatatttgtttctcttatttcccagactcttagaaacgcattttccgtgtcaatgatattttaaattctaaatctatgtgaagaatgataaagcatgtatgtgtacgaataacagaggcttatttttaccaaatgcccaaactagagtgttgcgttagacatctatctagcaactaaaacataccattatactaaagaataaagattaattatctctaggactagttgatgaaatgtgagaaagttaattacttataagatgattaaatgccttggtcttcctctgta

SEQ ID NO: 266888 - DNA, 2997 bp, Cannabis indica
agtttaaaaagtattacaagtttatttttattctgtttaatataaaagtttaaattctgcgctattttgattagtaatcccgattaggggattagggtttcataagtattttgggtagcgtgcctaattatttagggcgttacagaaattctcctcatactttggattttaggtaagaaagtgaaccttgtacatagagtatagagcggtggcacacttgtatattatgtgaatccttagatataattgtgaattaggattattatcctaaagtttctatatttatgcatgcaatacatgaattaattgagtatatgtagatggttatgagagtaaggcataactagtttaacatatattaagagttgtgtagtcaaggcataactaggttagattcggtaattaaaactgagataaagccttattaggcttaatgcaataaataaacgcgtgagcataacacatagtgtttatataatatggacttaggatgtggtggcatcattataagtgtagtggcgtgttatattagtgcgatggtacggttatctacccaaaggtgtattatgtgtgatgtatgctatatcttatatttggtttaattatgctttcttgttgggccttagctcatgagtgctctattgtacaggcaagagtaaagcagtgtcaggccagccatgagttgaagggttttaatagtgaattgtacatgttacgttcaagctagaccacgagggttgggtccaacaggaagattgtatagaaatctcaattttgtcgtttaggtcggcttgtatgtaagcaacttataatattttaaaaagaattttacaggatcccagattataactatattttttttgaattaaagattattactatcattacaagttgttttgttgtttaagttaaataatttttaattacttggcttattagacctcgattaatgagattagcacaatgtaatcacaacatgtgatattcttttaattagggcattacagattggattaccacttcgattaaaacttctctctagccatagaaagaagtttgaattttcaattgttaagcctcttccaccacaccaagagcccccaccataggaagccgatcacttatttcaacattaggactgaaatacactacaaattttgtaaaattaactagctggatagaagcttccccataccatgtgagcaatgtcttgaaatggtagcattgagcgtaagatgcattgagaaaatagagactgtggtctgcaaacaaaagatgcgagatggttggtctgaaatgaccacaagggaacccactaagaagatcattggaacaatctcacttgaccaaggaagagagaacttcaacacatatgaggaaaagatagaaaaatagtggatctccctgcctaagacctctctcaggagtacccacaggcttcaccatttaagagaattgagtattcaacagtagagatacacttgataattttgcaaacccaattcaaatgtagccctagcttgatcatgattctagataaaaatttccattcaactcggtcataagttttagacatgtcaagtttaagagcacaaaaattaactttttccttctttttcttcttcaaagcgttaatccactcaaacccaatgagagcattgtcagtaatcaaatgaccaggaaggaaagaactttattcttcagcaatgatcaattccaaaacttctctcatcctattagtcatggctttggtaattatcttgtaaatcatattacattaactaataggtctgaaattagatagacgcaggggattatcaatcttaagaatcaaacaaatgagagtgtctatcaagtgtcctgaacaaaaccattgagtcgatgattatggttgaaaccatagttttccaaatagagtagttatttcggtcaagtttcaggggaaagggttggtttaggatgttgaagggttatgtgtagtttgcagcatagctggacttagcttgtgcagtgttgcctgtcacgacagcttagcttgacctcagtgcaaggctgttttgagcaacattgttggctgttgtaggaatttgaaggaagtcggttgacattggcgttagccaagtgttgctctgataccaagtttaaaaacgataaagatggaaattgtaaatctcgactcaattgaggctgagagcattgaattcattgtatagttagggatacaatatcttagttactgtgatagagacacgtggcaacatacaataggcaatagaataacaaaattaagtgcaaaaagtaatgcatcattacacagaaaaatatgcaacagaaagagaatattttgatccttcaagaatcaatactgacagggcattgtattctttgtagtaaagtggaggtgagtcatgcagtattcttcaattctcaattctcaacactgttattctagtagagtaattctatattcaataaaaattatattcaaaatggcccataacaaaatcattgagagctttgtgcatactattagtggtttattttatcaaataataataaacataaacatatttgctttgattatgattatgttcaattcaaaccaactcgattgtaaaaaaaagtcttctaccatatcacaattatattttgagttagacagacaacaaagaccttacatgtttcacactttgtaggtttttttattttttattttttaaaaaaataaatttttatttgacacataaaaaaagataataattttcctattgaaatcttattatttatacatttactgttggattaaaatcctcaatatgggctcatatgtatattagtgtattgctatttgaagcttggcccaaaataaagtgatcattttagtaattgtgggtcattgggtattaaagtgtcatgggctaaatgtgtagataccctaagcgatatttctaatttattgaggggctaaattagaaatacttaaaattaataacctag

SEQ ID NO: 266889 - DNA, 4035 bp, Cannabis indica
atttttattttttaagatctatttttcatgattgtttttatttttttgggttttaattagtgcctcaatttttttgtatgtggctcctcttttgtctttatttttaattaatatgttggaaaatgaatttttgatggggttttcatttatgggatttctgttctcaattttgttatttcagagcatatgaattcaggtccttctttattactgcctgttaagaacactgttctagtcttaatgtctgtgcccatcttcttcaaactcaatcctcatttatttggatcgtaaaatgaattttgattagatgagttttggactggtaatatttgcataggttagagtcttgattcagactctacttaccagaattaccaaaccaaaatcctgattaaaatgatctctctcctttttcatctagtactatgtcgttttgtaaagtaactggttttataagttttaaatttgagtcatattttattgttatctgatcacttttcacttttattatcaaacttttgctttcatgatgttatcaaattcttgtcttgaaaattactgttaaaagtttgaaattgtcgtacttatattgttgaaaaatgtacttttctagtttgggtgatataatttaacgatgattttgtattgaaattaggatgtggaacgttcctgaaactaaagatattacaagaacaacttcagtggaagctgaaaaactgaaactagtctctgagggttgtggtccaaaatctgtgagtatctcatacctttatcgtattcttacttttaataagcttgtcattttttttcttttggttttttgtttctttggtctgatttgcatcgttttagctgcatcagaaggaggtaaggcgcgacccgaaagacatttacggggaggttttcaagactcacaatgcaatacagtaagttacactgatgaagtattaaccttagatattcttttgaaggtggaactcaaaatcatgttgtgtttcattgcagaacgttggataagaccatttcaaatttagagatggagttagctgcggcaagagcagcacaagaatccattcgcagtggtgctcccttatcggaagacttaaaaaagacagggtcatccgggagtgggaagagaaaatatcttatggttgttggtattaatactgctttcagtagccggaaaagaagagattcagttcgtgctacatggatgccacaaggtttatataatacttcttcgcattagcttttttgtgggtcaaacttatgctaccttgcttatgtaaatctgtcatctgatctttctaataaacatttgaaatagtgagaaaagaaagaggcttgaggaggagaagggcattatcattcgatttgtcattggtcataggtgagtgatttacaatctagtaatgaaaactaaggtcgtgtttggttggaaataatggagtagaatagaatggaaaggaatcattttcatttttttttcctttgtttggtttgtattttaaagtattggaatgtcattccaatgaaattacttttccaccatttatgtggaatgactattccaggaaaatacttttcaatgcaagatgagaattttttttatcaatcttttttatgtattttaaattttattcaactccattactatctctattctcattcccattcttattcttgtatttctatgtcaatcttggccattctgtttgttaatgggggattcatttgttttcacattgtcacaaggaaatttaattgctgatgccttttatcagttgaagaatctgtccaaagttatcaattgaatctcacaattttctttttctcctcatttagtgccacatcagggggtattctagacagagctgtagaagcagaagacaggaaacatggagatattttaagactggtaatttttcttcttcttcttctatattgtagttctcctcttgatgctacacttgttgtaaattcagtttggtattatttttaatcactcataaaagaaaatattaaaaatgttatgatcaggaccatgttgaaggttaccttgaattgtctggcaagacaaaaatatattttgctactgccgctgctttgtgggatgctgatttttatgtcaaagttgatgatgatgtccatgtaaatattggtgagtcttcttcttcttctctattttattttacaagacatgtaaattgtctgttaattcgcatctcacatataaatttcggattataaacatcagtatacattgtcatgtaaaagtttcttattgaattgatttgttatgtaatatttgtcacactaataagtctatcttgtgtaaaattttcttagcaacacttggagaaacactagtcagacatcggtcaaagcctcgggtgtacattggatgcatgaaatctggtccagtccttgcacaaaagtgagggggattttctcatagttgtgtgtgtgtgttttttcttatcttcttataaataagaaaagttttattaactcaaaatcatttaattattgttgtcacacagaggagtgagataccatgaacctgagtactggaagtttggtgaaaatggaaacaagtatttccgtcatgccacgggacagctatatgccatctcaagagatttggctcagtatatatcaattaaccagtaagcttatttaaaattctgttattggaaacttttataaaacaattattaagattttgactcttaaaacatttttactatgtttttcaggcatgtcctacataagtatgctaatgaggatgtctctttgggatcttggttcatcggacttgacgtggaacatattgatgatcgaagattatgttgcggtactccacctggtaagccatccatctcttagaagttatgacttgcatagatcttgaagtacactgtgcttatgttgactatgttggctgtagactgtgaatggaaggcccaagcaggaaacgtctgcgttgcttcatttgattggacctgcagtgggatttgtaggtcggctgatcgcatcaaagaagtccacaggcgatgcggagagggtgagaatgctttgtggagtgcttcgttctaagaggcaaactctttcgcttcttccagcctcaggaaggatttttcgagctcctagtacaaaagcatatacacgtatttttgactttacttttttaatctttttagttggggtatagtaaaattgtactatcacatatagagagggagagagtgagaaagagagagagagggagagggagaaatatgctaaatgggaccaccttcattttagtataggagaatggccattgtaacagcccaaaatggaagcagaggtagaggctgacaaccacaattctattctttgaggcttgaagagccaatttgtaagttacagttctattatggcttatcaagtgcttaataaatacacatatttgtgggggactcttactgcctttggcgtttttccttttgggagtagtatacatctatatctatgatggaagcattatttttgtattgaaatctctctttctaccatttattacatgacacaaggaatctgactctgtcacagcgccatgttttagatgcagagagcacacagaaccaccctgcaagcatcactatttaatgctcatgctctatttgaggtgctttgtgattttggtaagagatgccctgaaatatgaataaattttatacagtttacagacatggctaataagccaacagtaaaatcatggaggacaatatttaactagtttatacctctatttgtttatgtctttatctctctctctctctttgggccacaatgtgttaaatacaaagagacaacctttgaagcaacgccgtacaagttagctgagatttgactagttttatttcttcattcatttttatttttgttacatgggaaagctagataaaaatgttttgtgctactttaaaagaattgttcgatggaaaagagaacctgtttaatatgtatagagaacactatgtttatgtg

SEQ ID NO: 266890 - DNA, 2182 bp, Cannabis indica
tcatgaatctcctcttactttgatgttaaccgaaagtcatgcttgattatttcatgacgcagaatttggttcttttggttttggctgagagtaacatgaatttgtgtcctaaattacgtaaggcaactttttttttgtttttctcttacatagaggaagaagaaaaatcctagcctaaaaatttagattctcatccatctactcaaagattaggacactcttggaaaattagacaaaatacttaatattctctaaggatcctagcaccaaaaaaaaaaatcaaggatagcttagaaaataccaaacccatggagaaataacctgttcttttaataaccaaagaacgcaaagcaagcaactccaatcatactgccaccactagctattaatttatttttatttttattttttgaaaaaagagacagaggtctaatgtctttgtctgatctccaccctcacatttgccaaaggaaaaccgtggtaacatgaacttgggattcccaagagaatgaaagtcaaaaagctttgtatatacaaaatgattacagaagcttaaatcctattagatgactgaaaacaaaactagcacaataggtttccgcactctctacacaaatataggaaagaaagatcttttcaaaatatcttgattaaaaggttcaagttgctacctaaaattttatctcctcccaaatttcttcttttgtagactctttaccctcaaatattatcgtgtttctcccaatttaaaccgcccataaaatggctagcactgctgccagccataattctacacctacccctaccaatttgctctcaatcatttaagagccaaattgcagcaaaatctatttctctcaatcaatttgctggaagaaaaaattatgcaagagtttttatgagaaggtggacatctctcgggggtgatcattttgctacatatgcatttaagatttgagaaatgtataccttaaaactatgatcatccgaaatagggtattgttttgaattttggcatgttttcaaggtatacatttatctaacgtgtatgtacacatattaaacccgtagatcctgaaaaatatacccaaattcaaaaaatagatcactttaaatggacacctaagtgaaacattaagcctattgcaagaattgcatttaagcactatcaagtgaaaatgtattttttttctctttataaaaatcatgatattaagccctgtagagttgggcattgagttttatcgtgcaatttttttttttcttcataaaaatcattatttctaagtcccatcgagttggacatcgagtaaaatcatatttttgcagattttagagtttcaaatctaaacaaatcaaaaaatagggtcaagatctattcaaaatatattaacaaatgtcttactagaacttatttgtgggtttaagttttggtagaatatattagctgtataatagttgtagaaattaaaaataaatgtaattacttaagttttctatttaggctatttagttttgtatataaaaatacatgctctattctattgaataaaatatataattgattcacctttttctacatagtattagagctgatttttaggattaggaatcacaaattggggtttgcaattaggttttaagagttcttttttgggaaccctatttagagtgatcttttgttctcaccgccaattcataaagcttgcccagtcaccgatctcctataccccgaagtcaggttgtcgcattccttacgtgtgtgcctcacgcgcctctcgtttttgcttccacccaccttatgtgtcggtgcgtcagacgatctctccggtggtggttggtctctagctctttttcagctcctctctagactatttgcatttgtcccactacactattctagtttggtatttctctgttctatgtgtttgggtgttttgttgtttgtttcctgctttgttgttcgatatttgcttttgaggttatggcagaaatgaaattagatccaaaatcagtggttttctgtgatgtggttcttatgatgtccaaaattatggatcataaattgactggtcccaattacttggaatggagtaagacaattcaactttaaataaggagtgttgacaaagatggtcatctaactgatgatcctccctaagaaaaagacgattcaagaaaa

SEQ ID NO: 266891 - DNA, 1608 bp, Cannabis indica
tttttttttgcatatccttttttagatattttttaagagctcgccttttagttttatagagtagaagaaagaaatgaaaagttgcccgtttggatattttcaaatgaaagatctttcttttaatataaatatatataaatgtttgcacaattggaaagcacttccggtcaaaatatctcaaatttatctagaatagtttcacaagacaaaaatatcatttatacacctaattataatttcctaacaaaaaaattaaatgtaaactaaaatacaaaaagttgaagaatatcacgagcagtgcaaaatacaattaggatagattgaaattttatcttttcttattaggaaagtgataaaattgtaaatacaaaagcaccataatttaactcaaataatgtgtcacgtcacattagactgcagataagttggtggatctattttttctgctcatagattttctttttatatacataaatatataaataatcttaaatacacttgaaaacgatttttgaggtctatctaatctagtgggtttgaaattcaataatgtgatgcagtgattttgagccattttgtttgaaatgagttagtagtacaagtgtggtgatgtaaaataagtcaatttttgagacttaattttgttagagagaggacagaaaccatcaattgtgtggcatggtttgttgtctactcctattaaattaataaattgctcagccagacagctgatttcacataaaatggtccataccttaagaattgccatattccaaacctattaattatacagacagaatagtcattttttgtgtaaacttccataataaagaatattacatctacatttgcgtttatgctaagcactccagtatacaaattataattaaaaataaataaattgatacctttctttttttacttttaggttgtgtcaaaatcagcccattctgatcccgttgggattttcttttgctctaatagcttttactgagtttttttttcttgatcttttatttatttacgtacactttcacggacagtatgtatatatttagatgtagagatgtgtcttatattgaaaaaggaaaatatatctaatattgttgaggtgtgattcacaaatcacaaacataagccaactaataatgttttgtttggctaccaccatacctccattgtgggccgtaccaaaatattagatattcaatctttcaactcttcattttgtattaaagaaataatactttgtattgtgaggttgtctttgttgtcctctctatagtgtattaagttctcttatgtgcaagttgtttgacactacttttcttctagatatgctgggaaatgtactgtgagcattaaagtgtaaaatcaattatcaattactcactgaaatatcttccaagtgaacgatgctcaatttgaaaaatattttagtgaaaagttagcatcttttgtactaaaacataattcatctaatctaattgtaaagtgttaacaaaacattcttacaaaaatattaaattttgcatcaaattttgtaattgtacatttaagtacaatactaaaaattgatgtaaattatcacaaaagtatttttttttt

SEQ ID NO: 266892 - DNA, 1734 bp, Cannabis indica
aaaaaaaagtatatgaacatatcagaaacacacactgaccaacattcagattttgacagaatttaagcaaaactatcaaggattagagttctctcatttaaatgaataaattctcacatggacaaacaggtatgtaagcattcaagactgtattgccaagataaacatcctacagacctaaagcaaaagtaaaactactaagttgagacaacaaatcaaacatctcaaaggaaaattcaaagaactagaatgtccaaaaactctaccttgatgaactggccataattcacccgttgactatttggatatctgtagtacacagcaaagcctggcatgtttccacattcacgctcatatacagattcatcactctgaaagagaaacatttatctcaagttaaaataagaactactgtctcataagccaactctgtttcatcaacaaaaaaaaatattacacaccttccagtggtaagcaagcttcaatgtctcatacagaaaccttccaagtcttcctgcttcatattcagtgcagcagcatatcatgggctgtaaggtcttacatatgagaacatcaatgtggttgactgtgttaaaaaaaggtgtcccgagggaatgaagagtgtgtacaaatacagcacaatagacagcatctggcatactaaaagtacatcgtggaaaaatacaacgctgaagaaactccatgttgatctttagagtatcaggacatgagctcaaccagttgtccttttcacgaaatagacgcctacgaacagaggcaacattatcctcatgcttgcggagctcgctagtcaggcgatctagagattcttgaattctttccttgtctttcttccttttggtaattgctgaacttgaattatccgaaaactcttccagagctttcagggctgcatgctgtttggaaatttcagattcataccgctttctaggaacataaagatcataaagattgagcccccagaatgtagtatacagatcaggagaaaggctattccaagcttttgatggcaacatgattttgacagtattcaaaagatcagaccacctgcataaaataacatgaatgataaaaaagaatgcaaaactcagtatcacattatatatcatttatgccaagatatggaaaatgaatagttgtatacttgtacataaaagatgcaacacacaaatagaaggccaagccaaaatcaaagtctttctcacaataaccctacaaaatcttcctgttttgagttacaggcaaaaaaaaaagtcaatgaatgaacaatggtcaggtgtattacatcaaaggcgtccgagaaggaccaagatccaaaactgcatcaccagagtgttcggcatgttcagaatctgaatttgcgattgcagcactggatgggtcattgtctaaaggccagaagagatcagaacttccctttatcttgaacagtctcattacaggccggtatattaagaaagcaacctatgtaaccaagcaacaaacatttattacaagtgttcaggtagttaacaataattagaagatatctgaaaaacattaaaggcacagttagtttctcaatagcacgaaaagaaaagttttcaaaacagtctactgaaataaagcctatgatctcttcagaaatttaagtactagaagccagttgaacataaaaaaatattaatctatgcacatttaaggattagtaatggggagagagagagagagaga

SEQ ID NO: 266893 - DNA, 2020 bp, Cannabis indica
aaagcagtgatcacatgggtggctttagtttagtaaaccttttctgtttttctatttttctttttttttttaattccgaaataatacagaatttcatcacttttttaattttttaaaaaagaaaaaagcttccaaaccattcaaaaaaaaaaaaaaaacttccaaaaattaagctaaaaaagtaagaataataagttaaaataaatatcaaagcttaagaaatatatattacattatttttataaaatatatatactaaaattatattacacaattaaaatttagtaattaccaaatataatataaatacaacaaattactaataatgtaagacaaactcatacacacgagtttctttaatactagaagtattaataataataataataataataataattttttttttgctaaatatattaataataacttgagtaaatagtgaaaataaaaaatagtggaagaagtgtcatattcaaatttggtgaaattacctgtcaatattgaatatatagtgagtagtgcaccaatatgaatattatgatcatataaaccaaataaggaactaaataccaaacatgagaaatgtactttataagtccataacacctcagaaattgtttcacgtctcttgtgtaaattatgctaaaatagtgtacctaataatgtgcctttaatttgtctatatatattattatttatctattggagccaaaagtatagtgtagtactcgtgccttatacacaatttggtgcatatgtataataaaactgttggtcaaatttttattctttttgtcttattagaatcggccgacgtatggaagaatgagacaaatttgataacgacgtcgttttgctacttacaaaagctctgaaagcgagtttatattacattatcctacaggtggcaccccattatttactaccccattttttctatgtcatgcttcttttctgtccattaaaaagaagaaaaaaaaaaaccacacaataatttctgtatggatagatttcgttttcttaataataaacaaaatacattattatttcgaaactgaatttatttgttgggtaagagaattttcgaaagacaattaaaagaagttattggggtgtagttgcggagaagaaacattttcattttttaattgttacttcaaatatattttagattaaacatgattatcataatcatataaaaataattagtatactttttaacaattatacattttaataatatgttactaactaaatttattaaaatactaatagtcttaccttatactcttaccaggtgtcccattataaaactaaaaatattgctgactcctaattattggagatgaaaagaaaaaaaaaagactccattgaccaattatataaagactgatttggatttttgcccctgaattttaacatgtatcaaatcatgtcacttgaacttttaacatcgttaaaaatgcttcctgaactattaaaattgttagatttaaggacttttgtcaaattttattcaattttactatttcaaaaattatttatgtactaaatcatgctcccaaactttgatatctaccaaatcatgcctctcgaacattgccatgtattaaattatgccctctgaactttcatccatgttagatttttttactaaaattcgaaatttttttttatttttaacgaccttaaaagttcaaggggcaggagagataaaaatcctagcatagatatatattgcatcagcagtttcttttcttattgtttgatatatgcatcagctagttttggttatagtcttgtaacttgttatgtttgtttcgtggtaacaaactaaataacatgtagtttaaacttattctgagtatgaaacgaacccaaaaagaacatttatataagtcttcacggaaaattcaaaagtacctaaattaagctagctagagaggtaactactactcaaagcccaacctcttttctctctctctctctctctctctctatatatatatataagtgt

SEQ ID NO: 266894 - DNA, 3281 bp, Cannabis indica
attatattacttgaaatcgattgcatagaaaaatccataacagatataaaatcatgcaaatatagctagccagatcacaattttatctgagttgcagctaagctaacgaactgttatttgttgacttatagatttatttctattccaaaagacatgggcacatttaattgtggggcatttgttgctggaattgtaagggtaagcacttcatttactttgtttcttgctaatcgatcttgtggttaaaaatttctgatttctgattagcactcctttgcctttgaagggtgttcttgatagtgctggttttcccgctgtggtgacagctcattttgtacctatagagggtcagcagcgacctcggacaactattttaataaaatttgctgaagaggtgagtaatacctttccatttgtgctcttttcttctttgatagtctacttttttgcattgagttagtgtatgtctgttttccatacctttttttaatacttcaactgccgtcctttaattcccggttgccagttgccagttgccagttgctattagaactggggagtgtaatttgactatgtggaatgaagttctgatatcaaaagtgcccatttaaggatccagaatgtgttcttaactttttaacttcatatccaggaattcttagtctgtttatgtatattccaacagcattttttttttagatttaatccacaccaaacatgcaacagtgttattatggtagtatatagttagtctgtaatagagtttgaaaggaattttttttttgagttgtcaaggtctcttcaaacagccatatgcttttataatcatctgtcactattatgctaagctctccaagttttgtcttgcttaattgtgagtttcaacctctaaaattattgtcatttagctttttttgcttattattttcaatgttctgtgtagagctagatatttcatgctgactcttttccaaaataccataataagattagacttgagatgaaagttttcatgcctttcaataattgagttgggttaaggttggaatacattttgctgcatgaaaagacagctggaagtattgaataggttattatgagtattgtctacctgtcatttcaaccttagcctaaacattcctatctactttgagagttttcaacattaggggataacttagttgtacagttttgtattgattttgctatctgatttgattgttatattattattaatttcaggtactaagaagagaagcaaggttaggttgagtgtgtgttgaagaccttctctgtctttatatgaagtagttttttctttcatgaaaatggaaaaaagagaggatggtgaatgttcattaatagctaagctagtgattatcaaaagctaatctgggtttttcttgcgaatcatgtatccatcatttttcttgacaaatttaaatatcaaaaaattgatttactataaaataactatatttatgccatggagcactatgcatatgaaattgaagtaagtaacaaaacagggttctttgtgtgggttgtggttaatattaccaaaacccaaaaataaataggacaatttacatgaaaaatacaaaatgatacttttattacaattttacttccacaaggcttggacaatatttttacttttattgttgttttatttactaaaatacatcttaagcatattatacatgattatctcactcaaagtttttccatttttttttttcagttttaattttgaattggatatccataatcatatttcgtttcttcctcttaatttctccatacaattacaaccttgatctttccatcatttaaagttcttcctcacgatttcttctgtattgttattcttctacaattttttttatataatagtaataactctcttatcatcttttccatccctattgcaaaaaaaaaaaaaaatcctgctaaacatccaaaagctttagatgggggtgtcaaatcggttggaaaaaaagaaaaagaaaaaagaaagttagaagaagatgattttgttgcacctttacctaaacagaggaaggattctggtaataagaaatctaaaagtatttgatttttgatgataactaacatggctcttccattttcttctttgaccacgaaaactaacatggctaagacattgtaacacttttgcttgctttgttcatctccaaacattgggatcgtgcacttgagcacttggcccattgtcgagcacgactctgccccacggattgattagttggcccagccctggggcatgagcatccctttctttttgcttgggttggttagttgtggttctattgtttagtggaaccttgtttgctgattttgttgaagagctccaatgacatattttccttcatcatttgctggggcagacagaccaacttcggggtggttaaatcgtggggtaggaatgtcttcctctgagagaccaactttcactcacagtcgcgccaaggttttttgaaatttttaggagaattcttcctactccgcagtctcttttgagtttcaatgagttcatgtgccatcctcactacctcaggatcttgctcataatactcttcttcgtactctttattgtagttctcattgtggtcatcttttgggtcatctccatgaccatctcgcatatccacatcgatgggatactcaacaacttgtttatcgcaagcttgggtttttagattcgggcgattgcccacttcagatgcttccttgtcccttgcaacacccatctgagtgtttgtcgggggagctagttctcatcattgttagcgacatcgcccttaccatcttgagttgacagtttgaccattactttgcgtgttacaaccattgttgtacatgacaactgtggtaatcttcaactctcaataaaagcatcaaaattgtaatacctcgaggtttaataatcagcaatcctaactcgattaattatgtattattgaggaattatttattataattagtattattgaggaattatattattatataatttaatatgtgatacttttatcgcgtattgcattttaagaccccgttagtgtgataggggcatttttcgtaattatgattcgagaaggataaaatcataattttatgatataatgtgtttatagactatattattatatagtatgtttactctgtcgttctgtaagtgttttctgacaagtcgacgtggtatagtcacaatcagatattttgagctgaaccgggttcgaggtctaaaatacttt

SEQ ID NO: 266895 - DNA, 1972 bp, Cannabis indica
atatacatgtagttgttactaattagtttttttaagtagaaaaaaataataatataactaatgaatattttaagataaaataaaaatatatatatattgaataatatatttttcttaaaattggatattaatttttttaatcctataaataaatacttatataaagataaaatatagtacaatcttacatacaaaatttatttaatttgacaaaatgtagtgtgcaatattagtctaaaatcagattaaacattcaaaaaaaaaaagaaaatattagtctaaaatctgattaatattttaattattataaatgacttgtcttaatttatatatttttaatgtcagattgatgatgtagagccgttaatggagattgtgaagcaagcagcgaaagagggtgctatggtggtatacactttggctgatccttccatggccgaagctgcaaagcaagcctgcaagttgtggggtctaccgtcgactgacatattgggccccatcacagaggctatagcttctcatcttcgtgtctcgccatccggcctgccacgtggggctcctggccggaatatccccctctccgacgagtacttccggaggatagaagccatcgagttcaccatcaagcaggacgatggggctttgcctcagaatttgcacaaggctgatattattcttgctggtgtctctcgtactgggaagacgccattatcgatttatcttgctcaaaagggctacaaagtggcaaatgtgcccattgttatgggcgttgatttgcccaaaacgcttttccaggttgacccagaaaaggtttttggtttgactataaacccattagtgttgcagactattaggagggccagagctaagactttggggtttactacagaagtggggaatattaattactcagaaatgagttatgttagaagggagcttgaattcgctggcaggattttttcccagaatcctgtttggcctgtaatcggtaagcatatatagttaacgagttgttcattcaaatacttctcagcttgaccaatgacataatatagtttagtttatcaaaatcacaatgatggatatccattctttaatgaaatgcagaagtaacaggaaaagcaatagaagaaactgctgccgttgtattgaggctttatcaggataggaagcacagatgcacaatgccgagaatctcaaagcgttactaaagctggttatgtgttatcttaaagtctttaaggatgcaaaaagagccatctacctagtccttgatatgagatgatgttgaaatttgctctgcttttcatactgtcatacccagggttataacatcatattctgaaaattgtaactgtctatattgtatcatatcagataatacaatacaagtatactgcatactgtatgctattgactgttgtttttaatgtgcttgactcaaataatatatagctcgccagaagatagccttcatatagggaagatacttgaacttatatgaatttttccaacctataatcaaaatgtttcaatggaatattataattcgtcacaagaatttcgtgtagttaagattgagtttgcaaaaattaccccttttcaaatatgctaactccaaaaaagtgttagaagagagagctgtctacgtttgttgtagggtcatgacttaatggagaaatcattgtcttattttcccaatgaaatcctccttgttagactccagcatagctgtaaatacattcgcgcagtgctagtccactacatattttttggattttttaaaatacaggaggtgccgtatatgccataaaaaatataaattgtgttgtacggtgtcataaaaaaatatagatcgttctatgccgtcgattaatttatagggtaaagttcataatgattcgttagctcaatagtgattagtgtaatgtttttctaggctgtaatgattttttttaggccggttcatttt

SEQ ID NO: 266896 - DNA, 1785 bp, Cannabis indica
aatgaaatcgccatcaacaatttcagtttagtattttcgttcatatttcatattcatctttttctttcattaagtaaaggatgtatagaaatatgatttatgatttttatattaaaacactcttagtaacataattaagttttgggatcatggttaaatagcacaactaaagatgcatgcatgatgacacaacagtatagaaactaggaatcttcatgcacatccacctagcatgtaatttgccacaagactaaattaacgttattttctcttccagttcaattgtcaatgctctcattaataaaaaattagtacattatcagttgaatcttatttcaacaattgagctttattgaccactttaactaaacaattttcttgtcctacaaatataatatttaacatgtatattgttatgttctgtgcatattcactataatcccatgaaatttctagattactaaaaaggtaaatgctagtgtttgcccactctctgtagatatattcatttaatataagcacacaaagtatttagacttaccttttcaatgttccttataattgtaggcccattgttttgcactactttcacacatctgagttgaaaaataaataaacaaacaaatctttgttagaataattatatctgaagaggcctatgttgaatagcaattaaacccacttaatatatagtgaaagcggtaagccttgttcaacattggcttccatatctttgactgaaaaatagacacgaaaggagtttattgtagctttaattttctttgcaaagtagcacagggttactttctcataaatacagtataaacctttgggtgcttgtactcttgtattataaatatcagaatatatagttgtaatcttttttgtgtattccttactctaataagcttttacatacttaacaacacctttactataaaggtctgaataagcttttaatctaatacaatatatgtgtatatatgtatttataattcaatgtaccattttaagtctcctattgaaacttttttgggctatacactatggattctatttttacatgcaattttcactttctgtacaatatttttttggattagcatgggagtgaagccagaattttttgtttccagtcctccataattgatacaccagcgtcgccgggactgctgaaaacaccttcttttgaaaacctgttactttcttccttcctatctgtcgaaccagatcaactagtcgattggcagggatcttccacaccaaacactgtttaacctattgaagacagtcattggagaatggacactcaaagaataaatggtcaattgtttcatctcccaagttacacaacaaacaacaagtgttgggtacaatgttgaatcaaatcagtctttctttggtgttcaatttgttttgaattgcaagccacattacaaaactatgcttcagagtgtttaatcttccccacacttctttactccaatttactcgacctggcagcgggtaaatctgtaattttgtaattgctttgggtgaagaaagtaggattcataagtgttaggactataccttttattactaatatcttcttccaataccaactgccttgttggggggctgagtaactccaccaatctgcctctttgatgtatacactgtgtacccacttgacccatagattatcctctttagttgcaacagtccaaacatacttgaacatcgttgctttgttccactcagctacattcttgaagtcaatgtctcaagtgttgggttttatgc

SEQ ID NO: 266897 - DNA, 1650 bp, Cannabis indica
aagtaggagaggaagaaaagccaaaaaaaaaaaaaaaaagcgacgactactcgaagatctcgcaaccgatggaatcaatcagataaaaagaaaagaagaaaaagcaagccaaaccttcccacacactgaaattatcgctttcacttttttagaaataataaaagcaataacgatggatccaaagcacacggtaataaatacgagtggagaagaagactggagaaaccctagctagctgttacgctccgatcttggataccattactacaacttttacatgtaccgattcccaatttcccccgtttgtctgacctccacaatgatggcgtctatattttatatatatgttattacctcagtctctctgtacataaatatcgtattatcatataaatataaaatataattaaagagagagaggggggagggagatttggtcccttaccttagcaatggattgttgttattagtgtcaatatttaatgagaaaaatataagtcgtttgcccaccgaataaatgagcataaaacacggtacggcttcaagatcttggtctttcgtcctctttacttaactaataaataaataataactgaagttatccctatgtttttctgttagatccctcataatatatttatttaatataaacccccacataagaataaccggagtccggagttgagttgggttgggttgagttgggttgggttgagttgagttgagttgagtgagcgttgtattgagtgtgaggaccccacgcgccaattaaggtatgacttcgtttctgaaatgaaagcattgtggtggtgatacaacaagttgatagaaaggaagggagacaagccaaaaattaaaaggaaaaaatagttgttacataattggaaactctcggtcccacgccatgcgcctatgtgatccgaatacggatggcccaagataaatggatgctgcagagataatttaccaagttgcatcttttattgccacatttttcataaatacacaaaaatgacttaataattataaataagaaaatatatttttttaaatattttttagagaaattatttcatatattatttttaaattttgatttttaaatttacggtttaagttgctttgatagtttctatgtcggttgctatgtgaattttgattacgatttatgttgttctattagttgctatgagtaaaaatgtaaaaataaaaaatccattatttttttttattcttttttttaaaaaaatacaaaatattatttttatgttatttttatttttattatgttgtttggaggttgctttcctgttgctttgatgagcttttgtaaaaatgtaattcaaaaaattcataagtaaaacataatcggtaaaaatagtaaaaaaaaataattttagttattttgtgaaaaaaaaaaatttatattgttgaatacttcttaaaaaataaaaagtaaacaataaataaatttcattatttatttgtaaacacatttaaattattattattatttgttattcgtattttcatcagcatgacacgtggatcttaattaggaaaggtcaaggagtcattagctacccaacttccccaattgatgctctaagaagacaaaggcaccaacttcgtaagaagagtctccatgaa

SEQ ID NO: 266898 - DNA, 1747 bp, Cannabis indica
atgtatgaggatgtaaattctacaaacctgacacccggtttcttgaataagtgtatccaagaaaattcgagaaagttcccagagctcagcttgtgcaccttcatcatctagaaactgcagctgggggattaggagttcaacctgtggaaatggaaagtaagctcagcaagaacttatgcaaacttatttaagaatttctactatcaaatccgatgttcatcaaaaatcaatctaacaagatttcatttctttctttccggattctcttaaccctctctacttaaactcaactaagcttgaagaagaaggctccatgaaaatcaaaaacagaaacatggcacaaaataatcaaatatataacatattcttttggcgcgtactatggctcttgttcctcctgaagatacaaataatgcacttgcttcacttgattgtcggaccgccccttccaaatcagaaggcaagcaactgtagtacaaaataaattgtattattattagactttcttcattcttcaacaaaaaaattgaattgaatttgaatcatcacaagcaatattgatagaaacaataactacctatttacttcttcaaattccaaaaacataagccatttgcttttcgtttacaaagttgtaaagctatatcaaacatacaaaccaagcattccaaataaaagatgaaattgaatctcaaccaagaactgaacaataataaactacctttatttgtttttcttctttaattttcaaatactaaagtataattggattaagggtttcctttcacttctccaacaaaaaccaaataattgaaaatcaagttcaagggtgaatgtatggtaagatacagaacattttatcttaaaactaattgacaatatataaatggtattatgttctcgtacattattaatgtgagactctctaacattcaaattccaagctctaattgttctattaaggactaaaataatacctcttaacaactatacacacaacaaatatgaaataaatgggtatcatcattttctcctcccatgttaaacttacagtaatctatcaataaataagcagaaaatattagagcatttaatccgaaaaagaagtaaaaatcagcgaatcctttgtataatccaactgatttacctgtcatcttcttccacttgttcttgaactgattgagaagataaaggagtggtggcatcttcaagattttgctgagtagggtccccctgaaatttatcaaacttagcatgtagtcttgagctaaaagaatcagctttggtgagtgaatttccactgaaactagagatggaaggaaaataggataaggtagaggagtgagtggttgaagatgaattgggtattaatgatgatgaagaagaataaaaatggcaacttgggtatgtggaagccatcaaagaagctaactgaaactgagttttttgaagttgtgagtgtgatgagttgtgtgtatgtgggattaatttcaattaacaatttaatttgtcaataatccctaaatcttgaaaaaccttactatgccaatatatgttctgttttgggatatgcttattttatggtaataccataccatatgttggattcttcttttattttgttttttcaaaagagattttgagaaaaaaaaccctccatttgagaaaaatttgcctaactaaaaaaattgttaataatggttgcacaatgtaaatttattgtcttattgtataattcttgatcgtt

SEQ ID NO: 266899 - DNA, 2048 bp, Cannabis indica
taccaacaaagattcatccttacgagtaggtttcttcaatatcgaatgatcctccaattcattgccagttccagtcagttccaatgaacctcttgagctctcatttccaatagcatcaacaacaccagactctgcataatctgcattagtatgctgctggatggaaccttcatctactttcttgacaggcattgcagcaggcttctttaacaaagtgaaatcgctaaatccatcattgagctcttcctttttcattgtcaactccatatatccaacttcttcgacatttacatcatcagaattgtcttctttcgaatcaacattttcattgccactcattggttcaggctttcttaacagagtcatgtcactaaatccctcatcctttttttgcacattccccattgtcaatgacaaattcggtctaagtctcaatctagatggtttatctccaacatcaggctcatttaacatacttggtttcctcaaaataacattaggaagactacgcctaacactatcagcacccttcctaactggccgaactggtttcttaatctcaggtacaaatgccttatcatcatcatctttgaattcaaagcctttcttaggaacaggcctgactaaattcaaaccatccaacgattttgaaggctgcccatcattagaccaatcgataggaatctctttcacgtcaggcattttacccttgttcttgtgaaaagttttctctatttcaatataactaacatctgggtttgctttcctacccaatatctgaaattaaaaacaataaataaataaaagataagactttgaaagagcccacttcaccagaaacactcaaaaaaatcacgagagaagaacaaagagagagagaaaggaccttggcaagggtgagtttagggtcctcaccgagcatgcgaccgaacttgagctccattaggtccgaagggtcgagtctaggctcatcttgagaagcacaaactacaaacttattgtggtatttggacaaagaaaggccttttattagtcttctcgtcgtaataaagggaaaagagtaaatgggtgtccgagaaattgagaaagaagaagaagaagtggaagccatgggagaggtaacagtgagagcaagaccgtccattttctcagagatgtaacaagctttaagcttatcaaacagctttaaaagagcattggattggtgggttgtaatcttcttctcaacttgctttagtataaacgagtttctgtgtaggattgaggcaccagttcatgtgtgaattttcgagatagaagaacaaacagagtgagtgaaaaagttttggagagtggagaatctctaaactcaattctattatccaccacagactccggtgacgtggcacctctgttcttgtcttccttaacacaataaaattgattattagatttataaatttattttctaattttagtaagaaaaatttaacatagataaaaatttaaggagcttaatttagtacatgtcaaaatttaaaagatatgatttggtagatattaaaatttaaagagtatgatttagtaggggtgtacatcggtcgttttagttgggttatagtgtatttttataaacccaatataaatgtcgagttacaaatatttaattataaaaaataaaaaaaaaagtgtaacctgcccagtgatttttgtcggtttggtcaggttaacccgtttaaaccgatctttattttttatttttttcattgttgttagttttttgtgttcaaataattgatttgaaaaaattaaatgtataatatatgcctttcaaaatttaaatagttataatttaaattaatgttaaaaaataaatatgaattgaataaacattaaagtattaaacaatatttagaaaaaaaaaattgaataaaaaaatatatactcatatgtaaataatattcaaaatataaatcaaaattatcaactataaattctaaatttcaaaataaacaactataaaatacaaactttaaataaacagtttaactattaaacgtaatttatat

SEQ ID NO: 266900 - DNA, 1107 bp, Cannabis indica
tgacacgttttgccacccctatttttagtactgtttgatagccgaaatattatcccatttttatacataatcttattttaacatatatttctacaatataaaacttaaatagagacaattatacaaataactttatgtgatttataaataaagatttagattatatttgtggaaatgttactgtctttcactttctatcatcatctctatttctctcaacaacttataataaagtgaatttggacaaccaaagcacaactaattgagctggtccacttatgtgctgtaatatcatatccttaaaaaccaaacactatatacttcaattgcttcatcttccaattattggttccaaccaaccaacatatcccaatattatatatttgtatattaatgactagctagttttaattaattaattaatattttataacactagtttaattgaacatacattacaaaactttttttttgttaagttcacaaaatgagactatatagtacatgcctttatttttaagagagctaactttggtcccatatatatgtgacaaaagctagtgtgtgtatataattataatatatttatatagagagattatccatacttgatgatgggaaacaaggcagcagaatctagaaagttccatgatatatgttagtgtgttggattaagtgtttggagaatagaattaattaagggtaatgattaggtgtttattagatctttttaggtgaaagggagatgtatatatacaaatatatatatatatatatatatattatatgagttgtagctgttgagtggagagaagactttttttcatgatgttattgcaaagtgaagtattgagaaagagacttacaatcatagtgagatgaaatgggcatctcctctaaagctttgtggttgaaattgaagactatattactagggatatttgtggtacaatgagaaaaagactttgttttcatcaaatcacacaaaaagtctctctctagccagtctaggcataaacaggctaagttcgtgtttaaggcttacattttttaaggactcaaaataaaaaataaaaaatattattacttttatttaagtaaaattaa

SEQ ID NO: 266901 - DNA, 1394 bp, Cannabis indica
aaaaaaaaaaaaatagggacacatgcacaccattacaaccaaactgcaaccttgtaatctcctcatcgtctttcgctacctgaatcatacatagaaagagcttttagatagaaaagaaacaagaatggagaaagtggatcaccttgtcgaataccatattccaaaatgacattacctttcacctctccatttatgagaaacccaaacaagactgaagtgacacaattcataatcttccttctatattgttgatagtatccaagtttacccatcatttcttctacaaaagcccactaaactctatcgtatgctttagatacgtccaacttaacaacaatgttactaccattcccaaatttccctcttttcatatagtgcattccctcaaaactaaccataacattatcatgaatgaaacccccagagatggaagcactttaagattcaaaaattaccacatccagcaaatctttcaacctacttgtcaagcatttagaacgattttataaataacattgcacaggctaataggttaaaattcccccactctacttggcttgtcgacttttgatagaagggaaatgatagtttcatttatttggtgtacaggggtatcatcattaagcacctttaaacaaactctgaccacatttgtcttaaccaaatcccggaacttctgaaaaaaataatgcaggtaatccatcctggccagggacttttatggaattcatggaatgaacataagcaagaatatcttcctatgtgaaagtctccaacgaattcttatttcatctctgttgtaattttgctcggaacatgttacagcaccaaattaggctgccccctagacaatctgatcgaataaaaggtacctgaaaaataatcacacacagtgttcgtagtcaaagctcaactctatgttcatcacataatcttttgatattattctttttctttcgactagaggccttatggtgaaaatatcttgaattgtggtctccaaatttaatccaaatagctcgatgttgacgcaaataacaaactatcaatgctaattgtaaactcaaattttcgttaacaataaatgaaaccttgtaaataaaaattaactatttatgattaataaataccgataaaacactaaaaaaatttacgtagttttgtttttaaaatttacatactgcacaagtttatattatttatgagtattactttatattcttttctgattgcaagagaatttctcttgatattcactcaattttacaaggtttgtctttccaagaatgatcgatccttttctccttaggttttgtccctatttataggggttctaggaatgatagttattctcttttgatcttatctaagttgtagaaatatatctagatgtt

SEQ ID NO: 266902 - DNA, 1594 bp, Cannabis indica
ttgctcttaaattctagccacactagaaacacaccttgaatatgaacccattcaaggcagttggtggttcagcaacagtgaaacaactttggcgatcaaaaaatcactattaattttaacgaatcaacttgagaaaaatgatatcataatcgagaatcaacctaaagtgatcgatcaaaaattttgtagaaaaatgggtttgaaacataaaaatcaatcgtgaaaattaatttaaaatatgaaaactaattatcgtaaattaattttatagattattaagaaaagtaagaagtagatcttgagtttccataccaatccaaatcaggtatcattcaaaatacttaccattaaaatttctcaattataattgttgcactaacgttgtttttcaaaataataatgttaaaaatatcaacatctcgcaatataaggatcttatggctggtcgtaatataaagatttggtagttggtcgtaatacaaggatcttgtggcttatcgtaatataaagatcttgtgactggtcgtaatacaaagatcttgtagttggtcgtaatacatgaattttgtgactggtcgtaatacaaggatcttgtgttggttgtaatacaaagatcttgtttctagtcataatacaaagatcttacagctggtcgtaatacaagaatcttgtacttgaacgtaatataaagatattacatctcgtattacacagctaaaaactcgtgttacaaagctagcaatgcatctcctattacacagttaggaatgcataccctcgtattacacagttacgaattaatgcatctcctcgtattacaatcacaaatacatctcctcgtcgtacacactcgagaatatatcttctcgtattacacactcaacaatgcatctcttcgtattacatagtcatcaatacatccccttgtattacacagtcatcaatacatctccttgtattacacagacaggaatacaactccttatattaaacagtcagtaatgcacctcctcgtattacacagtcaagaatgtatctcctcgtattacatagtcaagaatgtatttcctcgtaatacatgctcagtaatgcatcttttcgtaatacaagctcagtaatgtatctactcgtaatacatgctcatcaatgcttctgctcacaaataacatagtttgaccaagtcaaagatcactttttgtaatttaaatgtaaacaattatttacatttatccaaacgtataattgaacgtgaaatgtgggtattaatcatcactactacaatttgtccttttagtgacactatatagtgactcgcagaaaaatacgtgtcactaaagagtcgggagtgatttttagtgacatgcacaattagactctaaaaattcagtagtagtctcttataatgtgtgttactaaaaatatagagtgtcactaaagaataaaactcaaaattttttgacttttattaatgtaaaaaatattggtatatagtgacgcgccaaccgtgaatgggtaaacatatccccacaaatttgacatgtcactatatctaatcctaattttttttatacaaaaaagtacagtagtaataaat

SEQ ID NO: 266903 - DNA, 2478 bp, Cannabis indica
tcatggccgtgatgatcatgttgatggtgatcatgaccatcacacttgtactcccagcctcttttttatcggttaagcttccagagctcatgtgatgactatgtccatgaatttcatcactgtgaggaggctcatggctttcatgagaacacagatgctctcatgcttttcacaacctttgtgatcatgactaacatgatcatgcgaatgttgttggtgactatgcgagtgtgagtgggagtgggaatgagagtgagaatgtgagcatgatccaccatgtgcatgatgatgctcctcatgaaagaacactaatccaaccatgttaacaagaagcccaccaatcgaaacagttaacaaactactagttgaaatctcttgaggatccaatattctttcaaaagactccaaaactataagtgatccaactaaaacaaggaaaacagcattaacatatccagaaagaacctcaaatctcccacgaccataattatactgattattagcaggcaatcttgatatgtacgaagcatatagtccaatagcaagagctgcacaatcaaacaacatgtgacacgcatctgatatcaaccccaaactattgctcatgaacccagcaacaaattccacaaccatgtatgcagtgttgatcatcaggaagagtgcaatctttctagatttcctctcactcaaaatgtgtctaataggcttcataataagttcagtgaacgattcagaagactccaatcccaattcaagataatttgaataaaaggaatccaattccctaacagctatatacaagagtaaaccacaaagcaatagtccccaaagtgatagctcaggaaaataaaacaactccaaaacaagagtacaaacaaaggtaaccacaaactctttgcgaaaatccttagaactcactagtttctcatcactaaaattctcagtcaacaagaccccaaaaacaactgtgtttgccagtggccaaaccaaattcttaaaggaaaaaccatctccattggcttcaaacatgatcatactaatagcagcaggaaagaaaagcacaaccgttgtgaaaaacagtgaaatcaatcgtaccctttttcttcccatctgcctaacacttcccaagttcattgaaacacgttcataacaacccaaaaatccagaaagaaaagggagcaacattggccaaattctcagacaattgtcttttgggaaaatgaaaaatcctaactttatagccgaaaaaggaaagcattcaatgcgatcccaactcagagacaaaaaaaacaacccaagaaacagagctacaaatccacgaaccttggaggataaactttgatcacccatgttccgattccgtccctcaccgacgtaacgcgccgccacgtttccacacaactcggcgagaatcattgcggcagtgccacagtaccgaagcgcttggaatcgaagtagaaaaactacggcgaggagaatcgatctggcgactaaaattctatgctcggatagagtgagagaggtcagagaaaagataggttgactttgcttttgatgaaaagggtctctcgaagaggaagaggaggaggaagagaacgatgtgaaaatggagaagacataagtgagaagaaacgagagaagtgagaccagaaacgagaaaggaaacaaagaaaaagaaggagaggaacgaagaaatgggaggagtgaataaagtgaccggagagagaagagaagaaggaacagaaaagaaagcgaagacttattgttgttattgtaatttgaagatttcaagcttagggacgaaagacggtgtttcgatggagtagctaaagtagtcggagttgaagacgcgaacggaaacacagggtaaggccgagatgtggtgggagtagcaacaaaggtagtgggggcagctgtggcggcgcgtgaaggcactttaaggcggtgaggacggtgttgttgaagatggtgatggtgatccgccatggttgagtaaaagagtgatctttaaggtcaggtcagtgaaaggagctttgaggtttgttcataagcatcggtttggaaaacccaattgagatctgtgaagaaattgataatggtgagccgatggagtgtttggggtccgtcgatgactgactcgtagcccggcaaagacgactatggcgctttgtccttttctggttttattaggtcttttggatttgagacttgaggccattagagcccaacaatatttaattaacgtaattaattgcttcagcttaaccactctagaataaattaatgggccttcttcatattgggtcgaaacacctttgggcttattggactcaattacttactaacattttcaactgggcgataaattgggctttactggactcgtgatatggctactgtaattagttaaataagaataattacataagatagaaactttttaaaatatttacatttttacgttcaaataatattttt

SEQ ID NO: 266904 - DNA, 2586 bp, Cannabis indica
gttagactcatgtctaagacttacacttttcgagagtcaatataaaaaattaatggtcttattagacttttattttagtaaaattaagtatattatataagcaataaatattcacagcttaattagttgaggtgtatgacatattacataatggtgtgggttcaaatctaatgatactcttattcaatattttttttatataattatgaaagagaggatcccaaaatttaaatagtttaaagtccatatattctcaagatcggccttggcttaaaattaatcttattatactttatcccaaactctaaaaaaaatatttctctacatatagctcaatgaatagtggtgagttaaacatattttattttctctctctttaattaattgttttgtttttttactttgtttagtcatttttttaattttaattaataaaatatatgtaaagatattatatttaaatgatatagagaaaaaatataaagaaacatggtaatgtaaaagtgtaagataaaataaaaaaaaattaaaaaatttagtaaattattttaaaaagtagagtatagaagttgatgtgtctaaatatatatattttattttatattttagagaattaggagaaatatttaagaaccatttgaaaataaaatctttaaaaaaaatgaaaaaacgacaatagaaacagaaaaacgacaactaaaactaatttatttatttgtttaaaaaaggtaaataatttgtgtatgatgtgagagttcttctatcttcgtggattttggaaaagcttgactgagtgagctgagcgggaaaagaaatagaaaaatggcggcaaagaaggaagccgatgagggttccggttccacagcggccgaacaagtatgctggagaaaacaagttgacgataacctaaagaggctccattccctccacttcggcgccgaaacggctctcaagaaacgcgacttctcttcggctcaaatcctggggctccgcctcctcggcttccttgactctcattctcactccgaactcgaccacgcctttgtccgtcccattcgatgcgaagctatctctaacattgattccgctcgccgttctctcatttccgattctgatcggtatgtctttctctgaaatgtgattgtacgtttgaatttgggattgaagctctgaagtctattaattcttattttcattctttgtatagatcgattttgtgtgattcggtttgaggaattttgctttgttattattaaaacgatggactaattagctttaggagtgagtgtttggaaatttgtgtgttgctcatgtaatcatcattttcatagtgtataacgtttactaatcctagctaaaaagtagtaaaaaacttaacacaatcctacttgtgctattctactttgttgtgcttcgtgttgggtctggaaaaatgtttccaaaactatattttgttctgtttttttggtttttgctgctaatagtttctatcctattatgccaccagaaaagcatttgagctagcaaagaaagctccaacatgtgtttttggctcaagaggagatattgatactgagaagattaagcaatcaaagtacttccgagctcttattcagcactctaatggaataactctaaatgaactggtattgttttccaaatgccacacaatttttatatgttgtagttcatagacaattttcttgattggtcctttttattttccttgtttaacatgctaactgattattcctctctatttaagggagatcaatcggtgaagcaggacaaaccgagtagcaaggcccttaattctaataatcaagcaaagcggatagcattgagaagcaacttttcaagggagaataacaacatatccccaaagtacacaacctctggaagttgcaactatgatgaatgcagaattgtagaaaagcccatgtcatttcataatcagactaaaagtcaacgctcattgtttattcaaaaggacgaggaagaaagaacctctggaaattccttgggtgcaaaacggatgcatgtggatatccgtagccccagcctgaagtcgcccttaagttctgaagagaacaatgaagtttcggcaaatggatttgttactgcaagagcaaaattggtaagcattacatttatgataacaagttttctttatggtatgtttctaccttgtcaaacctgcctaactggattatgtttgttttcataatattgatacccaatggaagaattctatcaatcttagttgagttagaagcatctcttaatttatatgcttgtcctttttttaggtataaaacaaacacttgaaatggataatacttattttcttttctacgaaacttcagtttactttttgtatcaatatatgttatgtgatcttgaaccaattctacttttgtttttcaaacaggaaatggatgcaagacaaaaaagagggttatctggatcgcccaatgctactgtttccccacaaagtgataacaatggtccaaggggttatggtggaagatcatatgggttttctcgtcgtggtattcgtggtaattttgttccccctattaaatc

SEQ ID NO: 266905 - DNA, 832 bp, Cannabis indica
ataactataaccatgagaaaaaatttgactaaaaaattattttagagaggtgcattgtagaattttttaataaaatttctcaaaataaaaataaattaaattagaaaagagatcattattttaagtaaacaaggcagagtataatagaagcctttacatatatgggtttttggttttcaagtttctgacgaagaagaagaagaagaagatggcgacttcagctctggaatcaaacgcttctttcgacatttctcagtgccaacacacacccttttactggtacttttaattctctctctcatcatctttcaatttttaactgtaaatctctacatttatgcataccaattcatacttccatcaacctttatgccatttctgaattctgataatgggtatttctctaaattaacctttatgccatttatgatgtactctctctcatatgtcaagggggaaataataataataataataataattaaattcatgggatttggtttgatttgatcagatttgttttattgttacaatttatggctggtgttctttttcttatgtttttttgattttttgtttgtagtgaggagaatgtatacttgctttgcaagaaattgagtaaagatgggatagcagaggcagatggctctgatctttttgttgttttcatctccaatgagaagaaacaggcatgtatttctaatttttgattgataagtaatcttattttcttcttcatatttttatctaagttaagattgagtctgaatcttgattttatcattgctttaaggattgaagtattatccatgaacaattacaaactgtttta

SEQ ID NO: 266906 - DNA, 2256 bp, Cannabis indica
caaagaaagtcccattctacactattagaagtaaacaatcaattttccttttgtcaatattttattgcttcttggtgtaaaaatttggttacgagaaataccttagttataattgttgctggctccttaattgaggcatctttgtaaagtgtacataggatttatcttggcttccctggaaggcatagaatgtcatcttttaatttttgtttatttcttgcaatacatcacgaagaaacttcaagaatcctagttacattggataatcattatattggttcccactccctttctttcctttcctctggaagttagctctatatttacatgaattctaatgatgcatattattgctgttcattgtttacattttcaggaaacgattctcgctcccagaatgattggaaaggtgcatggtggcacagtagtttcacactgcactcaggtaaagtctatatttctcgtatacttgtagagctctaactttccttgatatcttgacattggacacttaatttagttgacaggtgcactgttttgccaaatcttgaaaaaaataatatgggttgaaaaatcaaagaaaggatgtcatattgtcctttaactgatcttcatgttttgtcttttttctttatggacctttattaacatttagtagtatttaagctgtattaagggccccttagcttaccagttttcagaagtttattagtctaattaaagataagaacatccttactcaaaggcttgctttgccagtctatgaaaactttgctttaactatatcaaatatatgtcctctgctttatatgtttttcttatattttaatgtgctgatatatgtgctacattcttcctactccgtattataacactatgttatttctttgacactaatatcacttagcatatcacaggttttgtggaggaagatagtccttatgccaaagatggtcaaaaaggcacttatttttatgaattctcaaggcctttaagaaccctggatcgtctacagcaggtttaactaaaattttagcaacctgaataatttctattctgttttctttcctatacctttgtgtgcgtgtgtctacatataagatttgtatgtggaaatttgtatgatgttcactgaatgttattcttaacatgattttacaataatgtgcaataatttccatggacatatctgttgagttgacttcaggaaaaaccagaaatggcctacttaaacttgacagctagaattagaactgatacagttttacccggttcattatgcaggatgctcaattcacaatcggcgaaacaagcaagatgtcagttgcattttggtatccaccggatgggttaccatggcatggttctggacacttttctattagctgtgattggatatccttagatgtcattccggggaggtctgtggtaagaacaggaacaagtagctctggttctggcgtttttgctcttttgttatcagtagtctctttatgtggatctgtttttgtgggatactgggtaatttacagatccagaagaattcccttcacaccaatggaaactcagatggaaaacatttaggacagcactatgggatggtgctttaggttttgtactattcattggcattgtatttcttgaggtcttcttacttgaaatgcttctactttgtcccttttttaaagatagaaatttcattttttattcataataattacgtaatagtagggagctggaatgggatacttttgttttcatcatgatgtttatggtcttgcattactcgagtgatgatggaacaataagtggctttgtcactgaccattaggacaccaaacaaccagccacgaagacaagaatgagccttgatagaacaacaggcctaataagtaataacaaccctctgcatcggagaacataccaccccttcaccatattgtgaaaaatgtttgacgccaaggggtgttcatccaaaataatcaatccaaaataaccgatccaatctgcacttttacagattggattggattagatttgagctattgtgcggattggattggatccaaaaagtgaaatccgcacttagtgcatatgatatgcactataagcaaaatagtacggattggactggtcaaatgactattgactaatgccttttggggtttttattagtgtactgaagttgtggtgtgggggcagtttggtaatttgggtgttgtgtaacggtggactggacagtgggttacctgagat

SEQ ID NO: 266907 - DNA, 5154 bp, Cannabis indica
cagaaaatcaattatttatttatttccttaaatagaaaatcatttccttaattagaaaataatttccacaaataaaaatattctaatataatgaccatttatcatgtctctatatgactaaatatttaatgtcgatatgctagtttcgaccaatactcttatagtttttagccataaatactacgttgaatctatcataaaattttcttaatggcctgaaaatgtattctgaactctaggcctagtatgaaactctataatacaccatacacgagatgtattcttaaaataataaatgaatctgacttttataatagaaataataattaagattctttacgctgcaacttagtggtaatcttaagtatttcaattaaataaattttttctgggatcaaatgtgatagtgctcacacaaagttaggtgagtctcaaaatttcaacaaatgaataagtattcctatgttatgggagactcttcgtattatcatacactatcagttcttttaaaaaaaaaaaattcataaaagttccaaagtaatgcttttgtcaactccatttccaaagttccaaagtttttttatattgccttttaccatatgttttagttggtttgtagccaaacctcatctcaaaagttagttatggtccatttcctcctgtggaagtggttagaaataatcaaaacaattaattaaccatttccaaaaaaaaaaaaaaccatttccaaccgtcacttataatgtgtcaatataattaacctatcagttttatttcgcagaccaaaatttcttaactcgtaacttacattcatgactgtctaaatgggattatacattctcatcacaatcattactttatctctgcccttcaatctttcagatgaacttagtatgtcatcaactttttcattcttttttctctcaaattcttagaacacacttatcatgttatgattaactttcgtttttctctttgatgtgtttgcagaagtaaacaaaggaaatccaaaacctgagtttgcattcagttggttagatgacaaagacacattcaaagccggtgacattgctactataaagattaaagtgttaaccaatcttgacaagattgacaagaacacttttcatcccattctaattgtcaatggaaagattgggaacagttcttacgtatctggggttcttacagatttcaaaggcaacgactctgatgattggaacatcttttttaccaccttaactgttggtttattcaacgtgatgatcaacgaagatcactaccatgtttttgattcttcattgcatttcaaagttgaaccaggttttaaatttgggaaacaatgctttcttcatttaactgaatttatagtgttttttttttgactttgatgtgttctgttgaagggaaaatttacccttctgtgtgtttggcttcatggatgggaaacatcaatgagttcgaagcgggttcaagagctagagttctaatacttccaaaagatgcatttgggaacaatgtcacttcaaatagtgaagatctcagttcatataacttcactgtgtcagcattatatgccaatggttccatttctgattctccaaatatcaatggaattggatggaatggatttggttatatcattcttgagtttactgtggttaaagctggagagttctttttgcttgttcatggtggcaaccacatcttgagtggcactcttcttccatttagggtgaaaccaggtgatttattaaagcacatacttttaacagttatttgactccttgtaatgaagtatttagagttgtttttatcaggatctgttgaggtttccaattgtgtggtgaggtggaactatgaaccaaaggcatggcaactattttccaagatggaactcttcatacatcagcaagatcagtatggaaatctagttccaggactctatgaattcgatgctgaagtcatcgaaaaagaagcaaacttgtctatacctataccagatttgtactttgaggaagtggagcctggaattcaattgttttccttcagcaatctggagccagggactttcttgctaaaaatatcagatatgaagcacaacaagagtatctctaacatgccatatccttataatgtctttgtaggtgtgtttgtgtgtgtgtgatgtttaatttcttagttaattttcttaccttctttgtaaaatgtgcttatgcttttatgtaattacttgaataggttattgcaatggatcaaacagtgttgtcaatggaactggtttgaacaactctattgcaggagaaatagcagagttctctgtatatttgaaagatagtttcttagatccttctcctgtagaagtagagaggcttcaagtagaaatcacaagggaaattgactcctacagcataatgccaaccatatctccaatacagattatcaatggtacattatagaaattcccttcttttcttatttgataagaaagttattgcttttttactttacaaaagtttccatctttgtttagttagtgcactagcaagggagccgagatttgtttcgaatgaggcagaagttgctccttcaccatctgtgaaccttagaaatcaagtaagaagtacattcatatatgcagttgttctgttgtgtattactattatcattcaacctcaaaagacttgaagagcaattgatattggctttctggtccagcctgctaggaattcaagtgttctagccacttctttcaacgtgacttacacgcccgacaagagtggtgtttatggaatgcgagtatattgtggaaatatcatgcttaatggtggccattcatttaccaaggaagtaagtgcaggtactattttatcacttcctttgttagctctaagggaacaatgtccatctccaatgttttcttcacttagtaaagtttttgttggcaggagaggttgatatatcgatttcaagggctgtaaaatttgctcccaaggtaccaaagttgataaagaatgaagttgttgtggagctcatggattctttccataaccctgttatgtcacaacattcaaagctgaaactagaggttgctgcttcaatgaagaatgcctcaggttttttaagttgggatttttcggacaacaataatggttcatacacaagtcattatacagctaaggatattggcaattatcaaatatgtgcttcatttgatggcaaaactttcaacccttgtccttttgaggtcaatgtctatagcagtaagttaacattgccattcttaacttctggacttgatgcttttcaccacttattgagcaagagccacaatgcaacattgcctatctaatgctgtcattgatcatcttgtaggcgagtattttccccgagcttatgatgatgcaatatctgtttgggaggatgaatcgacagcttttgatgctttaggaaatgactactttgctggtgacaatgcaactatccaagagttttcacaagtaagtttccattatgttcttctcttatatgctgtggttcaaccattaacagtgaaccattaactctgaaattgtcagccaagccatggtacacttctccaatatggaaggcttctccggtacacgcctcagaaagactactatggaaatgattcttttgtgtacacaatatcagatttaaatggtaatcttgcaactgcttcagtaaacatatctgttctcacaatcccaccccagtttatttctttcccaagtcaattacaagcaaccgaagatgagataagtcccaaattcgggtaagtcacctttcatctctagagactataccattagttttccactatagtttatggtgtgtaatagtatagttctggattatgtgtagcggtttctctggatttgagctaagatattcagatatgaatgagaaaatatgttaatcttagtgcacaatatggaactattttcctatctccaatgctgatgcaattttggccaacaacaaagaccaaactttctctatacaaaggggatggagaagctaaggttttggtcttggaaggcactgtggaagtggtcaactttgctctcaagtcaattcagtattatgggtactatctatacatattttcaattcctaaagtgcttaaaagagttcatgttaaattgtttttcagctatgtttttcttttctttcttgaaacaggaatgagaatttctatggcaatgatacagttcgaatctcgactagaaacagacatggagtgaataacttgaatattccagtgttcttagatcctatcaatgaccctccatttattcacatccctgaattcatcatattgaaaagtaatgaagatgagtcactggtatatgactcaaaaagagacaagtttgagtttttcattggagaccctgatattcaaagtttctctggtataaatgattaagattgaagatagtagtgtttgaagctttaaacatgataaacatcatttgaattaatgtataactagctcttggtggtttcttcaggctataaatcccaattcatggtcttattttctgttgaagttaataatggatttttagtcactagtctaccagctgagctgatcaacacaactgaacttaagaccatgaatagttatatgtggcagcctcttcagacatatgtcagtatctcaaaacactttaaagtcaaggctaatggaatcagattccggggaacagttaatgactgcaacaatgttatgaaacaactttactataatgtaaactatcatcatcttcttttgctattgtaccaagttaaatatatataagctacattagtattaactcaatttttctttttttgggtttgttttgtttttggtgtagggtggataccatgggccagttttatcagtgacagtaaatgacatgggaaattatgggtgttacccagattgtactgaaaatgcttcagtgcctttatacacagaggctaatgttaatcttataagaagaaggccaatgagttcatttgtatctcatggtgagtgggaatttcaaataaatttgctgtgttgtgatccaattctaatttcccagcagctagctcgcaatgccacattttgtagcgaaaacaataatggcatcgcgagagctc

SEQ ID NO: 266908 - DNA, 1838 bp, Cannabis indica
tagagaaaaacgacacaattaaggggaaaacgacaacaaatggggaggaaaaggtggagtaatatttgttcgtatacaaatattataagacagtggcgctctactcacttctctctctggtctcttgtggtgagagggagagagacagagagcgagatggaacacgaagatgtcgacatgaccggggctgatggcaccgaagcggtaatacttttcctccattttattttccttacaaagcttttgcttgtttggcttctcggaatttattcttcatgttaggtttccgaccctaaacccccaaatttgatttttgattttggaatgggttaatgtgaatcaatcgataggaacttgatgacatgaagaaacgccttaaggaaatggaggatgaagcagtcgcacttcgtgagatgcaggctaaggtcgagaaggaaatgggttccgtacaaggtgaccattcctctctttgtttcatttcattcttttttcctttcgtatttccggttggtttttctattacatttttgtcttgtaaaatcatcgtatcatgggtgagaaaggattctgagatatgatttttttgccctagattgctaattgaaattgaaatttgaattttcatgctcttgttaatttcattgatagcaacttttaaggttgtattagtatcattttgtttagttttattgtacatattggtttgtaactttgtatacatatacattgaataatatctatttatgtatgtatgaaaaattgttatttgatttatgggtaagaataggagaatttgtctccaacctcattttgattcttgagtttgtaagccattgtaggagaaatcttcaatcttttattctatgaacatgtgtagaaatacggctatacactactaatagttgaaacatttttacattcctctgactgattttcttgtccatctagaaccatctgcagctgcatcacaagcaagccgagaggaagttgattctcgatcggtttttgttggcaatgtgagatcacttatcttgtatttaaataatgattgttcattttgtttcgaatagtacagaaatgatatgtcaaatcctctagcttctgaattcgtataatattctatatattgtagtacatatttccctcttatcagagttcttttttgttttttgctttctttggatcactaaatgaagcttgtatgttattctcattcaatggctgattaagtgtggatatttttacgttgactgttaaacttgttttcacaaataattttttttcttttcatgccactaatgaactcgtctgtagaatcttccctatggtcctaatgttgaacttgactgacgccacgaatggctttggacttgtgtaaataccagtgagccttggtttgactttttgattgtcattcaatcattatcttggctgttctctagttaacttcagttcaaggtctcaaaatattttatattcaaaatatatgcttaggtgaaacttgcgaacatctttgtttgctttttcatgtttaaattgatgctggaaccaggtgattgatggataaaataatagtctcctccttgagctcatcgcttttgttttcctatttatgttagtaaggggtaagctcaaggttgttttggaatgaaaattttgatggagagaagatggggtactttttgatttgcatttataggagctaaatgttttgaaaggcggaaacaagtttcgaggcgttttgccatagtaccgcgaggcgtaagcctcgaggcgctccaaggcgtaagcctcgacaataagaataaaaaattcataaacatgatatatatcataaa

SEQ ID NO: 266909 - DNA, 1960 bp, Cannabis indica
aaaaatatggttaattaattatataatatcacttataaaaagtactaaaaatatctatgatatatagatgagaaagtaaaatgaaattaggcaacttggcagtaagtgagaagctgaagacccgtaacattaataatattggcggctgtgatttcaaacttatctttttaggagttcattttatgcgaccattgggtatataaaacttgacatgagggtgtcttaaacaccactaccatttctgtatatatgtatgcaagttttaattgtttgttgtcttttatttattttttcaacctttattgttaggagtccccatttcacatgcttatcatacatcattctccgacttaaggtagacaaatgtcgtgtgtatatatatatatagacctcttcataatatatatacataaataattaatactttcattagacgacaaataattacgattgcatatgtgttattatataattaatacacttgtgtgcatcccaaattatatataatattaccacccaccatactttttctacgtataatgtagaattcttattcgatcgttaaaaacaataacaaagtattccgatctaaaatgaactgctaagggacactaccagtgctctttttgtcaaaaataaataaataaaatagttagtagaaaggggagtttaatataatatattttaaagaataaggtaaatttcatagattaattagtgttaatactttttctgtcttcttgtgtaggtttttttcttagggtaagagttggtgttttttgaactggtgaaataagacacctataaaattatgttttaatataatacttaggtatttttgattaatatgtttatatttctaatatagtaaaagtaagtttgactaactaacccaagggcgtagagggtagttggggttgccaattaagccaaaatctctagagagaaagtgtgaatcaacatatatacatatagtcaatattttcaccttaatttcgttgcatttggcacagattaatatagatatggtcaactaattctccaccaaccattcctcttcctcagactttgtctcaaatcccatgtggatatcaaaacaaaacatatatagctacttaataattaaatcttaaaaataggaatttgttagtcatctcgaattttaaaattcgttttcaccattcattaatatatcaatatatttgtctccttttatttatgcatattgattaaagtagatatagttatatatattataacttagtttttcttttctgaagtcagtagcacgcttcagatgttcacactcataggaccctttcccaaaaacaattaaatatattgacttaaattttataatattttgttgtataacttctattacttgtcagtagtgtttatagtactagtgcttggcattaattctactaagaattaataaacaataaagaaaatagttttaatgactggaccttttaagattatcatattagctcttaattatttcagaaaacaattaagaaaaagaaaaattgttaatatcctcttgaaattttctatgaggaattagatatgcatgcacgttatatttattatatgaactcgacttgttattttgattagttatttttattcataactcatcatgtataaagatggtcgtattatactaacatgtcttccaactaagaaaatatatgggatatatagttttggaaatttaataagtaacagcagatccatatatataattaattgtatttgctttactgcttaattagtattgaactttattttttatctgaattattatatgaatggtggatatatgttttaaaacatgcagaagcgagtgagtttctgtccaataaatgaaggagagattcaaattgctgtggcatagttctccaacaaattaaggcaattgattagctctcacgtactggagtccaagagaagt

SEQ ID NO: 266910 - DNA, 937 bp, Cannabis indica
aagctcgccttgttgatgccgatgcttatagataattttcttcgcccaaatggcatcagggttaagcaggaggtacatgtcctccttgattccataacacctactcacaactacaccgaaatagctcaaacaaaatttcccgtgctcatcatgagattcaacatggttaagatgatcgattatcttctcaatgttttccttccaactattccaaacgaaaaccaatgtttcaagaatttcattcttccataaaaaactttgcgcgtgaagaccaaaaatatgatcaagaattttcctcccacacaaaattacacctgcaacattttgatgactctcaaaataacgcagcagttgcttcaactcgggcagaggcaatgcaaccttttcatcagccagaatatctctctgcctacagactaactcaaagaagtgtctgcattcattctttgccaatgatattgctttatctaaaagcttttctttaccaggaaagttcttcattggccaaccttcattacttggaatccagatagaatttgcaagtacatgtgacattataagcattgatgcttcttcaaaatgttcggctctttcgagtaaatcaactgcgtgcagtgtctctcctaacatctctgccacttttgaagccttgacaaagttgtcccattcagtttccaatttaaggagctcctcaaggaaaccttcagttcgcagaaaagtgcacattgaatctttagaatggaaggcctttacgcatttcatcattaacgtcttatctccatgacgtttgtagtcatgtgcagcaccagtcaaaatcttcatttcaatggttttaatttcatgctcttgtctttccatatcattattcagagttgcatacgctttccattggtcaaggtaatcgagtcccttaatgaatagtcctccctgaatacat

SEQ ID NO: 266911 - DNA, 1382 bp, Cannabis indica
gcaaacagaacaatgttagaatagcattttgatagaaattaagccacatacttatctctgcagccggatatcgaatgtatagatcctctccatttgaagaaagatatctaatatcgaacaggttactaccaaaccacaatatgcagccacttccttgacttctaatatctgaatttgaataagccatgcaagaacagtttctcaagcatttttccctgcaatcaatgaggctcatacttgtgttcacccaagaatttgtggtttccggcagtttcaagctgccaaatttttcaaatctatgattattggcattcgagcagttgaggttgtcatttcttacacacccttctgaccaattcattgcttcttgagacttgggcttgaatccatctaggcattggcatattggcttgttattaaccatggaacagtttccattggctccacaatgattatatttatcacaatcgttttccggggaagttgaataaacattccacttgttatttacccaagccaaccgttgacgactagcagttgtttgttttagtactatcattgacgacaattgcatagtcttcatagtatacgagaaggacacttcactattgttgtagacataaataaaatcatacactggattgtcctgaatttctggtacaccactgaaacgaaggccattccatgaccccgaacgataatatttttgagtaccctttagaatatagatttctgggcatgcgttattttttatgtcaaacccgtaatttaagtctccaggacaaggatcattgacattcttccaagcagttaaactccactgatgacctgtcttcaagttccatcctatcttcatcccaggcaaaaatgtgtcacaaggatgatcaaagctttcccacaagttgatttttccatcttttaggacaagatttccagaatccaagagttgcattattggctttcgagcttgttttgttgagttagttgaccaaacaacactgttattgccatacagaagttcaagactgccaaaaatgctattgatcctcaacaagccagatgattctttaataggattgcatctattagcaacccaaacaacagtttgtattgggattttattgtaccaaattcccaagtaacgattctttgagctgccaagactgaaaaagcccaacctgaatgtttcatcttctgaaaccagagtcgttccatctttaagagaatgagatgaacttagactagtctcaaatggaaaagaagtagtacaaaagaagaggatactaatagcatagatgatgctaatagagtaaaatatagacatttgactcctgctacaaataattaatagcagtgcactagtgctataataccttatgtta

SEQ ID NO: 266912 - DNA, 1036 bp, Cannabis indica
aggaaggttgagtatgagttcagatagtgacactgacagtagagaagtgggctgtactgtaattgtattggaattaataaatttgaaaatatcgcatcattcgcatgtattccatcccaatcccctattaattaattaaataaatatatgttaagtaaaaataataataataataataaatatatattatataaaatctctcagcagaattgcatttcaatctttcttttcttttgccttttttcctcttctctctcaagaaatcattttttttttatttgttttaagaataaaagaaagaccccaaaaatgattagccattgacgtttaagctcgtctgtgtcattatctgtaataatctcccgttgtcttcctttaacgtcacaagcccacaataatccaaattatcgggcgaagaggatcacacacaagaaagatctctctctatctctcactctcactctcacacccttttcattatttgagtattgcacatacatatatatgtgtatttttattttttatttttgttcgctttcattgatgatatgcctttgaattgttcaagtatggctataaaagtcccacataggctggggttgggtccatggagaaggaatcacagaaacgagttggtgcccaaccacagccatttgacaagcttattcctttcttcttttccttgcaagaaaaccctcattgggtgttcgtctaagttcaaccaaacttcttgtttttcggtaatggagcaggaggagaagagccgggtcagccctgaatctttattggatgcagaagagcactctcctcgtgacgaaaaggaattggaattggctgttagagctgttcaaatggcttgttctctttgccagagagttcaggatagtataatctcaaagacaagcaacgaaatccaatccaaagatgacaattctcctgtcactgttgcaggtcacttactccactcccttttcttcattcattttgatttgggtttccttgttttacatccatttttttataattttgtaaactg

SEQ ID NO: 266913 - DNA, 1521 bp, Cannabis indica
gcaaccctttccaattactaccttgcctacaacttacaattaaattggtgcttaaagggccaaacaatccatctagtagaatcaatacacaacagtgacgctggacaattgtgccaatattagcattcgttttgctgtgtttgtttcatcttttgtgatttgtgttgcacccttgaaaataataaatcatttagttgcctctccgctccatactcagaagttgcctggaaagaaataaaaatattagaaaataaatcacaattgggatattaattgttacatacatgatacgtttcattagaacatgtgaagaaaaaacaaaagaatgtgaatagtcaggagaaggtgctacgtttgttactgtgaattttgtagagtaaggatatagtaagcataccctggtatcaaatgcaaaccgcagtgtttggacttgtttctctgagcaaattctcatatcaaaaccaagggaatctacaccaataatcacagcctcctgcaattaccatacatggtattaagcacaattcctatatagtataataaattcagccatcttagatgtaaagttgaaaacgtgtgggaattgacttgagtaagcagtaaccaccatatgcttacctccacttgaatacccattactctaaagcatagagacttgagggcttgcgtaatcgtttctccaccatctttcaggcgagatataattttagcagctgagtgtgctatcgcatcaggctgagctttcgtgtagtcttctacttcaacaacggtctgtcaggaaaagggtctaattattgaaactaatacactatggaacttatgagtttgctatcagaaactatacctaacttaggattaactgttgaatcttatgatcagattgtatccaatatcaacagtcaattaagaagaaaaaaactatcttgatcaaagagtatacattctgcttcaaactataaattccaagaactatcttgaaactgatttttctaagtactaaaatcagaatttaagattgccattgattggagttaaaggaatggaaatgaatcaattttttaataggcctcgaattactttagtgtatgctaggaagaggacaaggaggtccaaacacaggggataatttagcaatgtaattctgttatgggagtgttatttggctggggtgaagctcagggtagtccctaggggaatatatataaataatgttggttgttgtttggaagggtgaacagtattttgctaagctttgtaggagagtctaagctctcaaattcctaggggctttctaatatcagaattatcttttctctctaatctcttgtcattttatttccattgcctgaattgaattgataggaaaatttaattatttttattccattcatttatttggtttcattttaaaatagaatgactttttcaacattttagtagaatgactttttcaacattttggtagaatgactacagaaggaaagatcattttgaaaatttattccaatgcatgatgaaaaa

SEQ ID NO: 266914 - DNA, 2911 bp, Cannabis indica
ataaattatttaattattaaagagttaaaaaatgattgattattattagtgagaggctgtaaattcttatcaaaataaaataaactttaaaatttaattaaagtattttatagaaaaaattacactacataaatttatagtgtgccattagatatagcctaaaacatctcattctctactacatacaaattaatttttgagaaattttaatttaacatactttttttagataaaaaaaagttttttaaaaatatatttttacaatttctcaaacaattttttttttttttttataaaaagaaatcagtcgctccgaaaattaacaaagaaatacattagaaaacaactttaaacaattaagaactaaaatgtttaaagaagaaaaaaaaaaaagaattgtttaaaaagactttgtaaaactcttttacttattatttaatgacaaatattattaaaaaatctaaaaagtattacaagttggggttggttggagttggaccaaccattttcgttgtttttctggtgtagtgcacagtgtagtataaacttttttattaattaattaatacaatattaattaattattattattttggagtgattagattggtcctcacccagaggacagtggggatggcaacacgttagcataactaagtccagtccagtcaggattggtaaaaacagagggacacagattcgggaaccagtcggagatgggacccacaaacaaactggtgaggtgggtcccatttctgttaaaaatataaaatattgatgataatacttcggtggtgggactagagtgacgactttacacatcaaagtctgccacgtggaagattcttcgtcgacacgcatgacatacggggtcaacttccggggcaacggccacgccatttgcctgctgttgttgtcttgtagctgtcaacttagcgtgtcccagttttaagagattattattttatatatgacgtcataaacataatttagatttactccggtcgtttataacttagctgtcattctttcgccaatacgataatgccacgtcacaagaacaaaattagcttacggtggtcgtggcttttcggagttctgcgattgatgagggatgtgacagtgagagagagagagtgtgtcttaggaccaaacagagattcattcacacttgatcatgaggtgcatgatagcaacccaaggactcctcgtgatttatttatataattatttaattttcaattcaaattaattctttgggctaacctattgtagactagacatagctgattgctggacctatgcttgtaaataacttttttcagtaattcccttaaccaaaaaaaagagttttactattaaaatgctcttatttttcagtaattttctttccttttatggctaaattactattttgtttgataaaatagtgtaaaatttccaaaattttcagaaaaattatatttatatgtttatacagtcttttttttttttctaactaatatagttaagaaagaaattaaatatatttcaaagacttctctaagaatattttttaaaagacttgattgttcttttcaaatatctatactcaaaactttatttaatttttttaaaatataactattttcttcttgtgttgggacctatgtctttttaatttaatggactatgaaatgcaaaacaaaccaaactaattaaaccttagcttgataggaagggacattccgaagagctttcctaccctcatgctatagttagattagataaatatatatatatatataaatatttaataaaaatcatagagttttgaaaaaatattaaatatgtgaatggaaatccttgcatacaactttgaaattgacggctgtaataataactgaagaagcatatttatttacaagtccaacagaagcgtaaatgcatgtaccatatactttgaatagttttaagtgtaataattacataattatggaaaaaaaaattattttcaatctggtcaactccaacacatgcaaaaaaacttacttaaatgtctcactctattttttttttttttgaaggaacctatgccctcattcttagaataatcaacttatttaaaataataatttacttttattctaccaaaaaacattatttatactttatacaaaatgtaattttgtgatatttttatatcaattttactattgattccaatacattattttaaatgttgatgcaaaatttaatatgttatttaatacttacttaataatttattaagaatataaaataataataataatacaaaattaaataataaatttaataataaattaataataataataatacaagtcatttaatgtaatggaggatgttagttaaaatttaataataaaatattaaaataacataatggtaaatattaaaatataacatttattgtgatataataaattttgcatcatacaatattatgatgcaaatttggataactttaattatgtgagatttttgcattattaacactattagagtaaacttttaacaaaagaaactatattttgcattacatcacttatttgcatctctaatctctattgaattgaataggcgtaaaacaaaaatgtttggtatgtagtatgagtccataatgtaaatatagtatcaggctcataaaattaattttaaatttaaataaatatgattatgtggaagttattagttagaatgagttgtaaacatttattaaggatagaaaataataattttaagatgaataataagattattattcttatacttttgttggaaataaaatttgggtgaattgcggcataaatatttaatattttaaattttatacacttaaatattttatttttatctttggaggcaaaaataccgaatattacaattt

SEQ ID NO: 266915 - DNA, 1571 bp, Cannabis indica
tttaccatttaacaaaacagagatctgttttgtcatttaacgaaacaaatgatctaaattgataattttggcaaaatacagggtctaaaatgatatttaaccaattatttaaaattaatatttattaaggtaccctattatttatttttattttttcgaaaagaggtacctattatttaattatgtagtatatatgatcacttgttctatatatagtcttaattacttatctatttacttctataactattcttctactagctagggttactattttctctccataatttattttttctcagccatacaaatattaatttcagctttcagaaaattaaagaaaagaaactgttaccgagtttaataaatcatcaagaaaattgatcatggctaatgattttgattctgatcctaaaaagcagtaagtaattatactttattactttgtaattgtgatgatcataatctttatttattgttaatttaattatatatatttcaggtttgatatttatatacacgattacttagtgaagaaaaatctacctcatgttgctgaaatctttagaaaggaagcaaagatgagtgaccattcaatttgtacgtatcaatattattactcttattaatttctttcattatcattaattcttttttgtttgaaaaattagttttaaggatatttaatctcatcttataattaatatttgtgtatatgactttcttgctctttctttaaattttaatgtacttttacactataatatatatgtatcatagctttcaaattcttcttcttttaaataataattttccttggttttctttaaaataattatgtatcttaccgatacatattcgtaagttttggtttctaatggcgaaaagtatatccaatagttatgttaaattaattaaattacaatataaatatatggctaattaggatatttttcttggaattttaacatatactaaactatgtctttaaacttttagggtttttaaaaaattcccttgagattgttggatttaaattttttgttcaaattttggtaaagaaagcctcgatagtttaggagaatttttaaaagttaaaattcagggtatgatttgatacatgtcttagaatttcggtatgatttggtacattaggggaatttttaactgttagaattcaagtataatttagtacatatcaaagttatgagaatttttaacagttagaattcaagtatgatttggtacattagggaaatttttaacggttagaattcagggtaaaattttgtacatgtcaaagttaattgtttttttccaacagttagcattaaggagtatgatttagtagtttagagtaaaaattaaccaatgtttttaaattaaaaaaccaaggtcatgagaaatatttatttaaatagattcgtagttataatgtttaattaattaatttttttttggtttaggtgttgatacttcgaaagtgttcttgcttgtactggtggcgttctttctaccagtactttggccctaactctcgagggaagttcgtcaagtatatattatttttg

SEQ ID NO: 266916 - DNA, 1202 bp, Cannabis indica
tatatattacaacatgttttatttgggactcaaatccaagacctccaacactcacacacacatctatggccacttgagctagcctcaagtggtttctcctaaactattgagattgttaaatttaaggactaatgaaattagataaaagtccttaaatttagcaatttcaatagttcggagggaatttttaacggccaaaaaaattctgaagacacgatttactaaatgtcaaagttgaggaggaaaattactaattagcctaaatataataagctagacgactatagtcctaaagctagttgcggaataacaatggcctttatatggtatctgaatagccaatagcctaattgaatttagcaagacagtgggtggactggccaccatgaaaatagttctagagagcttctcctgtaaaaccatggagttgaaatgggttgtcaccacacccaaaacccagaaaccaaaatcactttcactaccacaaacttcacttcccgtattcatatccactaaacccacccacgtaaacccagatgaactccagcgactcttcggcgcttgcaaactctccacccatagatttccaacctatgctgaagaatctagctccgaccccgtccaaataatcgacgttgagaagctcagggtggctctctctcacagctcttttgtcgtatccgtcttctgcaagtcacaagatatagtttctttttctgcttcggagtcttcttctacttctatgggtgtgggggattttttgcagacggtaatggaacctgttactcctcagaatggcgagatgattgggtttggacgcgccgtttctgatatggggttgactgcttcaatttatgatgttatggtatgacatataacatatatgtaaatgaagagtttttgtttaatcatttaaatgaactcagtgcttggttctcaggtcgctcctccattacgaggtttgggaattggcaagatgattgttcaaagaatcataaggtctctcatcactatttctttgtggaatttctcatcttttgtttgttaaatttgttaacattttttgttgttgttgttgttaattgtactatgaactctggtctggcgtgttgtgtgtttttactataactctattatggcttttgaattttgattgtgatgttgactgtattgatctaaatttaagcaaatgaataaacatc

SEQ ID NO: 266917 - DNA, 880 bp, Cannabis indica
atcatcgattaattcaactagtggaataaataatgcagattaccaatgatgaagctgttcaaatggcgaggaagttagctttggaggacggtttactggtaataaaaacttctgcatgttagagcatttcgccttctcttgcatgtgtataaattatgaaaatcttttaacatgatgatatacttgtatacaataggttggtatttcttcaggagcagctgcagctgctgcattgaatttagcaagaagatctgagaatgctgggaaacttattgcggtaagttcttccatcttttttctatttgcaacaatgaaaacttcattgaaaaagaaaacataatgtcataatctcatctaaccatacaagttttgtattcacctgaagagcatactgagctaatccatgtgcagccttattggctgaccgatgtacatggattaagggcactccaagataactgtgatgacatgttcttccatccatctatgaagaacatgactccctctaaatatttaaatttatttgtgtcatcatctgttatgatataggttatatttccaagctttggagagagatacattccaacagttcttttccaatccatatatgatgaggtccagaaaatgtgacaaaagagagtttgaatctattcagcttccaaaatattgagttcatctcatacttatataaatcaaaagcaacagtccaattgttcttataggtaaattcttcacaatttattatcccttttgtcaatattgttttctcattcactttcttacatagttatatatattatatatatatatatataatggtacagatgtagaacatcttgtagcatgctgatgtcacagctaaaggatcataatcatatct

SEQ ID NO: 266918 - DNA, 3522 bp, Cannabis indica
tctttgggaaataagcatcgataaagaaggaacaataactataaagagagaggtggaaagagatataaagaaagcaatggattgaaatatcaagaaagggggtgggtataaaatcacagactactaagaggtatagatatatattaggttaatgtttatatttttagttttcttttaaattagacatatttttagttgtataaaatttacaataatctcaactaataaatccatgcacaaatattgctacaaatattttgcatattcctttcccaatcaataactcataaaacacaaggtccaaaaatactccctacaccatagtaaaaatgataagaatagtaaaacaatcaataaaaatctcaaccatcttgcaaatttactgtagatacttgaaattccaatcaaattacaataacaacaacccatataaaatctgcaattgctaattataaacgaaccactacatagcgtaatttaggaagaaaaaaagaaaagagtaatcatgaattatattctatccgataagaacactaaattgaaactaagtataaagctgacagaatagtaataagagaaatgtaaattggagcattaaactaataacatcagtattaattcgacaactacgaaagaaaaagacccccataaaatttacatggaaaataaagaacttttccaaaaagtaaagtataagctctaaataattgacaaaattctattctgaaagatcaaataaaatcctttaatagagtagcagaaaatatacattgttgatcacttattatcccctattatcaatatttatatacatgaaggaaaaaaagaacttattttcagctggcagttaaagcgacacttgacataaaaatccaatccatatgtaattcttaatgaagatatgttataagagctacatagatgagaagaacgttaattgtttaaggatcaatctcataaaaatatggcaaagcagccatacgcaatccaactacattcacaagaagacaactaacaaaatatgagaataaaatcaataatattaaaagaatcaaaatatgcataccaatacagtctctcctgtgtatggtatatacatacgtgagctgatttcattacttgctggtaaaggggttacaagaagtttatctttttccctaactgaaaactaatctctttgcttgagagggcggttgtgccgttgttgaagtcatcttataaaagccaatatatctccaggaccccttcaatcaaattgcataaagagggttctagccgtaggcaacttcgacagtctggcagaatcgcatttcaccattatttttaataaattgtaacatcaacataaagaggatttttctatcctttgtgtaatttcaatcgtagaagattaagagaatgaataatgagaatttattttactattatttttgaaaattagttagattaaattttattaaggattataagctaaaattaataattttaattaattggttttctaatggaatattctgttaaataaaagaatattctgttaaaattttaataatgttaaaccaaaaattctgttatattattaatatataaaatctgcgtgaaaatttgagaaaaagataaaaaattcaattttttatttttttgctgaaaataaaattcaaatgagaagtaaagaaataaatattttaagagatcatagataaaacattcatatatgcacccaaattataaatataaactaaaattttgattagggcagaaacccacaccagggactatgtaaggtgtgacatattttggaagcattaatttgagactaagtaaatgtataaaaccagatatttaagacttaacttgcttaaaatatataacattcaatcataaagtcatagcagtatataatcataaatagagaaatgagacaataaaatgttcaaaagtctcacacgttcttgatgagcaaaggaaaaattaaaatactgatgcatatcgaaagatacacaataataatatagaaaagaagatgaacaagcctttcacgagctcatgaacaagcaaccgattcacctgtatggaaacaaaaaatagaattatttaaattttatataattatgttttggaatatattcatcttcccttttcatatcgaaatatccttaatcaaacaaagggttataataaagagccttttaaaaaaaaagaagagtaattaattaaaataaataagtacctagattggattggattggattggattggatgaaggtgagaggtgatcattgttcatggccaataccaatagtattcatccttcttagactccttgagagcaagaggtacataggtgctgggctgtttgggcttgcgaggccttctctgttgagtagctggctctgctggttctgagtaacgcactgggacatttgaggcagtcgccatgttcactcttcgaccacctctacctctctcccttttcttactccttctctcatcatcatcatcacttttctctttcctccttctcggcctatgcgtcaaactatatatatatatataagttcagtaaataatatatattctatagcaaacgatttgaaattaataatttagggcatacctaggaggtaagcggttggcagattcgataaattcttcaggattagacatcaattgaagtagctcaatcttgctcatttcttccttctcatcatcatcatacataacctgcaccatttaatcatgtgtgtaacattatatatacacatgtatacatcacataaataattttatataaatgatgagtgttatgtatatataaattaaagatcgcactacatatacatgtaccttaaaccagccatttctaaccacatagtccaccacctttcccttgtaggtatcatggccaatagtcttaaagataacaactccaatccacttgctagcttccagcctcagttctttcttacgttcctaaatatatacatttatacaaattcaaatatcaatgtatattcttattaattaatttgaatttcattattattcgcgcaaaataaaaataacaaaaaaatgcattcataataataaactacacatctataaaaaaaaaaaaataaatgagaggcttacgttatcagtcttcttaggagtgggcgccgtatggtcatcgtggggattgggggcaatgttcgttggttccttcttctcatcaattttctcttcatatgggaggaaggccgcactcgttacctcttcattatcaataataatgtatatatacattatatataaatattttaaaagtttaactcagataatattgttagagttctgctataactttttttttttttttgggaaagtcttaaactataaaatggttgcaaatattcacttccagtttcaattatattttgttggtttgtttaaacaattggctaatctatatataaatataaaggaaaacacaatggagtctaggtggcatcttacattttttttattgtatttttaaaattt

SEQ ID NO: 266919 - DNA, 1510 bp, Cannabis indica
tctcaatgaaagcactaaaatattaattgaaaaaattaccaactgactcagagtctaataaacactgattaatcaccaataaagacttaagaataataaatagatagaaagtacacacaaaattatagaggtttgacccctttagatatggataaggacctactccccttttagttgtattgattatgagataacgtcgtgcagatcactaagtagacaaagtgaattctactacatctctcaagatgtttatagagaatataattcaccaaagtgctcttaggactgttgttacaatagagtaagtagaaaggaaatatccctatattctaaggtgtagttacgatctattgaaggtcctataatctcaggcagaacgatcgaatccgcatatgtaggatacagctagagatatttgtggaagttgttgaagaagaaatcaaggcttgtgtagccttgtctaaaattcctggtgtcatttatcctggttggcgtgttgacaaatagaccaagctctttgagacttgtcttttttgatgagattactcacaaagcaatcctggaaggtaaattgatcttttcttctatgggttgcataatgatggcccaactagatgcttcttaaaagtcaatcttcaattcatgggtatcagcctcatatggtacccgtcaggcacacttttgcacgaaagtctattattatgttaaaggtcagatggattaagccacgtgtaggtgccacatcaggtgtgaaaattttgggacaacttagtcagtttatgtgttcttctttggaatgcacaatatttggatgatttaaatcgaaaggtaatgtgcgaaacaaaaagaaagaacaaacttggttaataacatcatcaccaacaatgtgtcaaaaacatacttgagtaactcatcattctgggcatccaaaatggacgaaacaatatcatccataatcatgtgccactataataactagaagcaaaaggatgttaaaataatcaatcacaacatcaaagagactgatttctcattccacgcaaatttcattacttcgctgaagcttatgaataacatttgaaccacactaagaagatgtcgtggcatggaaataattgctatatagatcaccctcacgtaaccataattgctttgaccgttgtctccaaaaaatctctttttgagtcaacacctcaaataatttagatttagcctctttaaacttctaaagggaaccaacatctctacctttcttaaagcgcttagcctctttcttccaaaacttaatccgagaagaaaatttctagaataattaatctttgctccaatcatgtaaattatcaccataaaaatgaatatttcttgcacattaaaagtatggcaagcttcccaactatccttaacaacttgcaaatacaatggctctctcaaccaacaattttttaatcaaaatttacgatgcacatgtaaaaattgtttaaaagagagctccagcaaaataggatagtga

SEQ ID NO: 266920 - DNA, 1013 bp, Cannabis indica
aaaagtttaatcgataacttttaaaaaatataaagttgaaaatagtataaaattctcataaaatatactagcgtggcacccacgcgctgacacgtaataaaataaaagagcgtaatataaaagcacaaaggaagccgtaataacggcagatgggcctgtaatggaagccggcacacaatgaaagctctagtctcgccgcttgtctaaaaattgccgcgtgccacgtagcttcgtaatatactcaatttagcatcttcataaaatattattattataatactcacgtaactcactaatctctctttctctctcataatgcttgggcggcgccctctctgcccagtcaaactcattgctgaccgccacaaatcaattaatctcattaaataattaattttaaaattaaaaaatattagctcccacatctccctataaaaggaccctcaaagcatggttattcccagcacacaacaaagcaaaccgctcacccattacacccaacccaactttaattcatttttattaaaccaaaaataataacaaaaaagaaaaacaaatatggctttgaaggaaagggtcggagtgaagaaagctaataacaacaaatcgattgtcgatgccggcaaagagatgcattaccgtggggtaaggaagaggccatggggacgttacgcagctgaaatcagagacccgactaagaagagccgggtctggctcggaacctttgacaccgccgaggaagccgcaaaagcctacgattccgccgccagggagttccgcggcgccaaggctaagaccaactttcctattccttcctccccatccgccgatcgcagccctagccagagcagcaccgttgagtcttccggcaacgactgcgccgaccgtgattccacgcgccgccttagcggtggcgctgtgttcccgtttctccagcaggagcaagtggtggcgccgtctgctcctccgccccaccatgtcgtggcggcatataggggtgtgccgagtgtagg

SEQ ID NO: 266921 - DNA, 1798 bp, Cannabis indica
ccacttcgtaaaacctcttccccacctctgtttcactgtacttcatcacccactttaaccacctctcaacctattcccaaacccccattattgaacaacaccagaattcagtgtgttaaggaagaacgagcttctcgaactcctggtgtcgatcccaaggctggagtttctctctacaaacctaaatcgtacgatgttctcgtcactgacgccgcaaagtctcttgcttttgctctagaagatggaaagacccgtttggagattgatttcccgtaagacattaaatttaagtacttttctcctttaactcgagaaatttgccaaactaacaatatgaaaatggtattttagcaaaataaccagattgaattgacattgaaatgcgatcattattgttgcttagtgtaatttttggttgcccttacgattttgctaaattttctaggaagctattttgctaataaaaattactaagaattttttcgaagcccattacttgaatttgactcagaacggacttgtacattattatttgattggcttgcacagacccttaatagatttttttctttttgttttttttgaatgggtggtgactcaaggcccttgccaagcgacatatcttcgtataaggtactttgctctactcagatttatggtgacatactaatacatcaagtatttgtttgtatgatcaaactggttgttatgtacctctcattggagaactttaaatattagtcattagcataatttaatgtcttgattgtgagtttgctctttactgggtttttaggaaggctctaattcacccctatcacacttgacttgaggtcaaaaattttcaattttattgcttgattcaatcttatcattgacagtgataatggctaattgatgacatgacacttatcaatctgaatacatgagacatgattttctccaattcctaaaattgtaaagggatcttcagatgaattcattgatgccaacattcaattggccttggctcttgtgaggaagctccaggaaagaagggaaaccagagcctgcattgtaagcacaatcttgttttaattcgtatcgtatctgtttagtttgcatgttccatttgaagagattttccaatttatttttcatttcaggtgtttcctgataaaccagaaaagcgcagggcctcagagttgttcagaacagccatagactcggtaacaacatatgtgtcttctttaaactaatcaatgtgctttactattgagactaagcatatgatacagttcatgtatggttgtaagtttgtatcatatttcatggtcttaatttggtaatttctttagaccttgtaagaatgtactctgatgtttcagagtaaaagaaaacatctaatattgaaatcagtaaaatgctttttctgatttaagtgttatattattctttcagattgatggtataactataggttccttggatgatattcctggtgatgctgtcagttcattcttcagatcgataaggaacacactcgattttgattttgaagatgagaatgaaggttggttttgggatcaaaacatagtattcttctgtgattttataccatatatcttacttctctcgtctcctataaacgcaggtcgttggacatccaccgagcctccttctctttatatatttattaattgcagcacgcgtgaactcggtacaatagagaagtatgtggtatgtttccatgattccattccgtggtgaaaatattgtttggatctctgtttctattctttctctaatctaaatatgt

SEQ ID NO: 266922 - DNA, 1318 bp, Cannabis indica
atctgtgtttattatttctttgagtgttttataaaccctaacactcacaacataaccaaactttctcactttaaaaactgtgtcaaacacagaaaagactaaacatcctatccccacgtacccaaaccattaaaacaaacagcccctaaagagttttttttttttctcactcattaatctttttcttttcttttctttctgaaagggtatcaatctacctttttgaccctcatcattgccaagtctaactaggaatattattattatcctcatgcaatgtcatcttatgtatcaagattcgaaatattctatacagaaaaagtatgagtctcgtgaatcaattttcatggagaatcataacatgtttattcattcattgaattaagagaatttcaagtgaaaaaaaaaatcaaataaataaatttttttcattctcaatttaactatttattttcgaaaataaaaacaatgtcatttattttttcttttttgttttttttttttgagtattgagttgtcaaatggctttttcttcaccaatccctttcaccaccaccaccacaaatattcaatttaatcaaaacaaatcaaaacaaaactagaaaaagaaaacaaaatcaattgtcggtggaattcacctttatctatttatggctacagcaatggcacgttttcttagcttttttttttaaacatttatattttacattgcataattttaaatttaaacttaagacttccaacataacatatgtactcctctcttatgacaacttacgttaattaaagtgattcacgttttcttagcctttagttaggagtttgaaaagtgcccatttttttatgtggcctaaaacaaatattagactattttgaataaaagacgttaaatattattggacacttctagagtacacacccctaaaacggatatattggtgtgacgccttaatattgcagtataattcgtcgaaatgttagaatacactgtatttttgtggggtgtagaacattaaaatgaaattactattttcagatttattattttttttagaaaaaaatgaaaatgctcaaatctaagagtcatggaaactgtttcatttcacttaattaactaatcaacctgaattttaaaaaataaaataaaagtgtaacttttttcttcttcctgagaactttgaagtaagaacaccattgttcctacgtccacccatcgattctaagctatctctcgtttccctctttttacatttttcatatgtggggcttttttttagtgctctttgggcaatattttggattttgagcccaacaattt

SEQ ID NO: 266923 - DNA, 2244 bp, Cannabis indica
tttttttaatatataattttgaccatactcattcattcatacttttcgatgcttacagaaagatactatatatcaaagagagtatatgtatatagagttttggagacaatttcaccactctattatttatcttttgcagatatataatataatagagagaaaagagataagacaaacaaatatcaatcgacagagataaacacacaatgtttttttattattattattattattatttcttttcattgttatgcaatccagttttgcattcactttagaataagacactgagtgtttgcccatattatttgatggaggtgattctattaggaagggaaattatggggtataatgtttgattaattaaaatgaatcctatttgcgattaattacctattagcctacctaggttacttttgagatatagtggtaccactaatataatctttaacttggatcaatgtccgttttacctatttttctaactttgttgtcgtcaactgtggagaattatgctgtgggtagtattatggtctattttaattacaactataatgatagtactggtggtagtagcaataatagcttataccgtagtaataacatgttacatcgacatatagattagcatagaaaaggataaggaagaaatgtccaacatagctagggaaaaaggtgttggtttgcacattccctccaaaaccccattatttctcttaattaggatgtaataataaattgacaaatatatatgaccaaattatacttaattattatctctcttaatcactccccattctccaatgtgagaggcctaaatttttaacctcttttccgttgtccaaaagtttagctgagctagctacctagcttcatcgccacacacaaataaatgtgaagataaaaaataaaattggatactatcaattatcaatttaacatagtaccatcgtaattaaaaacgtgataaactttatagtactatgtttgttcatttggttggtttttttttctttggaaagaaatagtactatatttgtattgtattaacgacacattttaagatgttaaattcttttaatgtttttttttggttataataagaaaaaagaagcatatattgtgactacagtattattaattatctagtaaagacacaaattgaaccattttaatccatcatacattttttttggtcaacgtaaataaatataataattatgattttattagcatttttgttgctagatggtatagtgcgtaagatggaaggtgttacaccattatttcccatctccttcctcattcggcatttagtatcgcataacctgacaaaaattaattacagttgttaataaatataattattgctaaattaatataaaaataaaatggttaaataagatgagttagccgaagccggctttaaaaagccgaaggttttgcgacttcgttcgcgtaacccgataacaacacgcgcagttgcacgtgcaaagacagtcccgaattaaaaatgtaaaaccgtcacttatataattacttatttttattttttcttactcagcaattcaacaaaaataataattttttttaaaaaaaggtcttgtcaaaactgaaaataaaaatgaaaaataggaggggacacgagtatataactacatttgagtgggagcatacactcactcttactgttgtttattaagtctcaactactactccgagcgaaacacagtctctcagagaagagagagaaagagagagagagggaaagtggttttcaatagcatatttcctccattaatgcttctcagcaacaaagcgtgaaatcctctttgatcgatttcctaaacaatccccagcactacctactgctattaaggttcagacgaagttgttcagattcgataaacagagcctagcttagctgctaactatatatatatatatatatagtcttctgtctatatttatacatatttatattcaagtggaaagagaggttgaaatggagttgagtcaagtaacgctagagatcttcacaaagctggagcagaaatggctatctcactatgaaaacactaagaaggttcggattcttagcattgacggcggcggaaccactggcattgtcgctggtgccgccttagttcaccttgaggaacagatccgcctcaagaccggtgatcctcacgctcaaatagccgatttcttcgacctggtaactggtacaggcattggagctat

SEQ ID NO: 266924 - DNA, 1913 bp, Cannabis indica
agttgaaaaagagagtcaaattcaaactttggatgtatttacatgtgggtccaatttcaacctaaatcacaagttaggtgataataatacaataattttgactcagcataatatatcaacagttccatatataataataaaatacgaatatcccaattttctagagcttaagattaagaaaagtccaatgctaaaccctaaaaaatttacctataaaaggagcactcatgggttacatttcttacacattcccaattaacacaacattaataatattattacctataaaaggagctctatatttcttttattctcctcttttaacaaaatctttaatcttttatggagagagcaaggtcgttcttacaatctccaacttatggaaatgtcataactgtccttagcatcgatggtggtgggattaggggtattattcctggtaccattctcagttatctagaatctgagctccaggtacgtacaaaacgacgtcgtaccatatacataaatataacatatttattaattcatgcatatattataataacatgcatatatatatatatatatgcagagactagatggtgaggaagcaagaatagctgattactttgatgtgatagctggaactagtacaggtggacttgttacagccatgcttactgctcctgatgaaaacaatcgacctattttcgctgccaaggatatcaaccaattctaccttcaacactgtcctaagattttccctcaagaaaggtatttatgtcaaaacaatgcccaatagggacacccaacattctacctactctaattaattagtcaatcgttacattcattttttttactaacagcgcgtttagaaagtctcagtgtaatactgtgtattacgttcaattcatatgtaattaccatcttatatttaaacataacttgttttttcaaacagtgtaattactagcgtatagtaattatacagttacttccaaaacagtactcaaaatcacgaattatatatgtgttgacgaattgcagcagaagtattccggtactaggtggggcggcggagacaattcgagctctcacaggtccaaaatatgatggcaaatatttacgtgagttacttaaggaaaaattaggagatctgaggttacacaacacattgactaacgttgttattccaacatttgacatcaagcgtctccaaccaactatcttctctagctatgaggtattttattttaatttaaattaataataccaaaatgctaattacttttaattttcttttctttctttctattgacctaattcattggttatatttttgttaattattatataataggcgaaaaagaatcctagcttagatgcgttgctatctgatatatgcactggaacttcggctgcaccgacctatcttccggctcataattttgaaaccacgcactcaaacggccaagtcagagagtttaacctcattgatggtggtgtcgtcgctaacaatccggtaactaaatagattctcattgtaaaagcgtgttctacaatgcaccctcctaaaaaggatttactgatatactatttatttgtttcagtatttagaataaatttttatagtctaattattttcatcttgaactctattgctgttattttgtaagtatattttaaataactatacatgtctgagatactgagaaagagacaggtggttcattgtaaaaattttctgtaatatatatttatatacatctattttcaggtctttggtggctataaaatgaagtgtcaaaggaaatccaccaaggaaaccctgagtttttccccattaagccaacggagtacggaagattttggttgtgtcaataggaactggtgccctaaaagctaatgacaagtacaatgcaagtgaa

SEQ ID NO: 266925 - DNA, 1209 bp, Cannabis indica
tttaaattattgtttttttaaaaaaaaattaatgacttagggattgtcacatggcattttatttaatacttaacagtacttacaactagtagttaaacttaagtatttatatcgtaaattactcttatttaaattgcaatggtcaaaacctgaggctcttctgtggatgtgccagttgtatcaagttggtctgttgaagatgaaggttcgccactctgagtgccaggaaccaaaactttatcagatgcagatgcagagaccataaaagatgaagaatcagaatcgtatgaagacttcttagcaaaaatcttacctgtaaaaaaaaaaatcatcgtgagcagaaaagattcaatctcaaagtaggatatgaacaaattaacatgcactttgagaactcatgataatacaataagaagtaccatcataacaaaacccaatgtctttcattcaaaccatattatgttgtccaagtgctaaaatgggtgaagttttttgataatagaaaataaaaggaaagggaatcacaaaaaagggtcatatgaatccagttccagtgagtagtcactgctatttcaaagaaccctgttaaaatggtttatgtcaaagtatgatgaagttggtggtataggaatagatagtcctcgcccacacttgatctcgcatacaaaggaaaaggaatttgaaccatctactttccgagacaatagaaatgtctaagtagttcttccttcagatatatactcaacacaaagtacactgttctgaattttcggcccacaaaagatttcacacccctattcactatgatccgaatctatgaaccagtgctccagtttttattaaccatgagtgttactcaccggtttagaactttaccccaacggtggctcccttgttgtgcccagaattaacatcgaagcaatttagtgcctcagaatacttcggtaagaccaaataccatattaggtttctttctactatattcgtcgggactcaaaatagcaacgaatcactcagaaatgcttcgataaggtccaatctaccattactttaaattccatcccttcttcaccaaagagagacagataccttggtgattcctcagcacacgaatataattccacactatacggacacaaatctaccacttcgatttcaattcctacagcaccacaataagcactattctactgacgttacataaactat

SEQ ID NO: 266926 - DNA, 1239 bp, Cannabis indica
aaaaatgataaattgatggcttatataaacttaaaatacttactcgtcctctacagatccgatttgcttcagtttatcaagtataggaagagcagcctcgagccttcccaaataaaagtaagacttagatatcaagcaccaccgccatattctctcaaatgaatgatgttcaccaacagaaccatatagatttgctaccaatgacaatcctgaagaaaaattcttttcggcaaaagataaactcttttcacacagttgaattgcttcctcatgcctcttcaactgaaagatgccaacagtaaataagccaacagatagacaaaactaaaaagaaaaaaaattgccgataggaaggcatccaccatagacatatttcacgatacaaaactctaaaaagttcgaagggaaaataatgaagtacacaccactatcagagcctcggctttcattttgagtaacttttctgagtacaaactaatcgatagggcttgagaaattatttccaaagcactgagagctgcatcgggatttttctgttccaaaagtttagtggattgaccaatacaatcggccactttctgcaaaaaaaataaataaataaacatatagataaataagagccgtgatatctgaactaacaaggatttaatctgcttcacgcccaaataaactgcacaaatttaatatacaaaacttaaagccacatagcactagctgaaagcaaattattgatcagattagtactttagaataggaatatgatttctatgtactttagatttgttcaccagataagttgatagtatccattatctatgtagttgttcttcatttaatatattattcagattcagatctctgttgtaaaacagaagtaataaattatctattctggttatgtaaagctcatttgtaaatcaaacactgtaattaactgtttaaacttctaaattgtgttaatcccacagtcccacccaagtttgaatccccccctcccccaacccacaatgtcaaaaaattatagatacattaaggcaaagagatgcagaatagattcaataccatcctgaaactgcaattatataaataaagaatttatatgacagaatgtaacaagcatgtaattggtttgaaattctaagtataataagatcaacatttaactaagataataatagtgtaaagacagacctcgagccttctgctgaccactcagctgcatctaatatgattctccgg

SEQ ID NO: 266927 - DNA, 1702 bp, Cannabis indica
ctgaaatagcatttcttctctctctagtggacctctttaatggctcttgttcttgagggtgttaaatttgttcttcaggaacaataacctcatcctgatttgggagttgttcaacattgtcttgttgaggttccaattcatttcttgatcaatgacaagtgtggaagcctgaacattgtctaaaataatagtaggaactgagtttgaattcaattcctcctcaaaagtaatgtctcaaaaattggttaatcccatctcaagataccacacacatattaatatcaagtctttagacagtaatattaattgataacggtactcttacgcaggcagttatcctggattaaaattctaacaaaaatttctatagaagtgtaatgttatgtagttcatagaatagaggaaactcacttgttgaaggaagtggggatagataaggatggaaatgtctggcgcgaaaagcgaatgctcaatcaaggattccgtcattattcgcctgaatgtctaaaggctctggcgtttgggtgtgggttactattgggctcaaagggggtggattgtgggtactccttcactctaattcatagaagattgtggattgtgatgtcaaaagagatgagacattcactaaagttgaagatgagggtttttggtattttttttggttttctctctcgaaaccgagtttaaatggccgaaaggaaaaagtgatgcaaaggtttcccccacttgtatttatatgagggtttggcgatccgcgtgctcttgaatcaaaggctcagatatcacctagagaaacacaatgggcatagttaaatgcaccttacggtactcgaggcatttcctcattatcaatattctcctaaagacttgctctaatatcaaacatccatcattacaatatctcaagcctcacacgcttctcaagaacgtgtggaattcatgaattagcaaaatgatgatacgtgtgcagtgcaagatgtaacccttgagaatctataacctttcacattaagttgtatagaagatgagtgggctactttttcaaaacaacccacgtgtttgaagtgcttagagccatctggaggtgagactacaagctttcgccactcacgagttccgtaagcttaggcgtaaatgttatccacgttgtcggatgagtgacacgtggcattttagaggagtttccagtttacataaatacctagcccaggccttcaggtatacaaaggtccaatccaaatcggagatgggtcctagcccatcttatctcgaggagcctcgcctctagaagtaagatcctcttacttccaatatcccatccagcctttcgagaaatggagcttgcgacgtcctttggatgattaatgaaatatatccagataagaagcccaagaggtgcatatggaagcccttttatgatgacatggttgcgctctaattcctgggcctactgatattttgcacacgcaagtgtacgtaccgtttcaagtagtagactcaccagaagtgaggtcgatcccacaaggagtgtagttaagtacgttaaaattaaacttttacttctatttggttaatacaagaacagaaaatacaagaacagaaaagaatgaaaaataagaaaactagtaagaagcaatgattaaagaaaattgaaagttaataaaaactagggcttcgatttcaattgtttctattgaat

SEQ ID NO: 266928 - DNA, 3225 bp, Cannabis indica
aaaatgatgatgaggaacaataaaataaattgttgatttgcaaagtctgtttacaatcagctaagtaagtttttggggggtgtataaagcctagtgaacacaatacatgatacatagactaaaaaagccaaaagccaagaaaaaatataaaataataaaacctttactcaatgatctaaagctaactatttatctatctacctcttggatcgattaactgtgaaaaaacagcactagaagttgcatcagattcttggtcagtactcatgaagtgcagagacacatgacaagtgtcatcagcttctgtttggggaagccattctggaatatcaggaatatagttagcactattctcagctgacacattctgtacagaagcctcttgaagctgaagagcatactccaaattccacagaacatctcccattgttggcctctcaacaccatattcagccaaacatttctcagctgtttcaccaaactttcgaagagagtcaaggtttattgattcaatcaagtgggggtcaataatcttctccaatcttcctttcttttgccaattcatagcccattctgctatgttaacttgttcccttggaagagtgggatttatggcaggcctagcacacaagacctccattagtactactccaaaagaataaacatctgatttctctgtgagctgctgacggcgatagtactctggatcaagatatccgaagctaccctttactgctgtgctcacatgagtttgatcaagagtagggcctagcttggagagtccgaaatcagccactttcgaagtgagattctcatcaagaagtatgtttgttgtcttgacatcgcggtgaataatgatgtctgatgctcctgtatgaaggtaatgcagcccctttgcagctccaatgcagatttctagcctttgtttccaagtaagaggagaaatgttagagccatacaagtgtttcctgagaggaccacctgccatgaactcataaacaagaatcatctcattgagttcctcacagtagcctatgagagaaaccaagtgtctgtggcgaagctttgatagcattagaatttctgttctgaattcattaagtccttgttgtgatctcgggtttcctcgctttacagctacaacagttccattttcaaggacacccttgtaaacttttccaaatcctccaactcctagaagaaagctctcatcaaagttattggtagcttctttgatctcagcgaaagagagaattcttcctaaactgaaggaatgcagagttgaagcagagctaccaatggaaacttttgagttggagattcccatgtgagtaggaaatgacaaccatgatgaaaattgacgccttggcttctttggatcaactcgccgcctgtaaaagaagcctgcgaaaagtaacaccaaaactccaaaaccaactaagacagaagaaatagcaagcaccatccatttcttgctgcttgaagacttggaatctataacatcagctgcaaggtttccatctaagcttccagtaggactactcattttcaggatctctaaaccattcaagattgcatttgaagaaaaacctcctaagtttgatggaccaacttggaccaaaatctttttatccgagttcttaggaagatttaccacaaaatcagcataataggctgctgataataactccattgttctgcttgagatatcaaaagtgttcaatgcagattgcttattcacataaacattgaacaccagatttccaagagatatgctgacaacatcacagaaatgcatcctaagaaaataggagaaaccattttgaaccttaaatgaccatgaaatgttgaacttctgattagtgacattcgcatcagccatttcttgagctgtggaataaacccaattcggcgcaatctcaggtgaaactccatctgggaattttactaaactgggatttttagttacattccttgctgaagcagcattgagcaaaaaaaggcccatctggttcccatgttctccaaagtgaatcattcttgggggttataagaggacccccccatgttgactctataaaccgtttcgtaagctatctcagaaggaatttcaactgatgcccctaatggaataggtgatgcagtagaaggaaattgcttgtttggcactgaaataacctccactccattaataaatgcaactgaaccattcaatggattcagctttagtaccaattttctccaacttttgccactcaaatcaactacatactccttgattaaaggagtggagtatccagagtttgagagagaaaacatgtggagtagagtaatcccattagccacaactgagaaacaagcagatctcaaatcatagcgtggattctcaacagggttgaaatgcaatctcagccagtggagaccagcttgcttagtgacaatgttataaaccgaagcttcaccaaaaacccgagcagaattgtacagattcatatcatttgaaggactcatctggggctctgaaacaacaacaacagtagagctagttgctacagtcacgtgtggattcccagaatcaggctcaaaaactctgccatcctctagttccatcacctcacttcctccacagttaatgaaaaatctgtcttgaggaagaaaagaagcacatacaaaggtaaggaatgtaacatgtaaaatacaaaaaatgcagataatgtttacttttcttaaattaaacaacattgtgtctctctttagctactacaatatagtagaaacaatactataaaactatatataatatatatatacacacacattatacttaaaacaacatggtagagagagagaaagagtttggtgaatgttaaaaggaaaaagagggagttttgaggggtagttgtggttgtgtgggatgaatcatagtgaagaaagaaagttgtggtatttccaagatgtggtctgtgagtgaataaatggaccaactaatgctttaaagtgcttttaaagaataataaataaataaaaataaaggtggatttgggaagttgaggcaactgacttaactgaacttgtgtttgtctctttttttcatatattcgcggcaattaaggcaatatgaggcatgttatgatgcccttaccatgccagcctagcaatctaatactaaaatatgtacaaatcagaaagttatactaattaaatgtatgttagaagaaaaaaaaa

SEQ ID NO: 266929 - DNA, 2177 bp, Cannabis indica
aaattctttcataagctatttttaactactgaccaaacttttttttatcacaacttttttaacttttttgaaaaacaacttttatttttctaaaaattgtgccaaataacttaccttatatatactactaaatataatttgaatcaatttaacttttccttcacaagaaaaaggctcatttttcatgtgtacgttgagaataatgtaggacataattgataaatatagaggaaataataaacaaaaaataaataataatcaattacatatactaataatgcaatctagatattttgcttcaaagtatattttttgcctttattaattacacgactgccaaagtcttcgtttaatagaagagtagctgaggtttttataggctttgactcattaattagcctttgcaatatctccagctatttcattctaaaaaccccggccccaaacaaaagaggaaatatttaatccaactaatttaataatgtgttacaattttggtacgtacaaaaaaaagtcaactcccatgcgttcatattattaatattttttatatatgtcttactaccttgattgattaatatcaattaattcatcgtcatcatcatcattatgattattgttattaataatattttctcttattccaaaattcatcaagtcaattttcctagactcgaggaaatttttcttcttaggctcacgagaagaaatgtactccatgaagcttgaaaaatcagtgtctttataacgctttggacaggcctcattgatgagttttggtgaaggtgaaaccatgtccatgaatgagagactgtgcaatgatgctactgaaatcctacctctcattgagtttacaagaaccctatgaagaacactcttgtattttccattgctaaatatctgtaacatttaacaataattaaaatttaataattataaatattataagtcaaccatataaaaaatatgagaaaaactaaaaggcaccagcgcttcctagcagcctcttatgaatcgatatcgctattggtacaacttagtatcgggtcggagtattactagccaatcgtaacgcgacttgtcgagaaagtgctaggcagcactggtgcctaataggaatgctcaaaaaatatatataatatttatatatatatatatatatacctcaagatgatcgcctacgttgacaacgaaagagccagggattggatcaacggtgagccattgatctttgaagtgaacttgaaggccttcaacttcatcttgaagcaaaagagtgagaaaaccatagtcggagtgtggaggcattcctagggttagatcaggttgtggacaaggtggatagcaattcacaaccattagctggcttccatctttaaatttctccatgatgtccttcttgtccttttctatttcttgttctttcttcttgttattgtacatatcattatgtaataataattcatcatcttttgtagtttcattggttgtggtggttcccacaattcctaagctttccacaattgcctccattaatattaggaataagcttttggtttcttttgcgtaggtagccgccaaatttctgtttaaagttaaaataataaaccacaaaattaattaattaatgtgtttaattttggtgtaattattgaaaggtggccttcaatttgaaagttaaattattaatatttgtatttaaaaaaaaaaaaaaaaaacagagacagaattccaagaaggtggaaagaagaagagagagatatataaataaattattaataataataaagaaaaataagtaggtacctaaagtctactggtgaagaaggccagtgaggaagaacatcagatatgggattgcaaacaagcttgagaaaatccctccaacaaaaaactttgtctttagtttggttaaagcttgttccatatcgcactttagctttcatatcagaggacatgtacttagctctctcctcatgtggaagctcaaagaattttgtgcttacttccatcatttctctaatcacttcttttggaatgttatggtttacaacctacattaattcatcatgtatatccaataataattaatcaaacccatatacatacatatatgtattaacataatatatataggaccaaatttgctatatgtgtacctgaaagaaaccatattg

SEQ ID NO: 266930 - DNA, 760 bp, Cannabis indica
ataagtatatttagaaaagctattgtagatgtaaaaagcaaaaacctaattgtattttttttgaatttaatgagatttattttattatatataaataaaaagtgatccatacatttcttataaactattttatttttattaataaactattttattttaatataaaaataaaaagtcacgaattgcttataatataggcacggtactatagatatataataaattgcatatgtttactagttaattatcttagacattgatggcaacgctgcgtagcacaacagtctccacagtcaaacctggcccaaatccaaagacaacaccccactccagtccttctccggtggtagactttccttcctccaaagacttcttcctcatctcatctactatgaagaaactgcaggcacctgccatatttccaaactcactcatcacgtgacgagtggccctcatcttgtcctttcgcagctggagcttggcttccactgcatccaaaattgctcgcccacccgggtgcgcaatccaaaataaggagttccagtcactaatcccaagtggagtgaaagcatcaattaagcatttctcaatgttattggagattagctcgggcacatctttactcaaattaattatcaacccggcttcccttaaatctcccttgatcgctgtctccgtgtcaggcaacatcgtttgtgctgccgacaccaactcaaagatcggtttctctcctaataaggcatccggatcagccccacaa

SEQ ID NO: 266931 - DNA, 1463 bp, Cannabis indica
ctttaggtgagaaatgatggagaaggtgctgcaagacttggaacatactttaaaagaaacaatttcccgtatagattccaactcgaacaggatgtaagctttccccctttctcctaaaactataagcaatagtatgccactatggccttcgattctcctaatattcttctgctgtgaaaggcctagaagttatatgcctgaatttattaaattaagaggtaactgtggtgtcggctttagtatgcataaactgcttgtgatagcattatactgttcatagacaaacataaccaatgatgacttgacaccaaaaggatggtcaaattttcatatgtcatgaatactttattcaacatgtgaagctacgttacaaaaaaaaaaaaggtcttcttgtagtcacttctgataggagatcctgtctcgttcaagtctatgtctttaccagtgtagctgaatgctttagtggatttaattgcataaacaaacctaatgatgtgaatgtaactgttgcttgtttcaaacagttcgatgaaaaaagtatcatgaagctgtttttgtttgataaagcaagcaccccaacctcgatatcagcatagtcaacctgaaaattgtccattcaaattaattaagcaactattaaatttctctagtgttttttcccctttctgctcggcttttggaaacagttatatttcctacgggtgatacttggatacattttagctttgtaaggatagacttaatatcttttgtttggttttagttgtagttgatagtaggttcttcatttggtatctatcttatggtttggtgaaacctcgtaggttacttaagagcggcatggtcattttacagctcaccgatggtagtgcttttgtattaggtacggaaattggaacagcagctgcaagaagaaatggaactgcatactattctggagaatgctattgaaaaaaaatgcaattgaaatctctactccacacctcccacactgtgtatgttgtcattttgcttttctcaccatatcttgttaattattcgtgcatgtagttaatcagggattcagagattcatgtacaagagtggttatgcgctttttgggttttttcaagtttaggcttaaagaggcatgctatgattaatttggaaaccttgtacttgcctgttatattatttctcgctgcacttaatgacatcttttggctgtgtggaaaaaggttttcatgaacagcagaaattagccatttcagtagaattttactaaggatatctctataagtttaggggattttggattgctaaagatgagaatactaagaaaccatagccaaaattctctttctttctctaacgctaaggaagagtgataggccttttcgcacaacaaaacaatttgaagggcataaattgtcttataagaaatgtttgaggttactagtttttcttatttgattgtcttatgc

SEQ ID NO: 266932 - DNA, 4816 bp, Cannabis indica
tttgacaagtttagatcttccatcttccattactgacataaaagttaaagcatttcaataaaaaagacaatagactacttgattcaagacatcgatacatagaaaatgttaaagcatccatattccaacaggatttgtcccataagttaacctaacacataagttaaagatccaatttagtagttgttccaaatggactagttccaaaaaaaaaattatcacaaaagttaaagacccaatttcctagctgttctaaaaggatctgttccaaaataaacctatcacaaaagttatctgttccaaaataaaaatcatcccattaatggaggcagttgtagtaatgctataatatttaactatgacaaactaatactatagcagttaacttcattgttgagtagattgtgaagtcaatccttcccctactgccctttgtgctacctctccggagcctacaccaatataatagcatggtcaatatttactggaatggtattaacatgtgaacaagttaattaatataaaaatataccctattgtggtggcattgttctaggttttttgcatttcctagttgcgtggccaacctccttacaatttgagcaatgcatttttgtccctgctatactacttttaagtgttgtagttggtggaggttgctcatcagctgctctgttccttttttttctttggcctgccaggtagattgtgctcagtgtggggtaatattggattgcgaactttgtcttgccacttatctagactaggcaaagggaaaatagtccctgcataagctgcttcgaaagcttccttgtagtagtatttatgacagtagtcccatcatttatgtccacaaaatctgatcacaactaatgcatgcccacaagggatacctgaaaagttgaaatctcctgcaaatgcatgtgttgtggtccaaattaactatgaatctacgtgcttctgacatattcacttcaaagacaaatgcatttgctcgtgtcattgagcaattcttagctacgttctgattattgtctattatcttagcaatgttgttgtgatctgaatttttccacttagctgttgaaagcattcttttctcaaatctacacatcaaccaatatctgattgtttctaatagtgttataataggcttgtccctcccatctagaatgatattgttgaaactttcacacaggttgttcaatagcatgtcacatttcaccccttccttgaagtgtgcctttgtccattttgatttctctttggctactaaccagttgtaagccccaacactaatattcttgatgtcttgcattctttggtcaaactcagctggtatggtggctctgccagctgcccatactaactgttttaacagaagtccaggaaattctttcttgaaattggcatacatgtgtctaacataaaatctgctatcaggactaattaaaatggattcaacatcattttgtagccctttctatttgtcactcatcattgtcaaagtgttgggatccctaggggccaagtcttccttcagtaattgcacgaaccattcccaactgctggttatttctttctcaacaactacataggctatagggaattgaattagctccaccttcatttactttaatagcaactaataacactcatttgcaatagtccttcaaaaaacaacttgcaagcttgtagacaaatatagcctctttgaaatatcctatttccatccctcctctcaatttgtattttggcagtgcttcctagatttgtggacaagatttacttgtagcaatcatcaagtattgcaaactgttctggtacaaatccctcaagcttttgcattgtaattttttagccctatagaactgccatgaactcattttagagaacttagtgttctctatcatctccttgaaagcactatagtgcatatttgggtagagtctgaactgttccaagaagtatttgctgagcaagttaacatctatatgcctacaagattaatggaagtatgaaatccataagataaaaaaccacaaataagtttacagtgtagtattgaaaaataacagtaattttaaatacatattgtttaatacaatctcacattcatgtttaggggtgagagtcttgactctgaaagtcttctcatgttctttaacagatgcatatattttccatgtacatccttctgctctatactttgccctaaacctctctttggcatttggaatcagttcatactcattgtcaatatatatgaagtgttccttcatcacatttcttagaatgtccacactgccaaattccataacaatgtcaaacttgaagccaactatttttgtatgtggtttgtattccacctttggatctgtttcaacagcttcatcttcactgtggttgctggccaagtcatcaccaaattcaatctcataagcttcatctaccttagcatccccagctaagctaaaaacttgatcccacaaagcttgtggttctgctggaccataatcatacatctcctcaaatagtgcttcattgaactcttctttaacacagttaaaatcaccttgtcttgggggttaggcctcaggttgattttcaagttaggcctcaggttggtgcatttcaggttgggcctcagattgtggttcaggttggtgcattttaggttggggctcaggctgatttacaacaagtggttcaggttgtgtttcagcaagtagttcaggttgtgtttcaataagtggggcctcttgttggctttcaggttatgtataaggttgttgatcaagtacaaaatctgccaaaagaggggttcctggagtatgatcaacattcactgtcttttgttgttgagccttcctcaacctcctcaattttaacctctttgacctaggtgtttcctcagtgaatcaagttatttcaacttccattacttcaggggaattaggttcatcatccatcacttcatgagaattatgtccatcatccatgattttaggggaattatgttcaacgtccactgctccatcttgaggttcaacatcaaatgctcgagcatggatgatctcatcatcaaattcctaataagaatgcaacaataagttaacattcaaggctacaataccctaacaaaaattgaagaaaaaaaatagatacacacaactacaacacttacattttcaccaatatcttcaagttgttcaacaatgcaatgtaatcttcatctccaagaacattgaagtattctgaattttctacaacttcctcctcttaacggtcccaatcatagttttgatcattaccttcaatttcatttggtataggttgtggctcaaacatcaaagatgtatctgtctctgacttagaagatgatgttgaattaatctcaattaattggttcttgaatttcatctaacaaaacctcatcactacgcccttgtgccaataagtcatcaaccagcctcctactcccttatggaatctcctcaattgtgcactttttcaatgtttgaggaggcttaggaacatgtttgataatatccacatcttttctccactcaattggaagtagtggatctagtaagaccaagtaaattgaagcttctacataatttttacttctcaaatccaaaattcaagtgcttcccttaaggcttgaacagaaagccaaatagaaatttgtattccagttctcccctgagggagattcaaccttgcaattgtcaaacaaattatacaccccacattcatacattctgtttccaaaatgggtaaaccatgtacccacgtggaataacttcactgtgaactgatcaaccttaccactgcaatggaaaaaatgaaagaacagtaaaggctctgatctaatctaggcaaaaccacatattattggagcagttgggcaaaaacccaaacatttagactccatcaaaaagacaaaaacaaaaaacaaagtagcatgtgcatatgtaccccactgacgaagacaaacaagcagaaagattcttttacaactgattttttgaacactttaatcaatattcaaagcacagttaagatcacatttaccattccaactaaatcgttcctcgaatctctaacaaaaatccaactataaaaccaatatttttttcactcagaaatcctactaaccctctacaaacaagaaacccaacacagaaaccctagaaataagtttacccaaaacgaaaaaccctagaaataattatgaaccagagaaatttaccataatcaggtgggggatcaccaatagatcgtctgaggtatcacattgccaccatcgataatcgatctcctttttgaccaaaattgccttttacttttcactttctcagaatgagtatcctttttcctttcattggtttgaatggtgtgtttatggtctttttcttttatttatctatcttaatgtaaattactttccttttattttccttttaattttactcccataataattttagttttggattaagacgtgaatttttttatttagttgtcttttcccatttgttaattttttcattaattagttttagtttggtaatcttatacccaaattcgacgtagagggttttataggatataacaaagttgacttggcaccatgtaggagccatccgacacataatagagccagagtaatggaaggagtcttgaccaaaacgattgtggagattgaggactttagccataatgttttgataagttggtccttaaatatttttttttttgacaaaagatcccctaatttggataaaatccttaaacttttttttttttt

SEQ ID NO: 266933 - DNA, 2373 bp, Cannabis indica
tttttttttttttttgtaaagaacctcagtttaggacactgctgtagttatttttaaatgcataaatagttattttaactttattttggacactgctgtagtgttcctaaataaaccataaaaacaaaaaaaactcttccaagatatactaaagattttttctaaaatatctatatctattatctattatacatatatataataaaataatagaaaaaagtctacacaatgcggtattaaatagttttggagacgatgttgatacccaatgctaatattaaaaaatagacccataaaatttacaaataattaatttagagcccaatttgagtcatgaatatcacgttttctacgacgagccaaactagatgtttggtggtggggttggcttggattgtgaagctacacacactcactgtatatttatgtccaagtacttttactgtacaaatattcatatatgttggtatatatttttttaatgtggtctacgactacagtactgaccatgggaaaagcatgcgcccctggtaaaatataataaaacaaaccgagtttacataaagttgtggggcttcattataatttattattatgatgtaatataaaacagagaaaagcaaaaacgtgtttaattttatttggtgaccaaagtttgttttaaatacccatatcacttctcaacttcacaaacctcatctactccattcatcttcttcttcttcaattttctctgaattttattatcatggttctcaaattcagaatccccttcaaacttgaaggtcagaaagaaaatcataagagtaataatactactcataattacaagaagttatcaaacgctgttggattgagaatccttgttcaaatatcatcttcatcatcacaacaaacaagccaagaatccaattatgttattgtgaaatcttccctgagattaagtaatcaaactcctcctcctcctcctcctcctaaaaacttgacccttgactcttgctttctcaaaacttgtcatctttgcaacaaaggattaagtcttgataaagaggtctacatgtacaggtatattataataaccccatctcaaaggttttttccttcctaaacttagcaatattaattggttaatttatactaaattaatataatttgtttcagaggggatcaaggtttttgcagcatagagtgtcgagacagacagatatatctggatgacataaaggaattagaagcttctaccaagaaaatagtatcatcttatagaagtaataattcttgtactactaattataattacccttcaaggcatcgtgattatcaacctcaaagacataataaacccatctctaactataattacagaagaaatcgcacaatcgttatctcctagcactaccagaaaaagacatagtaaccagatctatataaatatagtactctatctcaaatattacagagaacacagtatgaaattgcaaagattgcaataaagccatcttcgattttcataattggtctgtaatgaatcgaaatttatcaatagcagatattttttcttcctaattttgtgtgtggataaagtgcagtatttattttgtgaactcatatgtactgttctataaaaatataggacttattataattaatgttttttattttaatttttaattggggttagttcttctgaatctgatactagtgtggtatagcatagtgtagtggaaattaattattagaaataaattgatttattgttatatcgttttctttcttatcaacaaaaggggataaatatatatattagtacaataatagctagctgtttgccacctgatagtgcttttcttctataaatgtgtatattggaattggacaataactgtgcttaattaatgtatgtcattattctttcactgttagctgtttggctgtatctaaaaaaacattatgcctcaagaatcaaaataatatgcttttaaaaaaaaaatcaaaataatatcgttatctgatgttgattattgatgcttcatatctttattaattaatattatgcttcagtgaaaaaaaaaattaggtatctccacaaagcctttttttaatcttaacttttaaaaaatttatattagataaattctattgtggggctggcccagctaggagtatcttgtaaaaatggagaaattataatctattttttttaaagggtatatcatttttttttttgaataagatgcatgttcttgtgtttaaaaaaggtttcaaaataaactgggggttatcttttctgatattaaagtcctattgtctagttttcttggagcatctctttctcatgttagccgcaactttaatgttgaggttcatagattg

SEQ ID NO: 266934 - DNA, 3096 bp, Cannabis indica
actttgacaacccaaaattaggctttgataacgtttgtttccccttcataagctcattcttcaaaaataaccattctttaaaataaaactacattcaaatttaacgttacttctaagtatattttaaagtcactatacaaattacattacaagtcacttttttgagttaggtctaatggtacagttctcgaaataaaaaagctttaattttttaaaaaaaaaaaatgaagaaggtgcaaacaaagaagtaaaataccttgtgaatagcttacctattaataacttgttctttgttttgattacgtaccttaatgcttaaaaaaaacttgattaaataagctttaagaatgctatgaacttaaatttggtacaacaagtacagacattaaacaactagtttagaacaattggcatgttaataaatgcaagtaggtattcaaaccaaaatcaatagctccaaccacagaatcagacagcagtaggttgggatattccttccactccactaatcaatactgaaatttttagtatcgaacaatgaagcatcatcctacaaggaatacaaggaaagcatttccaatttagtacacatccaaatcaaaagtcaatgtggtaaacaaacttcagttttaaaataggttcgactttcgcaacttaccaagctcgagattgagttaagactgtgaacatagcaatacaaagtgcccgaaacatcagatcattcaagcggatgcccaatttcgacaaagagagtgaactttggccagagaagccatgtaatcatcagacctgaatatacaaggacgtttaaatgactagacaagtgcataatacagagatttgtttgaaagttattacctttgtccgtacggagattgacatgcagctagtatatgacgtttggcttcctcagctttgttctacatgggtgatcaaatagctaattcttaacattggcatgtaaaatcaagctgtagttttataagaaaatttcaaagcagccaaaatattcacataattaaattattacatatatgaaggatactctatctactgaactaggtagcaatatttcttgtttaagcaatacatttgtcatcttcagaattgaaagtctccactaataaatcattaacacaataaatcaaggatggacttgaatcacatatttgtctagttctttctgtctttgatgttttggtttttgcatttattacaacacctaagtaacaattagacaagacaacatttgttttcttacttgtcatgcctccacaccaaagaataatcaggcatcaacatacacataaccatttcctgataaatgtaaggtacaagaaaacagaagacaaaatctgaaccaaaaatccatgctaggaataagtgaagttaaaaataaacctgagattcgtaatacagcccggcatacaaagaagcatagaaatattcattctctctgccatttgcaaatgcagcaacaagctatatatcaacatgatttgcagagccaaatggttgagtcagatatgaaattcttaacaatcatgcaaaaagtggtaattatacataaaatcaatgagatcatacagtaggcaaacataaagtagattgatttcctaatggaaaacttattacttaccttttctggatctccaccatctttaaacatgttataggtgtcacgcatgacgggtcttggatctcttccaacctacagttattacattccaaagtcagaatacttacctgattcttttgcacattatgagctagaagtagatgtttctctcaactaattgttgaacccaacatagcataaaacaggccataactataaagatggagataattcatagtatgtaagaaccatttgccagaagatgtttaattccctttatttaatacattaggaactgatgaagcattcaccttttcaatcttcctaaaaagtttcaaagaagataatctaacatgactgacctcaagaaatctttgtcttgccccatcaactccatacaactgagcttcacataggaaacaccagatggactcctctgtatcattcgggttctgggcaacatctattcgaaactgctctgccccttcttcaaacctaaaaaataagagttacccatttgaaataatctctccatccacatttcaattctagtcttccctattgataatgaaacattataacatttaggctaaactaatcttggtctaaaaacttagggaaatttcaatacaaagtgtaaataatgcagaattagtacctatcaagatagtaaagtgatagccctctttgccaaagatctgtttggagatttcaatcaatacaagctcacattaaaatactcaaaaaacacacattttccaactataagtgaaaaaatagacatacatgccttttgacgagggtccaattcaatggccttatcgaattctgctatagacccaagaacatcacccttcaagataaaaaaaaaaacccaacagtttgattttgaatagaattagaaaaaaaaaaaagaagggataaaaaaatttttttttgtacctgcctaaagagaagcattcctcgtcgaattgcaaaaactgcttcgcgagggttgttgttgttattgccgccagttatggcgtcccagatgcctgaaaccgaaggaagaaccactcttcttgatatcgaaagtgatgggtttccatggatttgaattcttggagttgaagggttaagaaagggagagtgggtttgggttatgagtgaaaacagaggagagggtttgaggggagaagggtgaaaggaggatgtggagatggaaagtgaggattcaaaaatgtgggttgcagccatgggcggaggagaccgaagcctgaacttggtcaatgagaaaactaaggtgaaatgagtgagtgaatagtgaggcagtttggggtttggagttcggtatgtcgttacacaattggataaggcgccaaattgtacaaatctcttcctgggacaatttttttatttttttatttttttatttttttttttgcgtttttagagagaaaaattgtcccaggtccgatggtcggaccatagggtccgat

SEQ ID NO: 266935 - DNA, 1119 bp, Cannabis indica
gaggcttcgtcgagggggatcctatctctcccctcttatttgtgcttataatggaatctctaacgagacttctgtctcagctttcaggcgaaaaggctttgggtttcaccctatgtgcaagaatctgaaactaactaatctttgttttgcagatgatttgatcatgttttgcaaaggaattctgtaaggggtattcatgaatcattcacgatatttggtgaattagtaggccttagagcaaacaaattaaagtctcatatcttctttggaggggtgaaggaggctgtccaagacaaaatcctcaacttgattcaaatggattacggttctttccctctaaaatgtttgggagtttatcttcatccaaccaaatggaaagagactgattgtcgaggtattctggagaaattgaataagaatatcaattgttgggccagcgtgaacttctcttttgcatggtgtgctcaacttattcacttagtacttttgtggatcaaaattttttggatgagcattttaaacctcccaaacaaaatcaccactgccatagataaaaaatgtcgagactttttatggggagctaatggaaatagaagcaaactccatatcccctcttaacataaattttttcttcctaaaagttaggaggagttgggtttcgagaaggcaagaaatggaatgtagctttgatggctaatatatttgggcaatttcttgtgatcaatattgtctttgggttaaatggattatttccatttaactcaaagggaaaagcttttcgggcatcaagatcaatcaagatatgagttggtacttcaaaaagttgctaaaattgagaaacatgattgatgaaacatccttgtaacttgctgaaaggagaggtaaattcaatgccaaaagcttttattactcttttgttgatggcccttgattatacaataattgtgttgagcgagatgcttgtacccaagcgtagattcttatattgtcaggttgttaactcctatttgctcacaagagaccaactgaatcgattcatgagcattcctaatgctaactagccagtttgtgaagaagatgttgaaactcatggtcaccttttcacgaagtgttgtttca

SEQ ID NO: 266936 - DNA, 1329 bp, Cannabis indica
tagggcacaaaacctaacagtttgttgtctcattaaggacaagaaaacgaagcgagtacttctttggggtgatctttgtgaaggtctctacaagcttgaagttcactcacctacctcttcaaaccagaaagttctttccaataattcccaacctagtgctcacaaccacaccacctcaagcaaccctgtccacaataaatctgccatctctactacttggcgtcataggcttgggcaccctgctcttccaattttaaacaaagttttgtccatagctgttcccaacactaaatgtaatcaactttccttttgtactgtctgtcaaataggcaaacttcatcaatttagtttcaaaagtacaagtaataaaagtaaaagtttattcgaattactttttactgatgtttggggtccatcttttcactgttctaatgatggttataggtattatgtaagttttcttgttgattacactagatttacctggttatttcccatgaaatacaagtctaaagtaacaaccatattccaccagttcaacaactttgttgaaaggttctttgacactaaaattagaagcatacaatctgacttagggaaagagtatgaacccttaaataaagtttatcaagatcttaagatttgcaaaagaaactcatgcccacatactcatcaataacaaggccgtgttgagagaaaacacaggcacgttgttgaaattgggttaacacttcttgcccaagctgaaatgcccttaaatttttggtgggaagctttctcatctgctgcctatattattaataggcttccaaatcaaatactgaaaaacaaatctccctatgagaccctcttccaacatccacctgactataatatgctaaaattctttgattgttcttattttctactattaagaccttatgaatctcacaaaatctcattcaagtcaaccaaatgtctctttattggatacaccatgtcctcaaaagggtataggtgtgtccatcctagtggttggactcggtaattagaatcgagatgaaatgttctaaggccttattgtaaatagacatgtgagcataacacgtgggtctatgccatataaacataaataggcgtgtgagtgtaacatgcatatttatgtcaaatagacaataagaataatgacattaataatcatgtgttgtatattattgtatttattgatatttttactgtcttgctgggcttggctcacgagtgctctattgtgcaggaaaaggtaaatcacttagtaatcaaccatgagtgcgggagcttggagatggattgtgttgggttttatgccct

SEQ ID NO: 266937 - DNA, 1010 bp, Cannabis indica
aaaaaaaatactaactttattaatcaaattgcttcaactattataatagaatgtaattcagcaagagcacaagatcagctacaagctacataatgcgcaatcttatatacaaaatgcttaataaaacaaatcttcacaaactttaaataagctaacaaaagcttccaatattgcaccaacaaatcaaaacatgacaacttatgaacatatgtaacgcctagacagttaccaaattatttgtcttaagtagaatatctacccaatgttttctttaaatctaacttaaagcctctttaatcttaaaactttcagccatcgcaactttcacacactcttattatttttttttttggaagaacacacacccctatttactaatagaaaaaacctctaaaagtaatttcccatactatctcgagccactctacctgtttcataccatccttctaaacaaaaattgcttgtattatcaacattcactttaatcttatttaaagtcggtttagtccattattcacatcaatcattcattcctagatgtaaaaaaacaaggacatgactctttttttttattattttaagcaacttgccattaactaagtaacaaatttattattgattttaaatgttaggtttatgctaatactgtgttagattctctatttaatcaactattttcaattctatattatattttgtaatgatcaaataactttaagtttggttgagaggaatgaaaacataagagtgagaatgagaatgtgaatgagaatagtaatggaatagaatgaaataaaatttaaaataataataaaaaaaaaagataaaaaattattaaattttttatcatcatgtattagaatggtcttttcttccatttcaaaatgaaattgtcattctatcaaaatagtagaaagaccattctattggaatgacattccaacactttaatatacaaccaaacaaagaaataaaatggagattgttttatttcttttccattctatttc

SEQ ID NO: 266938 - DNA, 2418 bp, Cannabis indica
aatctattaaattagttgttatggtttgtttgatcagggtgatcatcgtcccagagcaaggaaggagaacgatgagttggaacatgcaattgcactatctctagctgatgatttgagaagaccaacagcagcaggtatgtgttttgatgtctatatatgtgcgtatacatatatgtatgtttgtatcgtgtataggttatttaaaattaatattgtgattcagctgacccttttcataatttttttcaggacgtagatggcgaagagaccacgatgaagattttgcgagggcactacaagatagcttggcttcgccatattcttctccgcgttctcgtccacatccacacccacacccacatcctcatccacatgtaccttcacaccccactccttatgtccctgcagcacacccaccttctcatccccctcaacagtattacccttggggatataagtaagatttcctatataaacttacttctaatcaaacaactaattaatgcatggttttgtgtgtcaaatgtttaatgacgatgagaattgctataggggcatcatgttgcccacaccacaatgttggtattattgttgttgttctttgtgtattattgttgttcttggtgcaatttaacttcatatcctatgtatattattttaaaataaaaaatacggcaccaataaatactaagttggtgttcagcaccatggtgtcctatagcaatctcatcaattaaatttggatataaaatgagttcattactttttaagtgtattagtagaacattgtaaatctggttcaatcccatatgaatatttgatatgtattttgagtccaaagtagtgagattttattattattattattattattattttcttaatttgaaaaatgacatatcatcatttacagaatatgtggtggctgcaaacgtgaaatacgttatggaaattatcttggatgcatgggaacgtactaccaccctcagtgctttcgctgtcattcttgtgatcaaccaataactgagaatgaggtgcctttttggtccctgcctaactctcctaagcttatttattaatttattaatataactaatcttaatctccatatcaaagttttcatttgaagaatattaatcaacttcaattttcttcctgaactagttttatatcttcttttatctagctcttacagttttttttttttcttgatccaagttttctctgtcaggaaaagatccatatcacaagacctgcttcaaagaactggctcaccccaaatgtgatgtctgccacaactttgtaaggaaaaaagttcactttagctcatttataattgttcatcatcaaaacttcagttgcttctcatatgattaaaattgacagtgaattatttgattgaaaaaaaaaatcagattccgaccaatcgagctggtttgatagagtacagatgccaccccttttggtctcaaaaatactgtccttcacatgagcatgacgacacagctcgctgctgcagttgtgagcgcttagaggtactaatctaagctactacaattgatcttctaatcaaacaatgttatatatctataaacttcttacttctttttttccttttttccccttgtgaagtcctgggatgcaagatatatttcattgggagatggacggagtttatgctttgagtgtatggaatctgctattatggatactggtgattgtcagcctctttaccatgccatcagagacttttatgaaggactgaacatgaaacttgatcagcaaatccctatgcttctggttgaaagacacgcacttaatgaagcaatagttggagagaaaggcgtaagtgatgcttcttcatacatttatgtgacatttattagtttcttcttctttcatatctcactaatagtggattttgttaatttcagggtatacatcatatgcctgagaccaggggtttatgcctttctgaagaacagactgtcactagtgtatgatattattataacgtactgtttggtttttcttctttataagatctcaaatgattaaaagttttgttctgaatgatcagatactcagaaggccgaaaattggtggtcaccaatttataggaatgagaactcaacctcaaaaactgactcgaagatgtgaagtaacagctattcttgttctctatggtcttccaaggtgaattttgtttggttttagtttgcagtttaccatataacaaaatacagccttcagttatgttgttatacatataggaaaaagaatttatgccaggatagattgcaatgatgctaggaaaaatattgtaggtaggcaaaatgttttgtctaccttggaacatttaaaagtaaaattaaatatgattcaaaaggctgttataataaagtcgagagactcgag

SEQ ID NO: 266939 - DNA, 1304 bp, Cannabis indica
ctccatgtttggtcttttaattgaggtaatagtaaaactttgttggggtcattatgtaatgttttttaatttttgttaagcaatttgttaatagttaattgtgttctgttgtctgatttgttgagtgattgctcttcttaatgaagatgaattattttaaaaaagaaaatgctcttgaatgaaaagaggatgatatttggtattttggttggactataaaaaagcacttattctttcatttgtgaataattatttttcttaaaagtggagtatcggcttcttgtgtccataatacacacgaataattcactttacaattattggacaatagtttatttttcctctgtgaccaaaatgacaaaagtttcacttttatgatttttttttttttgtaataaagtttcacttttatgatttaaataacaatattcacccaaaaaagaaagataatggaagttaataatttatcaaactaagaatataaaaatggaaataatattaaacattttgctcgtgtcgtttagaatttcaaccaagattcaaggctacagtagaccttaataacttgctgaactatttttttttctcacctataagatggtaccttgtaaatggttataataacattttataataattgttaaattaaattatatagtatttaatattaattaattactcaatagcactatataacattattggtatttttagtatttctcaaatctaaatttatatcggtgaattttttttttttttttttgaaaatatcggtgaactttttcaatggtttggttctagcaaaaaaaaaaatctagtttcaagaagaaaaaaaaaatgcatatttaatattttttgaagtttttttttttaaaattgaacgtaggattggtctagaacaatgttatgtgcagtgtcgtatatattatcttttataagtttctctttgagttggtgagatattagtctaaaatataattttaaaactaacaataatatatttatcaatcgtaagaaaaataattaaaattaatatatattatcttaagtttcaactgataatatataactccaaaaatttgctaattttaagctttattcttttaataaaacaaattaaattatacataattatttgttatatcattcaaaaataaattatataatacttaaaataaaacaaaatatacgtatttacacataatttgatctagtatatatatatatagaaactatataaatatataggattattttattattagtggcaaaatgacagatctttcttgtttggatatataaac

SEQ ID NO: 266940 - DNA, 1634 bp, Cannabis indica
ttggtttttagatggaaccccatgattctccacatggttacagggccatatcccgagcgggctttagatccacacctatccagatggttagccagccgcacgagatccagatggtgaaaagacgcctgagatccgaacaaatataagcgagtaaatggcagggcctgtgataaggtaattcaagattggtgaacaaaaatagccaccatcttgaggggggatactgtagaacattgtcccacatggattaaatgtaaaagcattgagccatatataagaacatgggctactccactcattgccggccaattggttttgagatggaaccccatgattctcaataatatatattatataatttttttttagaaacaattcaatacaataacttaattagtatatatgttatgacgtaaaagtaattgataagatattttttttaattgttgaaatttgttagactagtcttttaatttttattgtaatgtatgataatgatgatagtataaacctcttaaactgcaccgcaccatatttttgcaatgggtttttcacagttttaaaatcttgtggtacaattgtagtttgagaaaaatacaaaaactgcatatgcaatttggttttaaaaaataacctaaacttgtactacccacacttcaaacacccctataatagcataatcagctggctatcagcaaaagctatagtgtaatcatttaataaatttgaacattcgtaatcattgatatgattaactattagtccactaactcaagaatcatttaattatgttgatattggtatacttgttagggttttatgacctaattaactctaattcatttgtaatacttattattacttttattatcactaaaaaaatataaatttatttaacttggtcaattacattacttacgtgtctactttcataattatttctttaatattaaatgtttactcgtaaactgattctgataacatggacatcaaagtttgacacgtaacaagaaggaaaatatttacgtagttgagtagtgctgagtcatagcagtcgatttgggagggatccctagccctgtgcctaagttacacatgaaatttctctttctttattagttgttgttggtggtggtttttgttgtattattttgcgttttgtgaatagtgtagtttatacactagctaagtccgttactaattttgttagagttaatatttgaactgatgcttattttaaattttaataataataataataataataataataataataataataataataatgaatgaatgaatgaatgaaatagtgattagagtgtgcactgtgcgaaacaacctcaggagaaaaaaaaaataatagttcatatgtttgagtacatcttattaattatgatttgtacattaattataaaataatataatgtgtgtgagtcattaattagtgaggtgtataagttttgtttgagaagcatgtgtatataagttagtcatactttatcgtgcaacaaaaggaaaatacaaactatttggtcatgcattgattcatgtgatttcctcttacgatgtcatttattcaaatggtaccattggaatttttgtgataattcaatgaagtcattgctaat

SEQ ID NO: 266941 - DNA, 923 bp, Cannabis indica
gaatgaaacaaagacttatcttgctccagagtaccagtaattggctcaattagagttgatcttgcctgatctttagcaacatagacaaatttatctttacttctacttgaaggagaaactaatacaggacaattctccttggggaccacatcagaatgaatcaaacacttatcttgttcccgagtaccagcctttggatcgactggacttgatcttgattgatctttagcaacatacataaacttgcctttacctccacttgaagacgctcttgatccctgcattcaacgataaacaacaaaatataaaagtgacattataattgggtttctgaatttggttcagaaacaagagcttttaaatgctacattgaacggaagtatgattctccttattgtggaaaaaaagaatattatattgttcatatttccatttcacatgtagagtaaaagcccaccagaagacttaaaacagaaaatttaaaaatttaatgattaaaatagaaaccctaatcatttctcatctaaaagaacaaaaagatttcggaggtttttgacacaaagccaaatttaatgtgaatgttcaaaccctagaaaagtagagtgaacccaagtttcagacttttgacaattcaaatactaaaaaagtaaaagaagcagaagcacatggtttaaactcacatgaggacgatgagtacgaccggcggaggcaccatccggagagggattggtttgggggtttcgtcgaccacgaccgcgattcatgatcctgaagaagaagaggaaagcccgaaggcaagcaggagataaatttggcgggagaagatcaagtgttacaaatttacgagttacgagtttacgagcggaatcaatttctttgcggcaaagcacaataagactggtaactcgctactgcaaatatta

SEQ ID NO: 266942 - DNA, 3241 bp, Cannabis indica
gtcatgcaccaagccatatatcctgagacaagttcatttagagagtttggtggtttgcatcgcatacataggcatggacaagcccataaattgataagtgtaaagcacgaccactttcgacgagtgttttagctttccaaccctgtaattttgaggtagattctctacacaaaattgaaatcaacatccttttgtctagatcagaataaggggagccctagatattttacgttcccttccagccctccaaatcccaagacatctcgaatcccttatttgaagatctcaggggtatttttactaaagaaaatataagatttgagtttgttaaccattttcctgaccaagaacaaaacttctacaaggcaatcccagtatcattttgctttaaccagagaggccctacccaccaagattaaaatcatctgcaaaaaaatgtgggaaagagtagggccgccccgagaaagattaatgccttggatattaccattacccatggctctatcaagaagtctcgaaaaaatctctgtcgcccaaataagcaggttgggggagggagggtctccctgacaaaggccacacgtcggagcaattttcccaacttgaccaccattgaggcacaaattcaaagacgtagttgaaatacattaggagacccaattaaggaaggccccaaaaccccatagcaacacagaacatggtcaataaattgccagctcatcttgtcataggctttcatcagatcaatttaaattgcaaaaaaactttctttgcccttcttcctattgaacaaatgaatgatttcttggataatcacattgttttcatggatgcttctgcaatgcacaaaagcagcctgggtagaacaaataagtcgtgggagtaaaggttttatcctgtttgcaattattttggaaacgaccttatatgaaatgttgcatagggatataggcctataatgttgaactctcttcgggttctgaatctttgaaatgggcactaaattagtagtattcacccccttgtgcatcgttccagaggtgaagaaatccaagaatgcatcaaaaaaatcttcacccactgaatcccaataatgcttaaagaaaatggctgacataccatccagaccaagggccttatggttgcccatagtgaacaaagtttttcgaatttcatcaagatcatggacccatatcagattctccctctccacagaggagagcttaacagtaataatatttgcacaattaagatcttgatctgagccagatgctgagaagatttcactaagaaaactagtgaactcttttccaatggcacttcgctctgagagccagatgttattcatgtccaagatgctataggtaacattacgcctccctcttatagtcgcagacaataagaaaaacttggagcatttatccccttctttcaaccaagagacacgtgtcctttgtttccaataaagtttcttcctttcaagcgacttattcagggggcgcctgacctcaagctctgccttccaatcttaagatccaatgggcaatgtttaaagatgatcaagtttgcatcaatgggcaatgtttaaagatgatcaagtttgcattctaactcttttatagtagcgtcaattttcccaaactggcatttgtgccaatttagcaaggcaacttgagttgctctaatcttttttgaacaccctggccggggcctaatgatgtgcgatagaattccaagcttgggaaacaaccaactttcttctctcatctcgggtccaaccttcttcaaatttaaagtttcttttaaacttctcgtcatcccctccaaaggaaaggcacaaaggcctatgatctgaattacaagtttgggatgagcgcaatataaattttgggaacaaattaattcaaccttcattaactacccccctgtccaatacccaaacgatggttatcctaagttagttcatcagttcaacaataaaaggaatgaactaatctatccccttggaaccttccctttctgactcattaagaacaaagttagtgtcgcccaagatcaaaccacaagttgccaaatttatactcctctttcatgacttcagaccaaaataacttttttgcatgaaaatacggtgggtcgtacacacaagtgaggagccaggggtgagcgggagggtccgaatacatcagccttgagatatggttacaggagcatgacatagtctaaaaaacaaaacccaatttccaagccagaattataccacctgcagtaccaccagcgggcacagtaatattaaaataaaagtgaaattttttaaacagatgtaccagcagtgaagcatcaacttttagctcaaaagaaaaataaattcaagactgcacgaccaaactagggccttaaatttgtgaactgtagaggtctgtcccaaccttttacagtttcaagccacgcccctcatggctcctgtggaggatatgaattatcctcttccacaggattaccagccgacacacgcgaaccagtatcttcagccacagtcgaagccagagcaatattgttaatagagcaaactcccaatggtcttccacaagcctcaccattatccttagtaacataggtggaacggctactaacctccaaatcttgttctgacccatcattgtctcaaggaaaatgacgaatgacccctgggtgttgacaatgaattttcatcggtatagagcacacagaaatggaactttcaataagctttcgtttcttcagtggggtagttctttcgttttgctcaaaagtgggagggctccaatatcccctcctatcttctttatctcataaacatccatctctccaaattttttaattcttgtaaaaatatttcttgggcctaaaaaaattggacaaggccctactctcatccccaatgaaactaacctcctgcccataaataaaattacttttagacccaatagcatgacccaatagagccaacccaatccttttatttttatctaaactttcgggcccaccaggcttagagggagacacattgctcacgtgatccacaccttttcctttcgccagctcatcaataacgtacacattcaaacagttatcttttgaaatcaatatatcaagaatagcttcagaaccacttttatcatttcttcgttgtagcacccttgccattaataaaaatggaaagagtattatcaagcttgttattaatggttttgggaacaca

SEQ ID NO: 266943 - DNA, 1537 bp, Cannabis indica
tataaaattagaggtaaatttaattaattgattaataaaagtggtatttttcaacttacccctattaatgctatagattgggccgagaaggtttatttgagtcgaccctttgggccaggtttagtgaatgggctattattaaaggagttttgagtggcccaaataaaataaaaataaaaaaaaacaaaaggaaaaaaagagaaaagagggtgtcgtgtcaagaaacaagaaattagaatctcattattattactatattttacttaacaacaaatgtatgatagaaacaacagctgcgtcagccgaaattgggaaagcaaagtcagagttgggatagagaaagaaagtcccaaaaaaagagcagttgagttgagtttgagttgagagaagaaaaaagataacacaacatgagaatgtgaaggtatccctttcttttcttcaaattacagtagtttgaacacaaagcaacctttgcctctgcctctctctctccctctttatatctttccttcctctcttttgacgaaccccacttcaaaataaaactctcttcattctctctaaacaaaaaagaaagaaaaaactaagaaaggattaatctttttgatctcattctctttctgggcttttgtctattgttgaatatatatattatatttcccataaagggtgaacataattgtggcaaaatcaggctaccaaatcttcttacagtagagtctttgaaagctcttgaagcagatatacaccatgccaataacttgtgagtctcatttctgattttttaatttttagtttcttaacggtaagaattttttttcccttttatagttatatgttttattttaaagttttacatagttatatgttttatttgatcaaaacctgtgaatccatttgcatttgctatgttcttgaatgattaaggtgttgttttttttcctttatgtttctggataattggtggtgttgtatatattaattaaatgaaattgtggtagttgggtagtttatgtcacatcctatataaagaagggtaaaattgactcaaaataataatgtagtcattgtatatttttatgataatttcttccaattttattccctttgtcttatttttgagtttaataatgggatttatttatttatttattttttttaaaaaaatatatgtagatgaaagcttatgctaaatttagttttccctagttaagcattgaccaagatgagaagagttaatcattgtgatttatgattgaggctttgcagggctgctgctatccctagagactatgatggggattgtgttcagatgaaattgtcttacagtcctttggctccacttttcttgtatttgattgaatggatggactatagctgcatcgattcactgcctagctatttaggccttcttcacatacttgtataaaaggtacctattcccttatttaattgttatgttgttattgtaattacaaccacttaaagtggaatgctcaaatgttaatgtggtttgcttctgggtactcttacatgt

SEQ ID NO: 266944 - DNA, 944 bp, Cannabis indica
tcagttcaaggttctaatttactatttagaaatacaggtccatttgttatttaacaaacagaggtccaatcgataactttgacaaaactcaaggtccaaaatggtatttaccttttaaaaaacaaagaagtctttagaaggaaagtaataaatgaaaatcatttactttgaggattcaaacaagttaaaccaaaaaagaaaagaacgattcaaataagttcatgataatagaatttgcgttaagtagactaattaccactagacagaatttaagttgctactatatttccctcctcatcaacactcacagttactgagtccccttctttaatgtctcctctcagaatcctctcagccaaacaatcttctaagagactcacaattgctcttttcaatggccttgccccatatgttggagcagtcccctctttcgccaacttctctttgaactcagatgttaccttcaagaaaatgttctttctttcaagtctttcaataacatctttcagcataatatccattatctgtttcagctgaacatcatcaagttgcttaaataccaccacatcatcaagcctgttcaagaactcaagcctgaatttttccctaagttcctttgcaactgccaccttcacttgtccaaaatcaaactggtcccctttaacaatcacatcgttgccaatgtttgaggtcattatgataaaggtatttttaaaatccacagtttgacctttaccatctgtgagcctgccatcttccaaaatctgaagaagagtgttaaaaatgtctgggtgagccttttcgatctcatcaaagaggatcagagagtgtggcctgcgcagaacagcttctgtcagctgcccaccttcatcatggcctatatagccaggaggtgatccaataagccttgcataattatgcttttccatgtactcactcatgtc

SEQ ID NO: 266945 - DNA, 3232 bp, Cannabis indica
gcgttcaaccattgatcaagaattttaacagcaaatgcaaccacctcctcaacccttcactttctattttgccaaatacactcattgcgagctttccaaatagaccaacacaccatgaacactcgactcagcctcacgaatcaaaattcttcatccacgccaaccatcttccaacaaccccaagcaaaatcacaagagatcagacaatgggtatctgattctgctaacatctcacaaaccgggcaaacaacttgtaatggtacatgttggataacataaattccttgactttgggtgggatttcaagttgccataatgttttcgagaagccaaaatttgcatccgttgggtaggccccttttagaacttgtagatgttgatatgcactacagacaggataatgaccactcttgtcatggaaccaataccaagagtcttaagaagtagaagagctaagaggaatacccaatatagtttcagcttcaacaatagagaataaatccttcaccacctctagcccttttgccaacttcaaacaagctactaaccatacatgagctcaccaaaggcagccacaaatcatacataatccaaatagagtttcccaccccactcttcagcgcattccatctttcagaagttccattgttgcaaaaatactcttccaaataaaacttggattaactcccagttcagatgaaaagaagtctccacgagcatagtatcgagcccaaaagacctttccaaccaacgaatgaagccttgttatcagccaccaccattttcccaacatggcaagattaaaatctcttaaacttcgaaaacccaacctacccacatgcttataaactacacttccaccaaaactttgccattaattgctcaatttgctcacaaatatccactagcaacaataaaaacactcatagcatatcatattttgttgtgataataaataatatcacactagtagtaatgagcaacactaataccatataacaatctcttccatcaatccttttgtcaatgattgtcattcatttcatattttccaacttccaagccaaacatactatactacatatatataaagaaataaagaggaagagctagaaactactcaatgacactaagatgattaaagggaaaaaacagtaggactgttattgaggtaacatttttacatatgctacattgaataaagttgagcacttgaatttttattcattttactagcaatgaaatctctgtaccaaatagctgaaaatcttggtcttctagttagagtgccaaaatcaacatgatagagtccaaaacgtacactgtatccatctctccactcaaagttgtcaagcaaagaccatgcaaagtagcctcttacatcagctccttttctgtccaccccaataaaaaaaaatgaagagaaaaattcagtcccttttctctcaaaaatctttcaaagcttcctttatgagattttcaagcatacctaattgtagaggctaaagcacttaagtaggatgccatgtactccactctttcaacatcatttaatgaatcttctacatttaaattgggtttgtccttgtaaccataaccttcatagataacaagaaaaaaacataagacatgaggtgtttggggcttaggagagaaattaattatttaactattgctctaaagatatatggtacttttaaaaattactaaaaatttgtgtatttcttcattttattttctttataaaaaaaactatttttttgggtgcctgggctcggtgtagagacaacaatttttaagattgttgatcttaaatactcattactcaccgttttctgtgatgaacataggtatgttgttgtacctttcttttatgtacataataatattttccaatccttgaggataaacatatatccagtcaacttcagtctgcatcagcaagaaacttaagttagtattttttatacccccaaaaaagaagaaattagtttgatatgtcatatgattgatgaagaagtttttttacatacttcttgtccaataaagaaccatacttttgaggagttcgtaatgcaaaaccttctgtctttgaatttcctggtcctgtttcacactcagaatatttacaatcttttatgtagaaactagtgtagtggtttacacctataaagtctattcctttcttaagcttctccatttcatattttgaaaaaacaggcaaatccaaccccagaatttctctcatctcttcaggatatttcccatgtaaaatggggtctaagaacctgcattgggcagtgacaaaatacctcagtttataaccttgtttttttgggggtattttttaaaaaataaaagaaattaaatcaataactcataccagttcatatagaaagatatagctctattaacagctagtttgtcttcagatgagttgctgaaaggctcataccataaagcatttataacaatcccaatgcttccttcttggattttctgagtgttcaaaccagtttataaaagtaaataagtcagaagagagcttaaattaaagggtatgtttcagttataatataatccaaaattttttacaataatgttggaacagactatttgaacattgttttcgataaaaaaagagttgacctgatacttggttcggtataaatcaacagcagccgcatgagacaagataacattatgagcagcaattaaaggttctttctcagaatctccattggtgcaattcccaaaggaggcagagcaacgacatggtggaaaaatccctgatctgtaccctctgattactgcaacattgggttcattgaaggtcgcccagtactttactctgtccccaaatgttctaaaacatatgtccgcatagtatttgaaatcttctctgaaatataaccataatcccttaacaaaagtaaaaaagagagaatattaagtgttttgttgtaacttactgtacttgtgaactcaaccaagctccatatctttcttcaagctcttgaggaatgtcgtagtgagtcaaagtcacaaaaggttcgatccctgtaaaaaccagaaataaattttcattgtttctagagatgacaaaatccaatattattggaagttagagagagagagagagagaaaacctctgtgttgaagagagtcaatgagtctgttgtaataatcaatcccagcccaatttattagtccaaatcttccttctgggttc

SEQ ID NO: 266946 - DNA, 2449 bp, Cannabis indica
ttcaacagaaaacccttttgaaaaattaaaatggaatactcaaaatatcttctgaagaatcatatccccaaaaaaaggcatccttgtcttggtgattgtaacttcaaaataactattctatggactagttagttgaaatggtctcatattcaagaaatgaattatacttattagaggtcattgtaattaatcacagaatcactagagcaagatatttctatgggagttgattcaggagtagcttcaatgaggtactcagaatcttccaaggctctgtccaaagattctcccaagtttgcttcccatatatctaacttacaagctctcttgtaagtctcataagacgccgcccttagaccctcggacaccatctcccttaaagatccacttatcttttcgatgttgttcataacatcaagaaatttttcagccaaaccaggctgccagaaaacaatgacagcacagctcttatcaactaaacgaatatcaaattcttcggagaatatggaatgcgagttgtgcagcatggtcttcaactttccagcagtgttctcacttccgaatccccacaggtatactaattgctcacagttaacttttcttttactctttgtccacacactgatttcctcatcaattgactcttcaaaactggtagataatgcattgaaaatgtttgtagactctgtaagagctggagctgaaagtacttgactatcagatgtgttggaattggggtcaattttcagaatagagcatagcttagcaaatagatgactaatccttacagcgttgtgcccgtgaatcttgccttcgttatcagctgctgtgaacccgaaacatggcattacaagcaaatcaagtacagtctcaatcaatgcaatcaagcaagcctgtgtttccactttcatacaattatgtgcatcaaatgaaaattaggaaagataactgacctttgtacaggatttcaatatcaactggtgcaaagaaatgactattgaggagggaaatagccacaggaatattggtcactttcctcaaaggaccaataaatgtcatcagatgacttacatcaaggacacatgggaaaatcttacttaaggagcttgcaaactcgtctacggttggaggtaggggagcaatgaattttgagtgaataaatgtaagatctgcactgaaaaattgcaatataagataaagaatatcaagcaaataaaaaaaaagggtgatttggagacgattcaggcattagatatacaccattaagggaattgtaggaaacaacaggtttctgtgaagcagaaatcaaatcgatcacctctcgaaatccccgaaccttcttattttcttcttcttcaaggcgttgaagttcactctgtcaattgaaatcgaacatggttgtgagatggttttatgtatgctactcaaccaaacattgtcatcaagaattaaaagttgctcactacctcaaacaagtccttatcctcttgtgagcttgttaaaaccacacgaactgcctgtgttcctccactccttcccggaattagtacaggaactagttcatcggtgaagtctcttaacatctacatcaccagtcaagtaagcaatatgattcattcatgttattgacactatcaaactcaagtttcgatacgctacaatcaagagagacaacttcttcaagcaaaatccgaactttcactaatctatacctctagtgcaagcttcacttgacgttcagtgcagacatctatagtgatgcatggtctagacccataaaattcacttcccaaaataagttttcttaaagaattcatcagagcatctgtaattgaaatcagagaatacttctaaaaatgaaacaaaagagataaagatatatattacacatgaaaaataacagcataatgcatcatcttccttaccatgtgtgttctcctttgtttttttacatgtctttttccattgaataactcttgatttaactctttcaataaataaggcatcagcaacactaggtgtagaagtagaatcaagtataagaggactgggtctcgggttcccaatccgaattttcgctttatcttcctgtgctctagacaagtatgatatgcctatcaaatttgaaaacatagaaacaacaatcaaggaaataaatcaaaccatacttatgtattcaaacttgaatatgcatattgatctcatctatacaaaattaagctacacattattagacttaccatcataaatgcaagcattaaagtcaaaaccttcacgagccatggatgtcaaatatgaagtttggcatgaaaaactgtaagatggcatccctaattttagttcatctctggggaataagagatagttatacctgtaacaaaaaccagaacataaccttacacttaatacttttctaacatccatgaaaactagtaacaagctaggttca

SEQ ID NO: 266947 - DNA, 2465 bp, Cannabis indica
  modified_base (139)..(139): a, c, t, g, unknown or other
ctcattcattttgcagactcatcctacacagtcatgtttatgtcttccattgatgttcatacccactattcatatcaggtatgcacctcttctattgtttttatttcttttctaaatccctatttgttctttttttttnttttttttttttaaatttaaccatttttctttcttttactgaaacggattctacgattataataataataataataataataataataataatttccatgtagataatgttgccggaatcagttgcaattgtcatggcacccagagattctacgaggtaagaaagaccagcttaaagcgttgctacttggctagatacttttggttttgactgcagttccattatttgctcaatgtatttactttaaattttatttttatttttacttgtacagaaagcatggtatctttcggttgacaactcccggtgggatgtctgtcattagacactgccagcaacgtggttttcatccacataatccgcctgcggatggtgggcccctttataagacatgtacagatatttacatgaaccctaatctaaatttcgatgtcattgatcttcgtggataatatttgttttaaatttacaatgcttgatattcgtattattctgatgcaattgttcatataatatacgtgtgcaattattggatatgtgctattaggatcggccttaacattgtcggagtacttttgttatgtgtctgtatagagaaaaggctttatacctgccagctggctgaatatctttccatttgtggttattagttggccatattttgaactcaaatggcttgcgtttataacaaaagaaattggatctcctattttttaatggattattgaaccattgtaattggtgaaagcatcttcacttctcaattcagagtagagatcttttcatttgtcgatagaaaaacataattgtcagtgttatataatataagacaatcgaaacatattcattggactaaactaataccgtaatctctattataatttccaataacgttgcttggttggaaatagataggcacgcagagctgcgaaatttccgctgttttagcgccataggggttgtccttctacattttttcttctctttatctaagggtcgacacattgtttgtctggttgggtgttcgggcttcctctggctgagagttgtcggaggttggtggttatggatagccgtgtatgtattttagttggtccaaggggattcttagagtggttgcattctactccaatggttgtggtagctgggttctggcgaggtagtttttaatttatttattttttttttttctaaagtaaaatcacacctaacgtaatatttattcaattattaaaaccctatgaggtagttgtttgatggcaaattggcaatgcatttgatctagctaggggttgggtatgtagaagtgggtggatggatcttttctcgttgtctcaacgatggggcttgtttcatttgctggggtggccgaaggttcttctcgttatagatctagtgttagggaggctagtgccctgggcttgtctcttcttgttgctgatgcgctgttgctttagtttttaaatttgttgtgttttcaagtgcttcatttttgggtatttgtaaactactatgtttggtgatgtttttgtgtttattgtttttcgatggtatagtggttaaagagaatttaatggctcactttttgaaaatgttgagagtttgggttaactaattttttttaactctaaatgaactgcgtattagtcattttaatacccatttaatcaaatgcctcttaaatatttaaaggatcattcttttttctttttcttttttcaaatataatgaatatattcaaaaacacaaaattgaattttaactaatggtacagtgactaccgtaagtaacattttttttttaattgaataaatacagttttctaaaactttgcataaaaagattgtgtgtttcaaaatcaatgactgatttgttaaaatattttcgagaacgatgtgttgtacttgtagaaccgtatcttgagtgtcagacattggattttttattggatttgaagtttatattacccatttttggattaataaggttagtctcaggttgtgtttatcgaaatggttaattaagtcttgaattgaatcagttagcttatggtcccatatcccatattaaaccaatttgcacgtataggtgtgggatagagttggtgttggatgatggcagtgcagatgacacaatgatgtggcggtctgaaaatacttcaaaatcgtctttatttttttttcttaattctcttaattttttaattagttaattaattttatatatattttttttttaatttttttagtactattagtaatcttttaactatttaaccatattaattaaatattaacattaactaacatcaaaaaaaaaaaaaaaa

SEQ ID NO: 266948 - DNA, 1746 bp, Cannabis indica
atacttcttgctaaaatcattacaatataagcaggacttatcaacttcatactttctcaataaataaataaataaaaacttgtcaactatactatattaaccttcacatatataataatggtaaaattttattttcaaaatagtacaaataatttggatacaaataatcataattcaggaacaggtaggtcctcatccaaaggtggagccaaaatccaaaccccattatcaatgaccattcctttattcttctccacccaccaagactcaggcaccaaacactcctctttgagacacgccgaagacttgttgaccagagccaagctcctcttgaccttcagctcgaacccatcctcctccccattccaccctgccaccacgtgcaaactcgcctgtaagttatgccaatcgctcgggttcttcgactctttcaagctcggagacttgcgtgtgtctatcaccagctctctcgtccccacatccacgtaccccaacaacctccccggataatgcggtatcagatcgatcttgttccttatgtgtagaatctttagattcggataccgctccatcctctgcttcaaggccttgtttcctatctgtggagatccaaacacaaaagccgatactggaatgtccgaaaacccattctccactaaatcaaaagcactcacaatagataaactcgctccgagactgtgaccagtcatcactatgcttagtttctcttctttgtacttctctctcacctcttggagtttcgtcaatagttgaactctagcacttgatttaacgaacggggatttcggatctgccgatacgtatatggtgagccaacccttcatcaccttcgggtgacttttatcgttgtcgctgtcgctgtcgctgctgctggtgtcgtttccgagttcgtgtttcgtattcggactcagtagcgactcggctgactcgagctcggctcctaagacgttgacccactcgtagttccgagtggtgccacgccacgccacgtagacttcgcggcgccctaaggctctgctgacgtcatcgttggtgattgcgatgtagccgatccagttggactcgcgatcccatgactcgcgtgacatggagtggagaatgaaggcctcggggaggctaacacgggcggtggcgtagaggaatgaaacgacgtcgtagtgagtgtcgttttcgagcatgacttttgaaaagaaggagttcttgccgtagcggctggagccgcagtacttggaatttgggtcgttgttgaaggcgtcgtatgtggcttggcagaagtcgccgcagcggaggatgagttgtcgtagggagatattaagcggggctagaaggttgtcccagttgttgcttccgaggagttcttcccactccggcgaataatctggttcttctctgctactgatatccatagtcacggccacggaaaagtctccagagattattgagtgttgactgtagctgttgatgtgggagtgggtggtgtttgtggtggttttttatcttgattaagatttaagataacgattgcttttctttgtttgtatatatattggtgtcgtcactgtttaatatttgttttggctttagaacgtgctatactatttccccctcacgtcaatattaattaataatctctcaataatattttaaataatatctgcactcttgtattatatgtacttattattgttaactacttgatcttatgtatattatactatcaaatac

SEQ ID NO: 266949 - DNA, 2187 bp, Cannabis indica
aatgtcattaaaaaaaatataactcaaaataattaattacacttgtgtatctacaaaatcacaaaaataacccctccactttagtaaaatcttaaaagaactacaatgtttcaacaccacaatcctaaatggaagagttatgagatgagagactagaaaaccaaaattgatttaattattgaatttattgatattagtctttcttttttattattttaaaaaaaataatattggttttaaattaagtgacaattggaagtgcatgccaccaccttacacccccatgtggccagctttgatgacactaaaagtttcttccaactattaaaaactattaatctttcataaaatatactatttttagctgtatttttaagttaggatgccaaattattagcaaacccatctggacttccctctcttaaattaagtaccttatttatttttctatattttattccatattctatttccttctaaaatattctagaacaactgtaaaatcaatcgaacattgtaaactagccgaccaaattagtccatctaagcttaaacagtgcttcccatgatcttgagaaaatttacagtggttgcccatgatcttggaaaatactcttaatttgttttaaactaatatctttgttttattaaaatggcataagatgatgacaaaataaatggtttttaattatttttatcaccccaacatagataccccatttctttaaattagtactaaaaatgtcaaacagtgaaaaagtggatctttacaaaattttacaactctgtaaattcttatacataaacaatacaagatattttggtactaataattaattgtcagaaactacaagaaaattttcattatatttctcaaaatgaaaggaagatcgatcaacatatagaactggaaccatatttacagtaaatacaattgagaggatttcagtaacatcattccatcaattacacttttttttttttgatccagatccagaaacctatccaaacacccttttccctcaatctctccagatcaaaaaaaaaaaacattagagatcacaaaatttcttccaaatcttatttgggttcttgttattcaaacaaaataaacaaatcaaatcataatactctaaaaaaaccagaaaaagatccaacctttaagaaaaagaagaagaagaagaagaagaccctgttattattattattatattttgtactagtgatttttattcttccaaatcacaaagactagattgagaattcctccttccaattcctccaccaccaaccatggccaccgaagaagaagaagaagaaggagaagactgagctgaagatgaagcagcagccgcagccaccaaagccaaagacccttcactccaagcccttcttattgggtaagaaaccttaggcaaaccaccatgagaacaatggtttttcttcttattcttgctagattcgtgtaaagcacagctacaattccgatggtacggacggcgttcaatggccgtgtcacagcctgagatacacccttcgtagaaacacctgaagaacccatcagccgaagcacctgaggccatgtttgggttttgttcacacctcacaaaacttggctctatggcaaagaaaaaggtggacaaagctaaaactcacaagggttttgaatttatatatacataaaagaaaaataataaaaaaagattcaattttttttaaaataaaattaaaacttaggaaaaggaaaatgggatttttatttgtttttttggttgtaatgacagacaaaaagttagttgtcggctatcgtgctacgcggcatttaagcgttgaagaaggcgtgtcatgtggggtttatggtttattatggtaatttctttttttttactaaatggtttattatggtaatttggacttagttattcatttttttttgggtaatattgcagaagttttagcctattttttagtgggttttattatttattttgtttaaagtgaaataaatctcttttagccaaaatgttaggagagaaattttgatgggtgaaatggttaagttattaacaagatattctttggttcttagtcttagattgccccaaagttagtcactttgtttgattaatatatggaattgttttgttttgttctttttagtagagtaagtaatactttggaaaaatc

SEQ ID NO: 266950 - DNA, 1667 bp, Cannabis indica
tatttgactcttcttttttttttttcttcagatacatttatgtatcagtacatcatcttaatatcgataggaagttccactaaaaaaatctaattataaatgcgaccgttttgagatttgtatgtaaagcaaaagcagttaaggaaaatcaatatgtatatctttaacattaatttcggccggaaagtaaaggccttggcccttgtataatatgaatattattgtaaaaagatttctataaccaaaaaaaataaataaataaataaaattgagactcattgggtaatcacttgttgtgcaaggccagggaagacagaagtactgcaagaacacacagcactatataataattcatatacatatatttatataactgatatggccggttattatgaaatcatgatctatatatatatacacgcacacatttattgctgtgttttgttttcatggcatgcaagaagttcatcatattagtttcttgttacttatttttgttttggtttgttttttctcttttgtcctttaaaaaagaaactatttaattagaaaagaataaactaatcaactagctagagcaaagatcaatgtttttttgacacggttggaaattttaccagctcaaaatatgaaaaaatataaatttatacacgacataatataatactataaattaatacgacactatacaacaacaagaaaataagcatttatgcatgacacacgacacgacatgtcctatttacagctctagaaagattcacattattaagctagtgcaattgattggaattatgtaaagggataaagaattatatgatgatgaaatatgggggttgtgcggtggtggatgcgggaatccatctgtctacatttattttctttgtttatgttgccaacaaatctttttcctcttacttttctactttatcttctttattttcactgaataattattgtataagtatattgttcaaaagagtatatattaaaaagatgttagatagtctcagacaaggtggggtgactgttctatctgattcaatctggtcaataaaccaataataataataatggttgaaagattagaccaatgagttgatctttttggtgttgcgggggaccagatttgattgctatattttgtataatatatgtatctctatcatcatctgtacatttgacctttttgcctttgcattttaacatgtccattttagtttatgactactttaaaccaattatattctttcacattcttttcaccaattgattattaatttgtggactcatcgaatatatccgttgctcataattcatccacatgtaatcattaaacttattttgctattatagtacaaatgggaatacaatatatatttgtccattttttaaaacatatatatctattatcaatattaaataatatctcgatttcaaaaaataaataaataatacgataatgtaaattgcgcgtatgcactataaatttttgtattgtattggatagagtatttgatcattatatacattatgcttttctgtcatcacatatttaatataatttctctatatatatctttacttttctctcctttttctcaaataatataatataggttatgtgactctctttttcagcttaataaaacttaatacaaatatat

SEQ ID NO: 266951 - DNA, 1665 bp, Cannabis indica
ttaaaataaataaaaaaatcaaaaaacagaaaatcaaatttccgcgatccttcttctccaaccgccgaagaaaaaccagtttactttcctttttgcacaaaacttcagatataatttcccggaaaaatatcgattttctcagtgaaactagcaccgcaggtttgtatttcactttttgatttttatctctgtgtatgtgttttatatgtatgattgtttgttgcgaatttataatctatgttctatgtttgattataatattcgggttcatgaattagtcattgatattttagggttattactttgttcgtttttgtattgttttattttccttggctgttttattggccaattgacttgtgtttcattaatgtcgtaggtctttttgtgaagaaacgtttgcttgtaatgtgttttgatttattgagtaatatttttcagggatacggaattgaggaaatatagaaaaataataatggcctgaatcttgtaataattgtttctcaaggattttctaaggaagccgtgtgagggtttgtttctaaaaaaaggaacaaagctacatttcgggttctcgttgacaaaaatttgctttcattcatggtcaaatttgttatgttagtatatgtaaacggtcacattgctccatttccgtaggatttgatgcactcatacgctaacatgtaaaaatggctttcccagctgtgaaactttgcaatttaggttaaggaatcgagttcttgctcttactttttgtgtaaaggtaaaatatgagttccttgcaacaaataggtttatctcattagcttttttttgctctcgtcattcgttttcgagttacttaactattattcttatttttttttgggcacaaaagaagctgttgaccttctctgttagttcagaacaatgtttctagctgcatttgaccttttgtaactgtactgtaatcatattaaggattgtctcagctcattattcagttacacgtaccttgctgactaattttcacactcaccttgcagtttttagggtctggctgctgatgcttttcttgttgccatgtcatgaatagacaagcggagagttagaagttagaaggcatatcctggtaaatgagtggtacattattttcaacacattacatcgtaggcaagagcagtggttgttcaatactgtaatgccgtataccctgtgtgaagactaatcttcataaagaatacctttggagctactgaagaaaaatacctgaaaatagcatgatttttggctgcttctgtcatatttgtgaagtctgttaaagtgaacaaaaaatgatcaagcaagtcgcaccatttttttgcccttcaaatctaagaaagtttaacctaatgggatgcactggtagtttttattggttcttttttctttttactctagctgagtgctcaagcagagggaagacgctggtattaaacctgggttcagaatcaacatttgtcatcaattggccgatattcagtgccagcatttttgtacttgttgctcttgttctctccatgtatcttatctttgagcatctagctgcgtataatcaaccagaggtttgttcctatattgttgcagttgttgaggaaaaaatttggcttcatttttgtgtgatgctttttcaatttaacactgaac

SEQ ID NO: 266952 - DNA, 4730 bp, Cannabis indica
gtcgatctccattgcagccaagacttgagcccctgtaaacaactttgactatactcacactcaaagaataaatggttgcttgtttcctcttcttgtccacaaagtagacatgcaaatctatgattgagttgtatttacctatcctttctttagtgtttaatcttccccaaaacacaagccatagaataaacttgtgtttgagaatgatgaatctatcccaaacagtcttggaccaagaaatcttgtccctgctttcaaaaagaagttgataggtgtgttgaattgtatgcctctgctgcacaaaaccagcagcatccactttttgcttcagcttattcttcacccctacaatctttttccatgaccagcaacaatccaaaggtgggtcataatcccaccaactaccatgtttcaaatatacattatgaatccacttaacaaataggcaatctttcttacttgctatgtcccaaacataccttcccatggctgcaatattccagtttctgatgtttcgaaatcctagacctcctgcagatttggtttgacaaatattgtcccaagaaaccaagcctggacttgaggtctcttgtctgcctttccataagaaggatctgcaaacagcttcaatgtctttcagcaacttctttggtaaaatagagatttgagcccaataagtatgaatggccaacagaacagaattaatcaatgttgctctccccatatatgacaagttcctagaactccacatccgaatccttcctgtcatttttttcaagaagctcttggcattctcctctagatagcctttttagagcaaataggaatccccaaatatctaaaaggcaatgtgcttctagagaattttgatgcttctaagatcgtgttcacctccaattctggcatccctgaactatacatcgaagtcttctgaacattaggctccaaaccaaaagtggaagagaaaatcttcaaacctttgagcatgaacatagctgaaataaagtcaccattgcagaataccaacaagtcatctgcaaaacaaagatgatttagtttgaggcctgtacacctgtcatggaacttgaatcctggccattccccaatcttcttaaaaattcgagacaaatactccataccaagaacaaaaagaagaggggacatggggtctccttgtcttagccctctctttgcttcaaaaaatctacacatagagccattgaggagaagagaaaattttggtgtcctaatatagttcataattagttgaatgaactgtatagggaaaccaaaagcaactaacatctcctccaagaaatcccaatcaactgtgtcatatgccttccttaggtcgatcttgatcatacaactaggcttacaatttttccttccatatagccttaccaagtgttggcaaaccaagatattatgtgctatatacctcccatgaacaaaaccaccttggttttctgcaataagatcaggaagaattttcctaagtctattgcaaagcaccttagtagctatcttgtacaatacattacaacaggagataggtctgaaatcagctacacttttaggacaaaccgatttggggatgagtgtaatggtagtggcatttatctccttaaggattttcccagaattcaaaaaagataacacaacttcctcaatgtccttaccaacaatttaccaacaatcctggtaaaaggcactaccagagccatcggggcctggagccttgttcctagggatagagaatgcaacatcttttacttcctcagcagaataaggagcagagaggattccacgatgaacttcagtaagtttggggcccaaattaacaatcgactgatgaacatgtctcctattaggcaatgacttccctaacaatcccatataatagtctaagaatgctttttgaaccccctcaggattgtctctccagatcccagtttcatcttcaatggagaaaattttattttgtattcttctagctttcaatgaagcatgaaaaattgctgaattttcatctccatacttagcccaattaagattatctttttgagtgataaagagggaaaaggctttatgtacctccgtgtaatgttgatgagctctctgttcctcttctatcaaatccatgttcatcgggtctttgtgtaatcttgtttgtatatctgcaagggctgaactggctgctatatcctccttgtgaatttctgaaaagccctctttattcaacttccttaacacatcctttaaccttctcaacttactgaccacttgatacattctcgaccccatgattccaggatgacaagaatctgtcaccagattttcgaattgaggagcaagcttccacatattaaaatacctgaatggcttcttccctgtgttgcaatccttgtaaatagagaccagaatgggggaatgatcaaatgacatttcaggcaaaaaaaccgcttctgagctagagaaaaaattcatccaacaaggattgatcattgctcgatcaatttttgaataaattctctcctctagcttttgtttgttattccaagtgagaaaggccccataatatttcagatcttcaaggttgcattgtgaaatacaatccttaattctctgagaaggtacaacatgagctcttctaccaatcctctcattagcaaagagaatctcattaaaatcaccccataccagccatggttctgcaatgctagtggccaaaccttccaattcagtccatagttctcccttcttttttcatcattgaagccatacacacaagtaacttgaaatttccccactctctgttttggagtaacagtacaatgaataagttgacttgtgcaaagaccaatgtctacagaataaacatttggttgacaagcaactattattctccctttatctagccaagggttattattagtgaaccaccaaccttgaaataaacttgtatacaaatcacccatattcttattcttaactttagtttctaggaggctaacaaacccaacttgctttgaataaatcatattcctgatttcattgtgttttttatggttgttaatccccctaacattccaacatagcaatctatccattggaagtagagggctctcccccctctcccatattaactactccttgctcattctcactgtccaaatattggaatctattacatacttcagttccacctggctccttctccatgctcacttttttgcctttcataaccctttgaaatccctctgcatctttttcaatctgtttagtaacttgttgtttctttggaacccaaacttgtttcccttggtcattcttgctctcctctttcctacaagcatcagtactatgcccaatcccagaacagttatagcaaactagaggaatccattcatatttaacttctaattccacctcatggtcatgttcatcaatgaaatttatggtactaggaaaagtttgtgccaaactaacctgaattaacaccctcgggtattgcaatctatctctattctttgttatttcatccacttgcagaggctgcccaacttgttccactatcttgaaaggagagggctctccccaatacttgatatccaagcctctcaattgcacccaggttggaactgaggtcactttctcctttgtaaagtcatcaatagggttccatggtttcataaccataggtttcttatcaaagaacacatagccttgttgcagcaccctatctcgttgttccaagttttgaaacctgattatgaatatgcctttagcaagcagtcccaccttcaccaccatatccttccatagccttttagcaaagccttcgagaatagagattggaggattagccccaattacatagaaaaccagagaaggctgccaatagttcacctcatcctctatatcagcaaaactgatcttaacttttgaagttgcagaagatcttacctcagtctgctgaacagagttagcaaaactagtattcaagtttcgaacaataccagaacccaaaatcgggggagaagtcttcttcccagaattgacatcttgagtagttcgattagcaacttgtaaccaatatgagaaatcatgtctgatctcgcttcgcctctggaaaagggctttagtctcctcaggcgagtatatcttttcagcaaaacactgttccattgattcaaagcattgttccattggttctcgattctgttcatcttgtaattcctcctctgctatctctaattcctgtaccccaagcactgcatccatggatctggtcttaataaccctatccgatagtgtagtatatgttgttgtaacatttatttaatctttttattattattgttagtacatatattttggtaaatggtatatgtattttatgttatacaatatatcattttttaaaaaaaataatatttaagttctattttatactgtatttttgttgacatgatatataattttattagcatgctatatatttttaaatttattaattttaattatatacatttctattgtaaggtatatattttttattatatggtatataagttttattgtatagtatatcattttattttagatcatgtttaattatctattgtatataaatgtgatatatgattttataagtatgatataattattttatggttgtatataattttgttaatgtggttgtaacaccctaactaccttaggcg

SEQ ID NO: 266953 - DNA, 2066 bp, Cannabis indica
gttcttttccatcaaaattgatcttatgaaagcctatgacaagcttagttggcactttgttgatcatttctcatatatttttggggaagctaaaggtgtgtgaaattgtcttgtaaaattctgtgactggttgggacaacaagtcagctaaaaacctccattttttttcagtaagaatacctctgagaatatgaaggtggagattagaaatgctcttgggattggtgatccgaagggcaacatcaaatactttaacctcccattatttcgttctagatagaaggatgtagattttatctttattatggatagcttgacctctaaattgcaagggtgaaatcaaaaaatgttgtctaaggtcagtcgtgccactcttataaaattgatggggttggctatgcctgtttatgccatgcaaactaccaaactctctaattaccttgtatcaaaaaattgatggcttggtttaagatttttggtggagttttgataaagggaatcataggatccatttgaaagcttgggataagttgtgcctccctaaatcccgtggtggaattggcttctaaaaaactacagaaataaatcaagccttattggttaagtggggatggaaattacttgtcgaatgtcagtcattgtgttgcaagatcttaaaaggtaaattacttagaggtaaggacattctcaagtgtaaggctaaggtatcagactcatggtaaagacttctttttgaagtcaaatggtgtgccgactcatgattacagtaaagtggctgacctgttagcaaatactggagactgggacattcaaaagctactacacttatttgataatgaaactattgctgccattttgaagggggtagaccctctggtcaggggaatgatcattgggtttggactaaggaaggtaatgttcgtttctctagtaagtcagcctatttaatccaagcttcgcaacggacgccccattgtgaggctgctccctccctctggaacaagctctggaacagcaaaacccttaagcgccccaaagtcatgtggtgaagcattttgtctgatacgctcctaaaaagatcgaccttgaataaatgattccatattgtgacaatggctgcctgatttgtgggatataggaggaatctgttgagcacctctttctcaattgcaacttgacctcacttatgacactcatctccatggggtatcttccctgtttctgatacaggtattcgtatgtgagattgggtcaaatttatttagagtcttaaacacaaaggcataaatacatatgaggtcttccttcatgtatctattgttattgacacgatctagcgagttcagaatgataaggtacataataataagatggataatgtgaattaatggattgactctattctttactcttatggagattctaagcatcccttatcctttcccttcctccgacccattttgtcgactggtgtcctcttctttaagattggctcaaattgaagtgtgacgtaaaagtggagatggaacacatgtgtattgcagttgtagctagagaccaccttggtgaggtgatttgggtgaatacgacaaaattggcatttttagatgcactttgtggtgaggttgtcgatgtttgcttggctttggaggtggcaaaggataaaggctgcaagttcaccattgtgaaaagtgattctaaggtagtgatcaattctatcaatagcatggactctaaatgagaaattatgaattactcattttgtaaaaaaattatttcttcctttgttagttgttttgtagtactttaagagcttgtaattttatagcccacaatttagcaaagttgacttttatccacaaccaattcagacgtttatctatttcgtcaattgctaagagcatcttttataatgaccgcgaggtccaacatttatctatctaatgaacattgctgttcaaaaaatatatatatatatttaaaaaatagaataaaaatagaaatagaataacatttaatttgagtagaaaaaaccaataatatttttttggggctttttcattttt

SEQ ID NO: 266954 - DNA, 5072 bp, Cannabis indica
tcttcttcttctttcttctcatctactttatattattttatattattttataacaggtactacttgcttaatatttttgagctatgcggtaactcaatctctaaattacaacttgaggatggctcttgggtgcattgggatttagggttagcagaggtagtagctaattatttttcgtgacttatttggtgcttcaagtgtgaattgggatgagatggttgactgtgtacaaccatgtgtttatattgatcaaaataatgagcttttacatccagtcacaacagttgaggttcagaaggcttttttttcaaatgcaccccgacaagtcttcaaatcctgacgagatgacttgtggattctaccagaagtgttgggatgttgttggggaggatgtcgttggtcaggagcaaagattttttgagcaagtagtctttcctatggggctaaatgatacaaatgttgtgctaatactgaaaaaaaaagcatccagtaaatataggggattcgaggcctatctcgttatgtaatgttctttataagatagtctcgaagattttggctgataggctgaaagtagttcttccttggattattttgaatactcaaagtgttttttttcttgggtcgtctgatatcagataatatcatgattttttttttgaagttgtgcactacttaaaatgaaaaggagagggaggaatggtcacataactttaaaacttgacattagtaaaacgtatgactgaatagaatggggttatctttgagcaatcttggatagaatgggtttcgatggacattggattaattgatcatgcaatgtgtgccttcaatggcacacactttttgtttatggttgtagagagataagacatgttataccatcacgagggatacgacaaggtgatactattttaccatatttgtttatcatttgtgtcgaggggttttcagctcttttgaataagtatgaatcacaagggggtctgcatgggtgtagggtggcttgagtagccccaatcatctcacatatgatattcgcggatgatagttatgttttttgtaaggctattgagaacgaggtcaattgtgttatggcgattttgggcaaatatgaaagagcttcaagacaaagaattattttgacaaatctttggtttcttatcgtattatagatgaaacaatgagagatctcatatgtgataatatgggcatatatgaggctgatgacattacatcctacttgggattacataatactatggggagaaagaagactaatatcttggggtatcttaaagaaagaatgaagaaacatattcttaggtgggaaggacggtttctgtcatgagctggcaaggaagttctcttgaaaatagttgctcaagctgtccctaattatgttatgagcatgttcttgctgcccaaaaagacttgtaatgagttggaaagtctaagggcaaagttctaatggcaaacagggtgaagtcataagagaaacatcaattggttaagttggtatagaatgtaatcttcatgacaaatattgcaatgttgggtaaacaagggtggacattagcaagatttataaggtacgatactaccctactagttcaattcttactgtaactttgggtgttaattcaaatttcatttgacgttccatctttgaatctcaatagcttcttttggtaggggcaagacgtacagtgagtgatggatctactactggtataattaatgatccatggctatcttgtgttattaactcctttgtcatttcttcacatccaagactgttagataagaatgtagagagttttataagtacttaagggagattttgggatgctgatataactttatgacctttttgaggtgagagatcaagagcttattatgtctattcaacatacctctagtgtggatcaaaaaatgttggtcttggaagtttaatacacatggcagatactctatcaagagtgcttataggtacttacaagttctgaaggatggttggtgtgaagataatgcaacaagtttctggcataagttttagaatttgaaaattttgccaaaagtgagtaatatggtgtggagggttgtgtttgatacgctcaccccttgttatcagctgtttaagcaccatatacctattacttatgtttgttagctatgtaacctgtaagagaaaacaatcttacattgccttgtaatacacagttagcaaagttcttgtattgtctcataatacaaagatcttgcattgctttgtaatacatagttagcaataaatcacctcatagtacatacttagcgatgcatcttctcctattacacaatagtgatgtatcacctcgtactacacaacaatgatgaatcgtaatacacatcagtgatgagtcacctcgtaaaacacaatcagatgaatcacctcgtaatacatactcagtgatgcatctcctcgtattacacaacagtgatgcatttcctcctattacacaacagtgatgaatacctcataatacacatcaatattaaatcaccttgtaaaacacagtcagtgatgaatcaccttgtaatacacatcagtgatgaatcacctcgtaatacacaatcagtgttgaatcacctcgtaagacacagtcagtaatataaacagttatttatccttatccaaatgttcagttatatgtgaaacgtgggcattaactacccatcaattgtaatttttcactaagacaaggttgagtaactaccattatattcttataaatagggattcacttaaagggaaaggggagagaattctgatttacaaaaactttgtcaaattgtaaacacaaccaaaactaaaaaataatgttgactcgtggagtatgtagatttaactacaaagccacgtaaaaatatatggtatttatttatgattctttgtctattattttcttaaatttattcttgaactaataattttcttagattaagttgacaaaaaatcgcgtcaacaaaattgtttcaaagtgcttgccaaatcggttaagtacttatttgggtttggtgacttctaatttccaaagtgctttcaccaaaggaaggttaatacatgacaatgcgattgttggctatgaagtgctctattgtatgtggaaaaattagttagaaatggggggaagatgcctctaaaacttgacatggataaggcctataatagggtcaaatgagttttctatgggctatgatgcttaaattaggatatcatgtggattgggttgacaaggtaatgtgttgtgtgacctctgttcaatttccctttctcattaatggtgagattcaaggcaatgttttcttgaagtgggggctacagcaatgcgatccgctacccccctttttatttctcttttgtgctgaggcattctctaatcttatttaacacgaggagctggctggtaatttaaatggtctaagatttgggtgtcaaggtttattagtgtcacacctctttttgtggatgatagtttggttttccttaatgctttagataagagttgtcaatgttttaaaggggtgctgaataagtatactaaggcttcgagacaagtggtcaattttaacaaatttgaagcatgcttttgcagtagagtaaaggtaggacttcgtgtacaatggctaatttgttgggggtttaagtggttgaaaatcatggtaagtgcttgggcttaccctcatttgtgggacagaacaagaaatagatctttgatgttatcaaaaataaggtgtggaataaattaaggggaaggaagaattcgatgttttcaacgactggcaaagaggtacctattaaagcaatttttcaagctatttcaacgtacatgacgagtagttttaggctgctaaagaacacaatttcaagtcttcatcgcatggttgctagattttgatggagctcataaaaaaaattcaataaaactcatggtgtaaatggtctcatctttgcaaactaaaagaccaagggggttgggggttcagagacggaactgtccaaatcaagctttactagcaaaatagatttggagatgtattcggttccctacaaaactttgtagtcgggtattgaaagcttcttactttctgaataaagtagtttgggagggtaagtgtggctctcgtgtgtcttttttgtggagaagcttggtttaaggaaagtagattattttaagaggttatcgatggagggtaggcaatggtaaaaatattcgtgttttggaggaccctttgttaccgagaccaatgagtttcaagatttatgatgtgccattcttaccgaacaaattccgttgatatcaaagcagtctttaataatgaagatactgagctgattttgaaaattctttgtgcagagagaaatagaagataaaattttcagacactatgataagaatggagaatattgtataaaaaaatagatatagaatggcgtgtgattaatgcgggaagagcagcaatcagatggaagttctatagtagcgtggtagaggaaattatggaagctaaaaatttcatccaaaattaagcactttgtgttaattatatttttggtatctttaaattgacaaaatattttataatttaattattaattttagctgagttgtattatttatttctatatagttgtatttaattgattaatttatttaaggtataaaaagtgtctaacttttatttatttagaaagtttgtcataaaaactaaattttgtgaataaatcaatttttatctctctgttaatctaatcctatatgactttcctatttggattgataagatttttcgtgaagaaactcgaagcaagacttcattttctataaaaagaaagtcgtaattactactcacgattttgtaggggacagaagcaaaaatttagggttgattgaagatctattttaggggagtgtctagtgatctgtgttcttgttcagatcgtgtatgagctgtcaataagatgtatattaattataaatatatcttataacagttaggtcttgcattttttccattcactttcaatt

SEQ ID NO: 266955 - DNA, 1287 bp, Cannabis indica
gttgcacctagtgtaggtgtagggaatgtgtttaagtcatcatacacaataatcttcacttgaagtctttaaatgaaaatgagactgtcatgtttagattgatcacaacacctccattatgaatacaactgcaaaacaaattagcatttcaaaatggcaaattggtttatgcccagaattttatatcagataagtcttaatttgaggacaacacctgacttgtcatgggattgcctttcatttttacccttcatgaggaaaataacatgaaatccagttagctaattcctagtttagtgatattccttttcacttatttgccatattagaactgaaaatttatttattgtttgctggttacagctgagaaagaagaggacaacagcaagaaggagaagattatgactgctaccaagaagggtgctgctgtattggaccaatggctacctgataatattaaaacacagtatcatgtgttgcaagtagtaagtctagacattggctttctttctttcttcttttatctttacaatttttatcttttagcttctatgtttagttttggactgaactatgtttccatacagggagatgacatttatgatgccatgttgaaccagacaaatgttggagataataataacaagttctatgtgatccaggctcttggttagaactttgtccctaatataaaatttcacttactttatttaagacgtatccaattcagtcttgcagaattgagtttcaagtttcaatagtagggttgctgatataatgctctagttagtgttttgacttcttggactttagtacttacatttacctcttttattgagtcttgacatgcattcatgtcctatgctgatttatcggctatattctaagttttggtgcctttctccatttcattttcacctcaatcttacttgaatttcttttaaactgctgcagaatctgatgatggtggtagattcatggtttattttagatggggaagagtaggtgtaaaaggtcaagagaagttacaaggcccttacacatcacaagaaagtgccattcaggaatttgaacaaaagtttcacgcgaagaccaagaatcattggtcagatcggaaagatttcttttcttacccaaagagctatacttggttagaaatggattacagtgaaaatgaaaaagaatcaagtgtaagtttcttgacacttagttctttgatatttgatttttttcaagtgcataagacactcagtgtgttaagtaactggaaaccatctctctctctct

SEQ ID NO: 266956 - DNA, 2278 bp, Cannabis indica
cactaataacaatcaatgaaagcatgcctttggtattcataagcaaacccaaagccaaaccatcacgaaaactcatctcattcaaccaaacagcactaatcaatgtactaaatatcttaacccaaaacccaacaacaacaaccccaacaatcctccaaatcccaaattgtccttcgaaaacatcttgacgattcgttctcaacccaacgatcaagaagaacagcggaatcattatccccgaaacgaaatcttcaattctctccatcagaatcgttttcagctctttctgtttcggcataatcaatccgaacacgaaacccccaattatggagtgaagtcctagcgaatctgttatgtaaccgaataatactactccggtcaacacaaagtagatgttgtaatcttcttcctggttttgtttacgtctaagaatccagtggaggatcggtcggactgttgttacgttgaagatcaagaagattgaaccaaatatgattgtgttaacgtgaactcctttcacgattgagagagttacgacgagaattatccatgagaaaacgtctgttacggcggcggctgaaagggctgttcggccgatttcggagtggaggagcttcatgtcttcgagtacttgagctagatctgggaaatttgttgtggagagagctattccccaaaaaattggaccgtatttagctgctattggaccggaatccatggcgtttccgacgaacatgtagtgtaaagcgtaaccgaccggaaaagggagaagaaatccggcggcggcgatgattaaggcctttttgggggttttggaaatgggtctaatatcaatttctaatccaactaaaaacatgtaaaatattaaccctaaatgagcaacagtttctaaaatcataaccccactttgagggaaaaggaatttgaatccaattggggttcgagcgattccactcgaacctatcaatgtgccgccgagaatttcggcggcaattcgaggaagacgaaggagtctaaagaaagagattaagagacgattaacgcaaatgattaaggctaattgaattatgaataacttaaatgatacattgttaccactatcaacttgccacaatccatttttttgggtaattctttgtttgaaacaaacaacaatgtaattcaattcttttccctttagacaccaatcgctttcaggattgagagttgaactattgcataagaaattcgcatccatcgaaggatttgatcaccgatcgatggactgacgatgactacgacggtgatagcaattgctaccaccaccggtcgatgatttttttttttatggattgaatcacactaattatcaaaattctattagggggttaatagagaagtaaatagtaaatggtaataattattactagagtaaaaattgagaaggtgtggattatttgtctttgttttttttttagaataaaaggtgttgatttgttatatatgggtttactattataaatgaggttgggttttcttttccttttttttaaaggttgaattttgaatattcttgtgagaaggagcggttaatttgggacaaataacatttttaattggaattttagaaaaaggaaaaattatcatttcatacatagaaaatagaatatgacaaaacaatcgttactaaaaaacctgaatcaatattaaaagaaaatcttcttatttgagaaatatgacacctccttattccttaatatagtggtgaagggactatatttaaggtttgactcaaatatttataggtgtgatttaagatacatgtaaattaaattatgtaaaaaacaaattcattaatcaaagaggactcaacctaaatttagggccatcaaacaaaggtcttaactaatgtaaagaattgttaaaaattgagcaacactattactactttttggacaaaaaataaaagtaacatcataaaaattattaacaaacaacatgaatattactaagaccacgagataagcatttcgcaatctaattcaagtgagacgtgagagtatcccaattaaaatcaaagacgaaaactacgaagaatagcaaaagtctcaactgtaatcgtattgttatttattattagagtattattagggaaacttacaaaaatactggaattttggttaacttttacaaaaatactgtcacacgaaatttttttcaaaaatactgtgtttttataaaacaccagtaaaacacaaagcagtataactcaaaacaacagtagaacactagtaaaaca

SEQ ID NO: 266957 - DNA, 2684 bp, Cannabis indica
aagaattttagttatataggcacacttaatatagaatagatatatttatattctcatgaacgttttcgtgataccattaaatgcaggtgccacaattgtcgtcgtctgaggaatttgatatttactcaaaacgttttatgatatagtatatattaattattattgcctgagttctctgtatgtactcttcatgatgttggtggaaattaaacaatacgaattaagctatattaaataaatttttatgcaactatataatagacttatagttatttatagtagaactctgtgtaaataattaaaaataattgtatttcaaatgctacttcgtggaaattataaggagagattcaagcttattaataataataataataataataataataataataataataataataataataataattgtaactatttcgcgtaataagcccataataatatgagaagtgcttatttgggatttgtatcagttatgttctaactaactacttttgcattttaactgctaaatcctattgtcttttttcaaatctgttagctataaccgttccctccttccttctcctccatcatctctaccgtcggcgtccccttcaaccctcgcctgttttccttttcattcccatggatccattgttaaaggatatgaataacaccctctcactcacagatgaagaatgctccatcttcaccatccctgagtactgtcccaccccaatcgaaagcaactcacccaccattctggctagagttctcactcacgagactgtatacaaacaagtcttcaaagatcaaatgtccggatattggcaaggttgttttcccgttttgattactgaatataaaggtgaagatggtttgtttcatatcaagtttggttgtgaaggagataaacgtcgagttcttaacaaagaaccatggcattttcaaaaccatctcattatatttatggcgccgatgttctgcaaagtgtcacaaaggaaaatttgatttttactccattttgcgtacaaatttatcgacttcctttctcaagcaaatcaaaagcgttggctgaagcacttggaaatattattggagagtttatagaagtatttgatgattccactaacgaaggttggggccctttcctacgtgtacaggttaaactttgtacaaacaaacctttgttgtgaggccaaatgatccggttgcctagaatcaaagatgaattttgggttgacttccgctatgaaaggcttcccaaatttcgctttgaatgtggtcgccctggccacccctttgaacgatgtgttgcctttatggagcgtatggatagtggtataatgaggatgactttcaatatgggccatggatgaaaggtgctaaacttccaactaatggctatgatcattatctgactttgcaaagggtaatgcttggcctcttctcactagattagctcgcacaacttttacttccacacttccaatgttaaacaaccgcaatcagcctcaaccaagggtcctttatgcgagggaaacatctaatcagtaggcccataaccatagtagcaaccttgcatcaaccaatctcattgtcacaactaacacccacggtatcatgccctccttgcttacatccactgctttgacaaccattatctctaatggcgaaaacaatctcggttacaccaactttggcaccagcaactaccatacaagtcctcaaaccagtacagatactacccaactcgacaccagcaacttcactcctaaaattatggccaacccgatttacacaacacatctacaccaactaatgcacaaactagtcaccaacacactagccatgccaacttcccccctttttcttctaacaccagcaacttcaaaaaccaacatcaatacaccaacaccagcagccctttaaaccaactatccatgcctccaaccactttcacccctactagcaactttgattccctgccatctgattcccatgccagcaaactccaaaaccagcacccttacacataccagcaactccacatttcaaccaactaacactcacttcagtcattttcaaagaaaccagtcaacactccaaattctgcttccaacagcgctctaccaatggattccacatcgagttcccataataactctgaccaatctccttcccaaaaagactctatctcagaccttacacacatttacatacccgatctcactgccagcacttttactacatatccacctgtactaacatcaattcccattaacagtaatctctcctcactctctcatactcaacccatgacacctttctgcacttacactactgccaaaatgtctgtagcaaaagaaaatcagccaccaagtaccaccttcaagaggcaaaatgattctctatccatgaggaaaatgttaaaaagatgtcgtaatgtccaaagatcgtcatcttctccgttgtcaagagaggatgatattgagacgttagtttctgactttgaggattctagcttttccaatgacacaagtgtggcggtttctaggcaaccccggccgcaattcatcatgaaaatcttaaactagaatgcacggggtttggggaacccgagtgcattcagacaccttcgatttcttgttcaacattaatcgccccaaactttgtttcttatggaaaccaaa

SEQ ID NO: 266958 - DNA, 2608 bp, Cannabis indica
agaattaaaatattttgtaatagagtccccccttgtcgtatctcaccaagtttgagattcatctcaaacatttgagattggttctccaaatcagattacatctgaacaacattctcccacagatccttcgctttagggtaccacatctagttagaactaatctcctcctccatggaattcacaagccataccatcaccattgaattctcagcatcccaggtctcgcatgtcgaatcctcctctggtagcttcttcttctcacctgtcaagtaccccatttttccatgaccacgcatgtacatttgtaccgattgtgaacatcagaggaagctatcaccatttaaccaaatggtggtgatttggacacagtgacagtcaggactcagaaggaatggttttggctgaaacagtggcagatgtcactggaatagtggtagatttggctggaatgtttgttgattgatttgaggcgtcagacatggtgaagaaagagaagaaaacgattagagttagggttaggaggcggctggctttgataccaagtcaaaaacgggaaaggtatattttctgatattgatttctgtacattaagattataagagtctacataaaaggaaacaaatcaaagaataaagaggaaaccggtccctttcctaaaaccctatattacaactttacaagatttatttctaatatgtataaactgattttcctacacctctaccttgagaaaagcattgacgtattgaaatatctggttttgaacatgcatgcaaatgaactcaagagagatacttaaacatgagcagggtaaattgatagaatgtgtctttggtatgcacatagcaaactagaatataaggtttgtgcttaactcttatttacgttatccacaaaattaatgtatgtagtgatcatcttagttggatttgttgaagatacatattttgtatttaaacatcacttgcacttgagtttacatcttattgggcaataactccaaaattttttttagaaaattcatctgaggatcggcatgagagttggaaccagtcttcaactaaaagtcaactaaagatacaggcctcatcccttccatcacaacttccacatagagctgatcaaccatcttgcactggtaactatgtgatcattgctaacagtgcatttagatatttaaagatttcgtttattttaataccatagttttattatttctggcattgcctaaattggtccaaacaaatccttgcattcttaactgtagatgtaattaattactagagtcatgttttttgacccgcacttgatgtatacctgttgggcattgtatctcatttatgtttgtattcattgaatttaggccttcactggacagtcttgcgtataatataatatctgagtcttgtcagtcctagttgatattctttttgtaattaccttttcatatagaatgcagtgatgatggatcgcagtacccaagaatagaatttcctggtactgactttaagccgttgaatcgccaggtaaaacaacctttactttcgactagaaaatcaatttctaatgtttttggttctacatattatatcaatttatctttatttttttctttattgtttctcaggatggtcagacttgttcctaccatgattcaagtctcaatccacgtattttgtctaatggatcttcagttgcttctactaatggaaagtctgcggcagcatcaaggtctgcttcttttaatggcaatcaagttgttgctcaaagaaaattatacgcagagtctcagattggaaggtccagtttccaaaagcttttagagcctaggcctcctcagcaatctggcattgctccttatagaattgttcttggaaatgtcaaagagaaggtactctactgtgttatctttaagaccctttaattataagaaatttaacttgattgactgtgaggcctattgtttgcttccgaatggtatgggaaatttctgtgtagtttttgctaagtgcccgatttgaacacctatttaccatgtaggtttgtgggatttgtggtaaatagaagaaatggggccagtgatggtattagatacaatgatgtcagatgttgacaatacttgatattttctgaaagtttcttttcaaacagtttttaagaatgaattgtaaaggcactggcagccagatggttatgaaaattataatagcgtataagtttcattacagaatttgtaaacgtatttccttttgcgctaattatgtgcatgatctcctaccatgcaaactatttgaaacgtatatttacagaattattatgtgcatgcgctaatatcatagaaaaataagtactgaattctatagtcacaataagactgtaaatatacctgttatgtcctgttgttcagcttgtgaggacacggaggcgactggagcttcttcttgaggatcttccatgtgagtatgaaccttgggattactatgagacatctgatcaacttttggaacccctacttctgtgctacgagtctctggtattctctctttctcaagaataccaaattagtcttttgtaacatttacaataacttttatactagtcttttgta

SEQ ID NO: 266959 - DNA, 597 bp, Cannabis indica
atgttgcaaagtagattacataagtacctaccagaccaactatagcattggggtcaacaatggcagtggggtggatgaaggtggtagtagatttggcaagttccagactttcaacatctgcaccaaaatgacaagagaaaaaacaaggaactcataaaccctccaccatcgcagcccaaaactaaatattatacaggaaaagagagagaaaggtgttactttgaacggaggcggagaagggtcggagagagagagcggtgaaaggagaggaaagtgggtttgcggtggtagctttgaagaggcgacggaacatgtctgtgtaggtggaagagtctctcactcactgtcactcaagtgtcaattgctctttcgcaaaaaagagaacagagtaagtgtgtgcgtgtaaatcttttccttccttgtgattggatttgaaacaaaacgcctttcttttggggatgtatttgtatgtatgaattattgtatatccgaaccatcctctttccgatcattttcgccttttttgttttttaccacaatctagttcctcgactctttccgcaccaacatagttcttgttttttttccttttttttt

SEQ ID NO: 266960 - DNA, 1133 bp, Cannabis indica
ttttttttttttttttatttgggcttctgatttgatgtttgtttagctagttttagcacgtgagataccactcctttcccactttgcctattcctttgtccaccaaccagcaaacatgcaaatggttcgaggcccaccaccacactattcattttagactacttttgtttattcatttcttattttatttatcttttcattttgttggattgtggagggtgtttattttagccattcttctttttcttttttggatatggaaaattagaaactagaacctgtctggcctgataggctggatatatagtataagcctcagccatacaaaatggggattctaaatttatatctggataattggactgggaccactgaatcaatgaaaatgagcatgcggataaatgtgacgaccaatacaaccgtgaagtccctaggttctatcagcaacaacatgatgttaaagcggagataaggctggctttctcaattggtcttatccaagaactcactaattctacaataaaaattatgttctgcccagttggggctaacttgggttgcagcctcctccagtcttatcagcccaacaactacaaggggtccaacacgcttcagccacgactgctttgctggaaaagacatttggcaaaatccaaatggccctactaagtccaaacatctctgtggcttttattagctatgatgtgctttcctgggaatggtattgtgaacgactaaataaaaaagtgctgctcattttactaacaaattccttggtaattggtttaagctcaaaatgaacgagaatttaaaaacttgtaattatatgactagaggaggtcatgtggacatagaagaaggtaaaccccaccactccatctatccggaactgcaagcaacggcaatttgacgataaaacaaggagaaaaagagatggaaaaggcacagtgactattacttttggtccactaaaaggaactcgataattcatgtcttagcattggatgagagtgctgaataagaagcactgaaacaaagactgacatcttcactggacacagaaatggtaaatgtagccatgaaaacgaacttcatatgccacagcaatgctaatgcgcataacacctaaattg

SEQ ID NO: 266961 - DNA, 1458 bp, Cannabis indica
agtaatcttcttgggctttaagaaaatgagaaaaagctctctcctcatcatctttgttcccggcaccactagccaaactctcatgggaattagttttactcaccaaatccaccacctcacaccctttcccacgtggcccaccatttccatcaaatctttccttaccaattaaatccatagtgatagccggcctcactaaattaatggacccatcagtccatttggattccatctctttcccacggcccagcccaccaaccaaagcaccctcatttagtatatcaataattcccctgaatacaatcttatgagaatggtcaaataactttaggaagcacaagtaaatgagacggcttaattaattagaagttttatttttctttttaaatttaaaagtataaatactaataattcaatgaattcaataagggatcgatcgaaactagaagtcttaaattaattttctccgtgtgaacttttctctatctaataataatctccgtctcttttcttcgaatatctcgaaaaattgtttctattattccgattctgcccctgatccccgccattatttaccgtcggcaacatgaatcctatgatgctggtcaactgcgccggctgtcgtactccgcttcagctaccgccgggagccccatccatacgctgtgccctctgccacgccatcacttacatcgccgatccacgcgccgctcctcctgctcaaccatcgtcaacctcactttacgcgccgcagcctcgtcaaccggcccacgcgcctcctcccccgtctccgtatggacacgcgcctccgggacctcccccgaacgcgcatgggcgcaaaagggctgtgatttgtgggatttcgtacaagttctcgaggcacgaactcaaggggtgcatcaacgacgccaagtgcatgaagtacctgctgatcaacaagtttaagtttccgccggaatctattctcatgctcacaggtacgtcttttcgtatgtgaatttacgggcttcgatggttttgtggtttgtggttgttggatcgaatgagtatgtatgttgggtttggttagaacttagaatttgttggtacttggaagaaaaaaaagaagctttttgacgatatggatctttaaagttttgaaagacaaatggattaatcaaacgaaggtttaaacgttgaaaatttactgatgtttctgtgcatatatgtacatgtagttgattgaggttttaagaacttttgggttaggtaaggaattttttgggtcataaaagttttgaatgatcccaaagttaaaagaataaattttttgaatgcgataggcatatggaataaagaaaaaagggttaatgatttagttattttttttttatttttgagtatttctttctttcatgggatacaattttggggtgagcttgatatggctggtaatgattggtagcaagtttgctgaaa

SEQ ID NO: 266962 - DNA, 910 bp, Cannabis indica
tttaaaaatatacataaaataaaacattaatttttgtagcaaaaaaacatataaataataaatagtgtaaaaagataatttctctacaaattttgaaatgaaaatatttactaatagtgttataatttaaaatcatttgctataatttccccttataatatcttttgtctggccaatttcactacacaaactccacaccattaaaacattctaaaagcttcaaaatgccaacaaaagtgaggtatattcccaaatgaattgccactttcctctcctgaagcatagaaacaccaacttttgaatccacctgaatcattaccgatttccattccctacttttcgcaagaaccagagccaagcgagcttcccaaccttttaactctgcttcaagcaccgtccctcccctagtcaccgcataacagcaacaccgagacccccatttccctaaagttctaaatatatcattgttgatgagatccatctcttcagtttaagttgtatggaagccatctcttcttgaggtcacttgagagtcctatgtcaaactcaaacaacattatgttcctttgcccaacaattattcagaagattcagaaaatgatattagcttttcaagaaccagtctttcttggttgatatattatctataaagttaacaacagttaaggagctgaccaagaacatgtaaacttatgtataagattttggttatctgtgaaattcgagtgtagagcattcccaacactgtctacaatagccgaggtagtaatggcatctaaccgtgtcaccccatttctgaacattagtcttgcaatgtgctgaaagaaacattgaaaaccaaaatcttaggtagggactgatactttaatatggactgttgtcatttctgaacctgcattgtgagttgcag

SEQ ID NO: 266963 - DNA, 2804 bp, Cannabis indica
ttttttttatatgtttctttattttagaaagaagactagagtcttcactcttcacacataactaattaaaccattattaattctataattaattgctcaatgtgttagtggctattgttaattgttcaaagtggctaattttattgtaaataatataaaatctttagctaaagaatgtatgagatgacacccatttatattttattccaatttaacaatttaaaatggctaataaaattatcgttgaagatcttgtgttttttggtagagctgttgtaaaagaatttgaaaccaattacataattctttgaatatatttaattgcatagtggataacacataattagtgtttatgcataatgagtcactcgtagatggattagaacaagtttctaaatagtttttatttaatcagaagaaattaacttatagttagttggcttatcttgttgggatcacatcaacgtaacacatattcatataataattaacatataatataacattatgttataattttttttatttaaatatgatttgatctataataaatatatatttattccatatctatacctaaccgcgtgattgtgctgtataaattaaagtaatttgcggtcaaactccttaaattttaaagtttggcacgattaatccctaagctgaaataattagggttaaattcctaaacttccactatcgttttgctttgtactccttccgtccactttagtatgttaagtgtcaaagtagactgccaatgtatatacaagtgtagacgtgccgaaattttattttggttcacctaatattaatattttaaacatttataaaaatattttagaacttaaattcaaaattaaaaaaaaaacaaaaaaataaaatattttaacttcttttattttttccttcttcttcttcttctttctttttccttacccaaaaaccttcttcttcccaccaccaccatcataacacaaccaccgaaaccaccacccactatcacttcaaattgtcaaccttcttcttcttcttcaatctatcaacaccaccatctacaaccaccgaaaccaccaccaccattgccgaaacattttctcagatcacaaaccccaaaaaataaaaaaaataaaaatccacaaaccctgcaaattgatttcagatttaaaatcacaaatatcacaaacaaaaatagaaaattgatcgagaaaaaaataaataaacatcaggcttggcgttgggattcatgagggggaatgtacctttgggttctatgagttctcaggttatgttgcctaaggtggcggtggtggtgaagctgtgacagcgagagcatcgagagggagaaagggaagctgggttcgagatttcgaggttttaggtttagagaaaagggattgaaggtccacctgagatttttgattttttaaattctaaaataatttttataatatttatattattaatattaggttgattaaaaaaaattggctacatgtatacttgtgtacattgtgacaactcactttagtacttaactgaccaaataagatggaatgagtataaagaacgattgtgaaggttaaatagtttagtcctaattatatcagtttaggaggttgatcgtgccaaactttaaaatttagagagtttgactgcaaattaccttataaatattataattttaacattttaaaattttatatatttgtttacaattttatatatttaaaacaaagacaaaattaaaaataaaaaaaattatctttataattttatatatatatatatttataaaaatcaaggcctttgtaaaaataaatagccaattaaactttttaatgaattataagttataattttagtttttagaaatatatctcaaatactaaatatattatattttttttaattttatttagtggaagtgtggtggagtggactagtgggaagaataagttcaagaacaaaagaagccattttttttttaaaaaataattattatataaataataaagtttgttcatacatctaatttttaaaatttaaaactaactaaaaactgttaattgaaagctaaaattataagtttgttccaattttatactttttcaaaaataaaacgaagaataaataataaaataacaaaattcatgttgaaaattttataaaaaatgaagacattttaaaaataaatagccaatcatgttgattttattttttaaaaatatacttcaaatataaaatcaattatcattgtttaattttattttcttattattatactggaatgaaagtgtggtggactagtgggaagtagttcaagaacaaaagaagccataattattttaaaaataataattattttaagaataaaaaagtttgttcaagtaaggttaatattgtaatttcagagccattaatgacagatctgctaaccgacaagtttgggtcggcaactgtcggccggtgaaccggggagacattaacggcgaaaattccacccctgattacaaaaaaaaacttttttttatttttaaatttaaaataaatacctttttttaatactatttttaaataaataaataattttatatacattatattacaacccaactctcacagacagacagttaatattttaatttttaatttccttttagcccctcaaataatctcgattttttcaactattttcctttaaccatttactatctcatcggagaaagagtgaaaaccccaacgaaggaaaaagcaaaagaaaaatcgccttcttcattatctctctctctctcttcgttttc

SEQ ID NO: 266964 - DNA, 1508 bp, Cannabis indica
ctttctgtgtgaatcctttagctacaagccttgccttgtatctaattggatctccatctttaacccttctttatgcttgaataaccactttcatgcaacatatcttgcctcttgtcttctcaccagtatccaagttctcttctttttaagtaaagtcacatcttcacccataaccctgttccattttgctacatttttggacttggtggctccttcataacagtaaggctctgtgttgttcagttccataacagtcagaaaagcataagccagcacttcattccagagattaaaactgaacattcgagtaggtttgggaaccctcttttctctctctaatgagctggtattcaatgatgtcttctgggttgtttccagattgattcacttttattttttccacctaacttgtgtcaggttgtgtcactctctgatcagcttcagcttgtgctagttccacctaaatagtttacggtggtataagtattgttatagtgcttgaatccaaattaagcgttaagcttatcaaagtccccactcgacactataaaatgtccctcgcaaaaccctaattctaattgaataaaaactaaacagagcaaatcctttaattattaacacaaaatttgttaattatcaaaatctaataatgacaagtcaaaataaataccagtgacgaaccactttgcatcgataacagcgagtagcagtggggaaataacaaacaacacactgatttagaacaaccatggaaatgatgttgtaatcggattccgcattcaccttgagctcagccctagccacctctttggaggccaaaaggaccaacctcctaatctcttccatcctggatacagaaagcctccattttttgtggaagccaaaattttgtttgggtttatttcttcgtggagaagagaaatcggatctcgcttgagccgttcccgggtcttgacaggagaataggcggagcaagatgggtttcgctgttttggggtaggggtacagctagatgtgactgattgtatgagagtttgagaatgagaatgaaatgagggtgagagaatgagacgagggttttgatttttatatcatctattgtctcattttagaactaagacttaagaggtttataagcttttttaagtgtcggttctaaactgagacaaaaggggtgttttgttttcaattttttcttttaattttttttaagtctcggttttagatttagtgtcggtttactgactgacactattgggttttttaaatgtcagttttaaactgacacctaaaactaagggtactctatagggtcagttttctaaattaaacgaaattttaaatgacaccaaaagtgtttttttgtagtagtgcatgcattgttagagtctaaagtacctacacttaaactttcattagtaatacaagagaaacaatcctctctaaatgtcacctctccattgtctatgatttatatccaccttattctctcacccacaacctgtacc

SEQ ID NO: 266965 - DNA, 2602 bp, Cannabis indica
atacttatttgttatatatttccttgatccttttcctataaaatcattaactttgtgctttttggtaggattttaactgatgcagtattatatcagtaggaatcattgtatgatgtctctttttcctaattttcttgtatttcttcttttaggggctgtttgagggtcttaaagcctatcggaaagaagatggaaatatactcctgtttcgtcctgaggagaatgcactgcggatgagactgggtgctgaacggatgtgcatgccatcaccgactgttgaacaatttgtggatgctgtaaaggccactgtcttagcaaacaaacgttgggtaatgttcatcttgaagctggtgtattgtattttgttttcttatgggattgcatttaagattaacaagtggatgatgtcttgtttcagattcctcctgctggtaaaggatccttgtatattaggccattgctaatggggagtggagcagttcttggtcttgcacctgctcctgagtacacatttctgatttatgtttcacctgttggaaactattttaaggtttgttatgtctgcttatgaatgccttttctttctaaataaatattgatgatcattcagatttcttgtcttttcataaaacatgtatttgtttattttgtattcatgcttcatttaaagttggactgttggcttctgaccaatggtccccctttccctctagcattttaatatttatgtaatttgttgacacaacacttgaatctttctatatgatgattttctagatcttacagtagagtaaatagattttaatgatttatttggtatgtaatgtttcctatcagccaatgatgttaagcttgagttataactaatggtgatgcatattgaattatccagatcaatgtacaagaaactaatattttacctactgatgttatgtgttaatttgcaacttggtaggagaacatattgtaatagtggttgcagttttgtaggatatcttgcctatttttccatttctgacctttcaattatcttataacttttctttttcattttagatgtgaagtttttgtcagcctatacattcatatatctatatacacatatttttgcaggaaggtgtggcaccgattcatctaattattgagcatgatttgcaccgtgcaactccaggaggtactggaggtgtaaagactataggaaactatgctgcagtaagatcgtcttctttgcttctttagtagtataagtttggattggttaggtccaaaattttcaattgttgcatatgttcttaaggttaggtcttgggccctgaatgttcagtttccttttcagtttcatttatcatttccttttttgttactacttatgactgtattttccttcatgtatcactattaagaatcagcagtatgtgagaacttacttctggttaagaataatgtgcaattggctaggttgttattgttcaaatttttcatttatttaagaagtcagccttgcccttaagtgactcaacttaactgaggaaaactgtgattaccatgtgctctccaacacaaggaaatcttttagtttacatggtcttaaatatgtagtttgtgcatttcacttgagccagactgagagaactttcgacatccaatccacctgtttaaatgtgaatagagtagacaaatagttatttactgtttcttaagtagatagtttgagttttgtaacagaagtttccctgtgtaattactgaaatactgatacatctcctttaaccattgaattgttgtatttaggttctcaaggctcaatcggctgctaaagaacaagggtattcagatgttctctacctagattgtgtgcacaaaaaatatctagaggaggtctcctcttgcaacattttcgttgtgaaggtagtatatgtctagatttgattctgtacttccctctatgacaaaatacaaaactttatgattgctacttttgagaggtaggaggataaagtagcgctagggaaaaacttgcaccaaatgagctgtcttgagttttaactgcacagcttgtactttatggtcctgaagatgtgattcaaaattacaccacttcatttggaacatactgtttgttgtaaagaataagtctttagcattactccaattttgaagaaatatttctccaagcaaactgagagttaagttttatgtctgaggaacatgcaaagaatgggcaagttgtttacccatgtttgtatatactaagctttttattagaacaatgtatttaatttattagtgtttattgtttttttgttgttgagaaatattagtgtttattgttatttagcatttacggaagaaagtagtaataattcagttagttggtgagtacctattctgtaggaaataatgggttacatgtactagacgctacctatttgtaggggttagtttagtggtatgatgtgatcatgtatgaacaagtggtccctattttctagtgattagtgatgagtcaatagctctatataaagagctctttctggctgtacgagggaatgcagaaaagtaagaaaagtttattaagtttttgtcttttgtcttctataca

SEQ ID NO: 266966 - DNA, 1188 bp, Cannabis indica
ttaagttaaattcaacttttttttgccgaaattttttttttctgctgatggaacaatctcgactcatataatgtaaaaaagagagatttttttaattagatagaaaaactaagtataaaaactcacattttcataatactacctatgaatgggtaatacccactaaaatacactgatatatatatatatatgtgctatatttgatttatataataaaggaataactgttgacataattgatgtgttgtattatgtgatcttttaaggtatcctttctagtcgtgtatcatcatgaatatgatcatatatattactttttaattgatttatatatcaaagtaatatgatatgtcaatctattctgtttatgaaaagtttgacaatattttgaatctttgatgttctaaaattaaattcattatgcttttcattgtctattcaattagctgaatttattttgatcatataatgatattttaattgattggatcaagttttaattggaaaaaactaaaatggaagcttcaaataagaaaacttgccataatagtgcacgattttgtaggtgtataaaatgaaattttgggccgattgaagaatttatttattccttaaaaaaaaaatatttaggaaacttttcctatgtgttgagaacaattgagacggtgtatgaggtgtctaatatgagtatattgtctataagtattcacattggcaactaggttttttatctttttcatctcttttgtattttcattcatattttgtagaaatagtgtatttgttatatagaggagaatgtgttcaattctacttctgcacttagtgtcctagtgattattttgagtcatcaaacaagtcagcaatggagaagaacaaagtgcaaaacccttagaaaaaggttcttcaagcttttaggagaaggtggttcaagtcttaccttaagaggaagcaaatacttttcaagcagatcaaagagagttcgaacacttgaaattaatttcagcaaggttcatttgtcaaggtggatgtaaagagcgcctaagattaatattttgggttattaaataattagagtttatgcatgagatttaattaatatttataaatgcatattgtggaaatatatttaagttcatatatatttattatgctattttatgtcaattactcaatttctgtgtttgt

SEQ ID NO: 266967 - DNA, 3171 bp, Cannabis indica
aataaaagttaatgtaagtctaaataaaaactctaacaattgtaacacatatttcactaaatttttttttatggaattttgaataatttacaagtatttcaaatattattcaaaataagtcattgcatcgcgtgcaaaatttgaatctaattttattaatttgaattatttaaaattcttttaaattagtaagatgcatgctataattataactataatgtacactgtcgtataaaaaaatatataatttcttcacatatcaaaaatgaatctctaccaatgcaaacaaaagtattgtaacacacttgctatacaatcttgttatgtatatttatgtcaaaatttgtcactatttttaacaataaaatttatcaatttaagtgaaacataaaacataaaccttttaaaatggtaatggttaagtcactttcatttgaatgagaacaaaaacaaataaaaaaatataacaaaagtgattgtcataatttccttggaaagggctattattattttaaatgaaatttctagtgttttatactagtcaaaattatttctattataaatattgctaagatttactcctactacttctaattagtctttagttctttgaagttttcttttgcactaaaataaattaaaacacttaatacataggtatgtcccaatgtcctttctaaaagtctctttcatcattttttttagagtggttggtggatatggcatttataagttctaacttcaaattaggttggtatggtatctctctacaaaagaataaaagcaaaaaattcttgttagaaatatttacaactaatgatgatttttatgttaaaacactaatgacctttgccatataagaaatgatattattatataaaaatatttacaacataaatattcaaaattttaagtttgtaagcgatgtagatttaataatttttttaacagcacaaatatttaatcaatgctagtaaaactgtattttttcatccaattttgtcagtatagactctgttagagtcttaaattgtaatcagacttagttttgaatttgataaaagaaaatttcaaagtaattaataccacatgtttttgtttatacttaatgatataaaatctaaaccttacatatagcttatttaaaacattaataaattttatactaataaaacgagccaaaaattataattttactgatatttggttatgccattgaaaaaattattgaattatgttgattataaatccaaatatatatttataatattagttagttaaccacataatacataatatatgttattgttatcaaattaatataaaaattattatatttttttttttactttgaggaaaaggaattcaaacttattaagacctacaaaagtatgtgaagaatgttacatatttaagttcgaattaagaaattaatgtacacatataattaattactagttaattagggatatagtgattctatcaaatatacaaaacatttatcaatgtacacatataattaattaattttataatatgaatttgcttttaaatcttattggatgacctttaccatataagaagtggtattaatatatatgtaggtggaagatatttggtagttgtgtatcaaaaacataaaatgatgtattaaatgtacatggataatattttatatgaatataattttacatatttggtagaaaatttgtgtataactacctactatattattcttatccaatataaggtgaattcagctaaaagtgttggaagatgtggatatttaaagctgcattattgtgtatttataggtttgattctttgattaatatgtagagaaagtttgtgtataactacctattattcttattggatattagtggtatttagtattttttataaaaagtgtttcatgattggttaataatattctctgaaagttattttcttaagttatacgagattcgatatctaatgacactaatagtagtatgacatcgaggagggtgtattaggcactaatagtacattttaataattttcatagacaaatgctaaaagatactgttgttgtttagcatcctattcagttttataccgctattaatgtaattaagtaataagtatcgagtcttatataacttaagacaataacttttaaaaaatattgctaactatttataaaatacgatttatagaaagtgtttgacaccaatgtctaataataatactcatgtatgtaggtgcatatataactaaaataaatgttgtttaaaaaggaaaaaaaaaaaaattgaattagaaagaaaataaatgttcaagttccaacataggctcatcactttaaactaagtaataatttaaaattaaattttattcaactaataaatatataaataaaaataatgggaaggtgcatattattgtgttgagacttcatttttgactttgtatctaacaataagataaaataaaataaatcacaattcgcaactatttattccaacatacaataatgcaaatgaaatacaatacttaaaataaaattctcaaaaaaaaaaaaaaaaagaaaagaaaagaaaagaaattgttgtaagaaggaatggaaaatattattgttttccttaaggtgcaattaagtagctactctatatgggaaagaaagatggaccacacacacgtgccaagtaaaaaaaaagggaaaaaacaatagttaaacaaaaggaaatacaaaataatattttttgaaagagcataatatttttgaaatacaaaataatatttaacataattaattatggtttaatatccctaatcaaactcaatgggctaagaagcacgatgagtttagtgcaaagttcttgaaagcgagaagacacgaaaggcttggtcaaacagttagcaatctaattcgtggagggaatgtaagtaagagacaaagtgtggttgttgactcgttcgcttacaaagtgataatcgatttcaacatgcttggttcgaacatggaaaaccgaattggaagcaatatgaagtgaactgatattgtcacaatacatggtaggagcagaacataaagaaatgccaagttcagttaggagagattcaatacaagagacttcagaagcaccattggcaagagtgcgatacgagatttagtaatggaatgag

SEQ ID NO: 266968 - DNA, 2319 bp, Cannabis indica
gaaataaaaaaaaaaaaaaaaaaaaaaactaagcctgtttcttattatctttttctgatgcgtgttaatccccctaaattagggatttaattgaaccataaatgtatttatatttatggaaaatatcttttaagatcttgaaagctacattatcttgctcggaggattttgctttactgagtgatgagaacctattcagacaaccacatacgtgctttgtccggataatacctactaaaggtttaaacttaattcgcttcatgtaaaacactctagatagactattggaggacaaccatctgtccatgctttgaaaatgttctccacgtatcactcctactaaatatcacatcaccttatgcagaaattgggataacagaatatattggtgtaattgttatacttgttttttgagctagaaataattgagtctggctacacgacacgtgtaaaaaataattaatgactcataaataataagaggcatctagtaagttaacaaaatgatgaaacacgattaagtataacaatgttatccctaatgagcatttcaataaacattggcagaattatgttaagacttggttcaaccaaccagcaaggaatactaggagaaggattaattgggatgatctaataaataaaatttactcatcacctcgaagaagtagtaatcatatatgttcacgatacaaaattttattcagaagatagaacaacctctgttttctcaagattatacacctatgtgaatattgcaattgtattctgctggaatataatgtattatgaccaactcaaaggccgcttatttattttattttgaatataagtggttatttgtattttcccctcccgcatactaaacgtgagatataaccttatgatttgtaacttctcaaatatagttgagtaactgctatcctatttttataaatagtaatttgatacccaagaactctatcaaaatttgtactcacaaaaatactcaaaaataacactgatttgtggactaggtagattttagctattgaaccacgtaaaaatcatgtattctttattgatttttgcataattattattttcatcttataatcaatttgaatttttttattatttaaagtcttacttattgttaatggaataagaatagtaatattaattttttatttattattattattaacattgatttgtttggtttgggatgtgaatataatgaaataagttatattttgacaaaaatatcattactcaaatgttatgagatactctcaaattacacacaattattacatataatgatgtgtaattaatctcaaccacacaattaatggcgtgtttatttaaaaggaatgagaattaatggtatgatattgattaccatacaattatttactaatttttgaaaagggagaaagtagtggtgcccacacaaattttaaagaaaacaaaagaagaggttcttcccccatttttatagtgaatacctttccctttcctaacttagtttattttaatatttatctaaacaaaatagtatgattttgattttctttcttggcagtttactagacagcataataaaatattattttcaattattttctattttaaatctattcatttatttcattgattattctaatttcaattacagtttaataaacgtgccctaaaagtgatgcaattcatacttaatgatataaatggttaatatttatatactttattgcatttaataagtgtatgccatttgaatgtgtatctagcattttaaaaaaattatttctcttataaataataattatatgaataaacttacatgaaaaatagtatgttaaaaagagggaatgtccatgaattaattagagaaaaaaaatatttgagtaatacttcgtagcattagtaatggaatcacctttctctacatagatagattgatgcatgctccatccattttatgtaacatgtattacactggtttaaaaatttaagcacacaagtgaattgtaactttcatatcattaccattacaatttacccaaatcaatcaccactatatttacaagtatgaagagcaaaaaaaaaaaatgttaatgatttgtgcagctgtatttagtttgatggatgcagtgattgaatggcagtccaggatccacaggttgcagtctctcccacctaaatttgagcactttatttatgactccgactcattatttaaatttaaatttaattttgtgcactgtgaacggctcactaacatatggaataggtgttttaaagcacgttaacatttaaaaatatttctttaattaa

SEQ ID NO: 266969 - DNA, 1123 bp, Cannabis indica
aaaaaaaaaaaacttgaaaagtaattagccatggcgaagtgtttcaatgccgaaacccaaatctactcatcgcatagacctgccgttgactttcccactgatcccaacctctcgttgacctccttcctcttccgatccaccgcctcttacccaaacagaaccgctctcatcgacgccgattccggccaaaccctaacctttctccaactcaagaccctagtctccaacctcgcccactccttgatcaagctcaacatcaagaaaaacgacgtcgttctaatcttcgcccccaattcaattcatttcccggtgtgtttcttctccgtcgcctctctcggcgccataaccaccacctgcaacccttcctacacttggacagagctctccaaccaagccaaggactgcaatccaactctcgtcataaccgtcccggaattatgggaaaaggcgagaaacctcaatctgcctgcgataattctaccttctcagtcgaatttgaacttacattgcttcaacgccgaaatctggttctactccgatttgatcagaaaatcgaaccgattctcagaactcccgatcagtgacgtcagacaatccgacgtggcggggcttctttactcgtcggggacgacggggaagagcaaaggggtggttctgagccataagaacttcataaggacgtcgttaatggtgacttcagatcaggatcggtacggagagggacaaaacatgtgcttgtgtttcttgccgatgtttcatatatttgggctttcggtgatcgtttacgcacagctgagacgagggaacggagtggtttcgatggggaagtttgagttagagagttgtttgaggggtgtggagatgtatagagtgactcatttctttgtggttccgccagtgatgattgctttggccaaagagagtgttgtggttgggagatacgacttgtcgtctgtgaaggagattctctgtggggcagctcccttgggcaaaaatgtcatggaacagtgcgctcggaattttcctgctgctgctgttattcaggttcttttattttgataattaaagatttgattacatgatttgttaaaattgtattctacgtcgaagcactcgcattaga

SEQ ID NO: 266970 - DNA, 1109 bp, Cannabis indica
aaaaaaattcaaacatctataagtagaacataaaaagaggtgcattatatagaaactgaaccttgggaacacgttctggattaggaaagcggagattttgtgcattaagcatctgccgttgtgtcatcagcatgtttttctccttcaacagtacgtaccatagcttttgaaggtcatcccaagacttcaagcgcagttcagatgctttccaactacgacctgacaccagtaaattaaagaagtttaagaaagtcagaatctatcttcgagaaaaaaatcaggtaacaaaatcaaattttttaagtatggtttgtagactcgtgataaaattggtccttctgtaagtaagtcaaacatataaaatattataccaaaagagaaatcattatcttgacatattatgttatacactataacttattaaataatctctcttttactttcatatttttcataaattagagccgaagttaatgaaatgctaaattaatcacttggagacatatctagtgtacttattgacccttgtatgattcaaacttgtatcatgcaatgttgaattagtacttcaggaatttgcacgtacttgacatacttttccggtttcaacttagatatagactttaatgtattaacaagttactgaactttctaaaccaaaaaactttacattttctttatttggttcactgcatccgaccatctcgtctaatataacatttgttccacattgcaacaaatttgctagcagtagtaacaatatttctcaattagtttgttcaaacaaaaaacaaacgcccttaaaacgaaaaactacggttaagatacagaagcatgtaccatagacaacaggcttctcatcttctgtgcttcgatctacctcaaagaactcagcgagggggttgtattctgtccttgctgaagaagcagcagctgctgctgcagccggagtctctgatttagcggcggcaaggagtgttctcccaaagtatctcgttagaaacatgactccaatcagttgctgcataacagtgcaagctatattagttagaaaacaaaaagacaagttatcgagaaaaaaaaatagacaaaggagctggctttttact

SEQ ID NO: 266971 - DNA, 1861 bp, Cannabis indica
gagccttcaagacaggaaggtgtggttgtcccaactgcagctgtatctgataaagcccttcctgaagtgactaagaaccaaactttggaggataaaactcttccagttatttctactttgactgctgcggcttctggtggtgttccttcatctgcttctttctctggttctactgccacagaaggtatcgctaagcaccatttttatgcaattgtttctgtcagttcttactctatgttccctcacctttctgtttctacaggcattcaatctacacctccttgtcctgttgaacacatgccagcaaaaaggtcaggtcgaaaaactccaaaccgaactgaagcaccacgtcgcagaggaaggaaacaagctgcaatagtacctcctccacctgatgctctggctggtcaggatccaaaattaagctctcagttgcagaataaatctgctgatacaatgggcaataaatctgctgccttgagaggtaagcaaggaagtgatacacaggaagttgctcagtctcaaacaggtgaagttcatatgactgctggtgtatctggtcatgatgcaaaaagaaaagatcaatcaaactatgccccacaagtgaaacagccaacaaaccctcaagcagcaattgacactgctgctggatttaatgataaaaaagttttggggcggattcaaactgcagatgtaaatgatgttgctcgtgtgatgaaggaagtattttctggaacttgcctgttaaaaactaaagcttcggagtctcatgggaaagagggcaaggctgctactaatgtaccattaacaggtaagactgtttctgaagtgagcaaaagtcaaactttggtcgataaagtgcagtttagtgcgacaatgtcagaaagagtagctgcattgcctgaccttccagtgaagtctgataaacaaactgggactgcagatgatacaaaagtagaggtggaaaagccttctggcccaaatgagaccgctgtttgcacaactgttgtggaaaaatcgcaagtcaagactgctgcaggtcattttgagaaaacaacagatccaggtcaacattcccaagaagatgctattatggctgatagtaaggaagtcatttctcctattggtgctgacgaaaacagttgtcagatgcaacctcctgcttctgatctattggccacaactggcagcgatttaaattcatctttgggatctgtgactgctgaggagcatgtggtagttccagatggacctggagacaaaactgaatctttatcaaagaagtccccagaagcttcttgcagtgatgccactggaccctgtttaaagaaaaatgtcaagattggtgataattctgaaacaacttctatatccatgagcactgaactatcgggtgctcctgtcccatcttctatgactgatgatggcttaggggacacaaagaagccttctgataatgagcttcaagtagtttcccggcatgatttgagcagccatggaagtccgccaattctagaaaagcctgaaaatgctggtgattatactattgtcactgcttctatttctcgaggtccagatgaatctagtgtgataaagcctcattgtcctactgatattcactctacagtaaagcctgcatcagaagaatctcctgaagcttgtactgacaataaaaagctcgagaactccacaagtatcattgcacctgatcattctagttctggtaagtctggggagggagggtgactttacaattctgctttagcccatttgggacagtttcttgaaaagctaaaatagcttattcaataatttgaagataattatgtttttggtaaaaagaaaaagcagcttttttaat

SEQ ID NO: 266972 - DNA, 1937 bp, Cannabis indica
ctaaagacttttcaaaattttttagatagaattccatgacaaatttttcaaaaaaaatcagggttctttttagagctttgtattgaaaatctgttccattagtatgaggtcttttgggaaggtgtccaaaaataaaatcttgagggtttaagtgcaaagcggacaatatcatactaatgtgggaattaaggtgagttagtggcccgacaaagtggaaaaacaagacccaccattaacctcatggtggattgcaccacttgtaaccaataaaactctcattatacgaagatgaatatttaaattgattcattatcaaagtcctcttttgtcatgtatatatttgttactttctatttttcttcttccccttgtagtctagtaacttaggcctgcattgcactatgtagtatgtaacatcctgccttcacttggatttttttgtttttgaaaatattgtttgggaaacttgatccacattaagccacatagaacatgtttttattattattatttaaatgaggcttacctaattgcctcttataattttttgtaatctttatgaataataaatttcaaaacatcttattaaatttaatcaccaaacaataataatgcatttcttctttataaatggaaatgattctctagcgaagttgacaaatattgcttttaccagaaacccctagtaaagagtagaatgtattccatataaatactcattaggttcatgattaataaattttggaaagtacaatttataaacatattactgtatatttcagacagaaaaatatctttccaatatcatttcaaggctcagatctaataccagcgaacaagctttggtgttcaaagtactaagagctcagtttaaaaaagaaagtattagattatgatataaaaagcaaaacatagcttactcagttcataagttgttgtatatgtattgctatttattacaattttttaactgtcttttttatctttttggacacatagtgcgactccactgtacaaatttctatgaagatggcatttatgttcatgaaaatcctctttcatgtgctatggaatgaccataattaggctacagcaatgccaggaacagcagtagtgttgccgaagttagtgttgaaattgtatttgaataagcggaattaggtagatgtggatatgaatcaggagggggcatcatacattcaccaccattgaagtaaactttcacaggaaatgcccaaccttgttccaatgtgaaagctttcttgtcctttttcagaatcagctctgtctcaacatgtccattagggccggcttccatcagtagatcattataatatttcatgccataaaacatgccagtatcatctgcatatttaagacaaaaatcacatttagtagtacgtacttgtaatcatcccacatcacttaaaagtccagataattaaaaggagcattataaaattcataatttgctttaaaaaagaattaattatgtgacgaaaatatagtggttgaactgttctatttatatgaaagaatgagtctgagaccttctttgtatctagcaaaagtattacttaatttttgccagacttacttgagagtctgtactgactgagtggcttatagacaaagctgtaggctttggtgaggttgtgaagatttggatgctgaacgacaagagtccagtgagggtaactcttcaagtagctgaaattggttatggcaatcttgactttccagtactctttataattggtcttcacatgccaatgaacccgaatggggcacatgtggtctgtgcattgaaccatttcccttcttcttgatgtcacctcatcacttgatgaaatctttagatcatttctgcacaacaatcttaattctaagagttagaccatcatgtattaagtgttggaggcaatgttaaatgtgag

SEQ ID NO: 266973 - DNA, 2962 bp, Cannabis indica
aatgaattatgagatcagtttggcatttggtccactgactagaatgtcatatacatacacaaggaagataactaagctatgtcctaagccatgaatgaacaatgagttgtttgactgagatccttgaaatccccacgagagtaaatttgtctcagtttgtcattccaagcatgtggtgcttatttgagaccatagattggtttatgaaatttacaaaaatgtgttgggtaattcttatcttcgaatctaggtggctatctcatataaagtgtctcagttaaatggccatttagaaatgcatttgtcacatctagttgagagacattccaattatttgaaacaactaaagacaggatagttctaactattgtgggctttacaacatggctaaatatttcttcaaaatcaattctagcttcttgtagacatccttttgttaccagtctcgatttgtatctgtttatggaaccatctttgttcatcttgactcgatgaatccacttgcaacctatgacattcatggagggatcatgaggaaccaatatccatgtctttactttgtgaagagctcccatttctgtgttcattgcaccattccaatgtggactatttaaggcatccttaggagtttttggtttagatggtaacatggtctctggtagaggatgcttggtttccatatacgattttggtttagaaattccatcttgcgacctagtgcacatgccatgtttccttgtagttgtaacaacaatatgtggttcattttcactaggtggaggggagtgtgtttgaggtacaataggtggtgcattgttgggtaaagcactagagagatttgcggtttgtgattggtcatttgtccttgaagggtccgtgttataggttcgtaacagggttactggtttgggttgcaggagatggaatatggtctggtatggggttttaaatagtgataggtggagatggttagctagttgcaaaagaggatggagtagggatggtatttgtgacaggaagatgagtattgtgtattgtttgctcaatgaaaaatgaaccagcattgtccattagaggaacatatgtgttagatggtacattattgaactgggaaaaataaaaaacaatagtaggagaactagagacattgttagatggttcctgtggcgatgttgatgaagtagtaacagaaaatgtattttcatcaaaaatcatatttcttacattgagcagtctcccttgtgaattttcacacaagtaacccttgtgtatggaagaatagcccaaaaatgtacactgttgtgaactgaactccatcttgtgcttgttgtagggccttaaatgagggtagcaagcacgcccaaatggttttagtatagtgtagtctggtatttgtcctagtaaacactttgagggagattgttggttcaaaacctgagttggtaacctgttgatcaagaagactgttgtgtggaaggcatgccaccaataagtgaagtctaaacctgattgtgctagaatagtgagtctcatttcagttatatgcctatgtttgcgttcagcccttccattttgttcatttgtttcgggcagggatgtgtaaagactatcccttgatctactaaaacttggcaaatggtcgaaattcacctccctaatcagactaaactcttttaacgggaagattgaattgcttctctaccatgcttttgaacttgatgaacatgtcaaaagcttgagattttataactaatggataaatccaagtaaatctactatactcatctaagaaatggacatagtagctatatccatctttggatttaatgtgaaatggaccccatagtattagtttaaggggttgagaagctcttgagttggaaataggaaagagtaatttatgacttttacccatttggcaagccttgtaaaagaactaactagtctaaagaaccagtgtgatgatgaacatgttgtaacaccctgcttagaataggtttggatgggtgtccaagcttgttatgccagatgctaacattagttatgattggtttggtaagcaacaagagagatttaagatatgtcacaacttgtagctttattcatatgaaatttattacaatcatagtcatttgttacattgttactgtcaaattgactattacaaaccatagcagtgggctaacaaacataggccattgactaccttgaagtgttcatcacagaatctttggcactgtcttctagcacatagagcccttttttaagtatacccttgagcagcaccttcccagctagcttatccttgacaaagcaacatattttatgaaattcaagaaataacacatcattgtcacgagttagttgagatacactaactaagtttttgataattgaagggacatgaagcattgaatacaatttaagaggtaaagaattaacatgaggcaatgtactagaaccaacatgagagatgagtaatttcttaccgtcttctattgcaagaccttctgaaccagtttatgttatgactgtttccacgtttttagtacctaaggtgatgtgatttgtggtaccagtacccacaaaccatccaaagtcatctccaagggcaggggtgaaagaagtggcaaaagcttgtggatcatagtcaaattcatgttctttgacgaaagctcgaggggaggggttcgtggtgttgcatgtttgactgtttgtgcctggtttgggagggatccagttcttgtcaaattgataatggcacacaggggtaatgtgactaaatcgaaggcataattggcattgaggttcattgtctgattcactccacaaaatctacctcaaactccaatcttagagccctgtggtggtctataagaatcgattcttaatcctgagaaagccacattagctttaagcttcatgctgaaatctgtgattgagttatggtgttcgaggcaac

SEQ ID NO: 266974 - DNA, 1100 bp, Cannabis indica
aaaggacacacacgcccactgacatctcctattgtcagtagttacatgccataaagaaacttgaaggaaagtaactcaaacatgtaccaaaggcttaaccctaaagtcaatggttgcataggaaagggtaaaaaaagctatccacgaccactgacactccctagtctcagtggccatatatgtggtccaagtgagaagtggcacacagtgtcattggttgcatctgtcaaaggaattaaggaaaacatgcgactaatgaatcctttcaatgtcagtgctcacatagtacatgggagaagtctcttagaagatattttgggggaggaataatcaggctcatgcgagcactgacattccctagtgtcagtgctcgtgtggctcattcaaaagattgttcttaggcattttggaagtttaaaaccctaaatggtgtcaactaacttccaagatgttgttaagaaaactctaaatggtcaacaaagaagggttacacgatcgctaacacttccttagtgtcagtggtcgaagggtaagactccttcaagtgtagtttcaacaagtttctcgaaagtcgaaacttctagaaggttttcgaaagattaaccagctcttcaagtgaagagatattttattttatgtattttttttattattacttaaatataaatgcagaacaaaaagaagattttgtaaccattctcccggattgtggagagtgtgagtgaaacccaagcctatataaggttgttatctaaacctaagaaagggaccttgatttgattcaactttgatcatccgcctctttacttagtgagatgcattttatctctcatccatctttgagaacgattgaacacttctttagagtttacccgaaaaacttagccaccaataatatagaagaagttaagttctatcgttgacaatctttggagataacatttagagaaaatccaaagaggtctcctgcaagagatctcgctgttgtaattactcaaacacattattgaaaacatagctctggtgcatttgaacgatgtaataaaacaacaagtagactaacctattatcgccaaataaaaggagttgagcttctataa

SEQ ID NO: 266975 - DNA, 1520 bp, Cannabis indica
ttgtgacaaggtatgagttatcctaacttaaattgcaataagtaatacagctctaaatacttgtaaaactatcaacccaagaatttttcaatttattatatataaagaaacttatcttcaaaaagaacttacaaaaagaataaatcatagtgtttgattcatgaagttcaacttagaaaaaccacaaaaatgaataagatatttgggagtttagatgagatgggatgagatgaaatgatcattatcttatttggttaggtgtttatttgctgttcttttgtcttttatttcatcgaataataatcattattattattattatttattataaagaaaaagttaattttgtattagaggataaaacatttggatggggcatcatatttttggttggtctgtttaatcaaataacatataaatagtagacatttaaatcaattggaaatgggtcccaaaagaatgggaaaatgattcataattacaaagcagctgactttgtagcatatatagcatcaacatttcagtgtgttaattgaaatggtcctacgcagagcacttttaataatgccttactcttttatacaatcctcatctattattttatagtcatttataaaaggataataatgagaaatattttcataaaagagatattaaaatgtagataataatatctaaatattaatatgatccctctcaaaaatatataatattccaaatagataattagtaagctattgtcaatttgtctgcaccatcaaaagtccattttaaaaggactacaagaactcaacatcctatattgacacatatgacatagggatatgagataaatgagtttattttaaaaagtctattttaaaaaatcaattacttgatggaaaaaaaatagtttattgatgaataattttcgatgaacaatccatcaaaaaaattaagtttacatgtacataaaataataaataccataaaatagtttaaaacaaataaaaaatatcatacaaaataaccaaacttaaaaatttccatatctaaataaaaaaatcttttaaaacccatagtgtaaattcttcaacattttttagactctaaaagtcttaaagagtgtagtgctcgattttagggtctacttaggtagaagagtttctcaacttataataatgtattgagaattgttaaaggatactattagtgtctagcactctcttcggtatcataccgctattaatataattaaatatcaggctctatataacttaggaaaataatttttagacaatatcgctaaccagtcgtaaggtgctacttatgagacgtgttagacactggtacccaataataatgttttaatatattataatataatgttatttttctgaaatttcaaaatcaattccccttatttttttcaaaggaatttcatgaagaaggagaaaacatatcaagtaacttttactttcaaacccatgcaactagctttaaatatccataccaatatatctatgtatttatttattatt

SEQ ID NO: 266976 - DNA, 1424 bp, Cannabis indica
caattataaaattaaagataacttttttttttgccgcactcggcacatttgtacttcattccatcctgtgtcatgtaattcgattttctcagagagacgaagtcgctttattttttttttctttgtagttctaaatatagtgtatatgtatcagttaatcggagtgaaatcatcaaaaagaaaaagaaaaaatttcaaaagtttaaaaaatcattaatcattattggttattgatcttaaatatatattattaaaaagtttaaaagttactaattgttatcggttattgatctagaatacgtgttattgaaaaagtttgaaagttaataattgttattggttattgatcttgaatatgtattattaaaaatttaaaagttattaattgttttggttatgaatcttgaacatgtgttcttgataaacttagcaaacgatgttatcaattattattggttattgattttgactatgtattgtcaacaaacttagacatcatttattggttattaatctcgaatattagattagtggagttacaaagcttcagctcaatgtagttggtattggagaagccttgttaacttgaaggatcactttaaagaaatagctggacaacaactttcactcagtaatatcagattgaaaaaggctacaaagtgctctgtccaatctaaaacaaagtcttctggtctcaacatgtatgggggaggttagaaccaaagacagattgaaagcaatgggaatggaaatagcagaacattgcgaaatgtgtgagattcatcctaaaaatgcagaccatctgttctttacttgcaggttcacagcaacctgcttacaaggaataaaaacttggctgtcttggaatatagcagcaggttctttgtatgctttgaccaggtggattgggagatcaaaggtcagcaagttcaagaaaaatgttcttgctgctgctataagttgcctggtgtatgcaatatggagagctcagaacctaagcttgtgggaaaaatcaaaaccggatgtagagaagataatagcaggagtgaaacaagaagtcaaatatagaatcaatgtagtgtggtgtagattggttcgttgaccgtctcgaaaaagcaagtgcgctactcctttgacaactcattttgatgaagatttggtaaagcaacatgaggatggtaggtttagaagcattctacgtaacagtgcacaattgtataacgttggtaaaggtttcgaggattctaactgtgagaaagatggtaatgtgaacttagttgagaaaacatgcacatgtgctatgttccaattgttgaaaattccttgtccccatgcatgtgtcgcagtgattactcagaatgtcagtctgtatgctctgtcctccccctttttacacaaaactagacgtggaagaatctcagatc

SEQ ID NO: 266977 - DNA, 1139 bp, Cannabis indica
taagtagagatctaggtttcatcttaatgtttctgtgtgtttatatacttttaagatgtgaaaattgttgattgcatttcatcacaatgacatgcttcctggaacattaagtgcttgacaatttcgtggatgtgttgcagattgacatggtcattttggttgtcaactttatgattttctatctttgcatctcttgttattgtagtttacattttattgcttggtctcttaactgacttcttctttctcacaaaattaggcatcatatccaagggtatccatccattcgcatattccgaaaaggaagtgatttgaggtgaggtaatgttgcattttttagttttatgatgtccctctaggcattcctgctatgttgtgtcacattaaagttttcatttttcttttttaaaaaagtgttgctcatggtctgcatacacatgccctatattaaaactcatagtattaagaaatgtaatcacctgtccacacattcttgtatcaataatcaatctaatgtcttgaaggattgttacattgtcatctaattgtttcttgcatggtgatcgaaatgtgtaaagagtgactaggtttaatattgggttctagagtgagtgtgattctgattgctgatgtgatatggtggttattttctgccacaggcttgatcatggacatcatgaccatgaatcttattatggagatcgagatgcagacagcttggttaaggtatgtacatatgcataaatgttttgagttatccttcatctctcataaaactttgactgattgctttgaaaggttgatagaattttccttgagtagaaatattttatcagaaatcaatacacagatagtgaaatccctcaaagaattctttgttgcaaaacattgacaaagtatacaaatcgaacttgcaagaggcttgtctttcctattccaatctttcgagaggtttggtctctccacaagagtctactcttctttaatttcaagctacccttacaaaagtataactaattccaactaggatccactaagaacaacacaactcagccccaaacttcacagaaactgccagcaaaataaaaaaaatgaaataacaaaaaggctacaaaaacaccaagtagtctatttgcttg

SEQ ID NO: 266978 - DNA, 676 bp, Cannabis indica
aaccattgaatagtcacccgtatatgtatatatatatatatatatgtaaaattaatatgtacctcttcaactatatatatatataattaaacatgtatttgcatgcatctatagcacaaaacattaatttgtctaactgtaatctcttaacttaatttgttcattagatatattagtttccatataaaagttaaaactactaaaagattgtatatatatgtgtgtgatgactgatgaaccatgcaaattacacatgggatggctgatatgaaacccaagaataggagacaaataatagaagaaagtaccctaattaatatcattatatatatataaatacaaataattaatcattggttaatttgtgttgtgttgcagcataattgtgggatcgatgatcttttgtcataattaattgggttggtcggcaatgattgtggtaagctagtttcgaatcacaagacaaatcaaaaccaagaatcaatactacgtactatacttaattacttcttcttacataaaattatatattaattatttaatttattagcttagtcatcagattcccaaacgaagaaacattaattccttcctctagaaaacccttatgtacacgtgttaacacgttacataaatcagtcaattaatgagatattgatcatataaaataattata

SEQ ID NO: 266979 - DNA, 1416 bp, Cannabis indica
aaaaaaaattaattaaagaaaaagtctagaagggaaggcgatggatttggcaagtattatttgaaagaatcacgtggaatccacaacaaggcattattgggtaaggtagatgaccaaatcaccatttggagatgaattaccttgaaattaaagcaacaataattgatcaattttcttaaataaaaatttaatctaatttattagcggatgggtttcgattaaaacaacaataggtgaattttgtgaagatgtcaccaattatagtgaggcacatgccactttcattaaaactagaagaaaatataagtatttatatataatattcaaagactttatattgaagcagtcacaaacaagcccactgtcatgtctaatgcgtcacaatttgaccttgccctcttgtttttttttctattatatatatttttaatccttcaataatatgaacttaataatttgaatctatattagttaattatggtttttgctatctaagttcatattattaggccccaaaagataaataaatctatgtatatactatagtcgtatatatattaaaagtttagtgcaatattaattaaaagaaaattaattgctatagaggctgacttgagttgatgtgaaaaggataaaaatcaaaaaagggggaataaattaaacaaattggtggtcgattttcattctgtttagatttgtctttggattcttttcaagtttcaactctaatagtcatcacatttataatataaatgaatattaattttgtgcacaagtaaataaagttcatgtgaaaaaggaagtacacaaacttttcaacaaggaaagaaggaattggtctacgtggtgggccatcaccaacctctagcttcctctctttctaaattatgtatgttgttttcattctttttatgtgtgattttttgtacctatatgggctttgaaatagtctttttttgactcaagtgttaaaaagcgaatacagctgaaggccaccattatcttctcaaggtgtttttgtttccaaatatataaatatatttatgcatgaattttttgaaagtggaaggagaaactgtcattcataatatgtactactcaatattataatggggttgaacaaatctactcatcatatcataatgaaacaatcatatgatttataggctttttgcatggtctcaagtactctctaggagaaaaaagaatcatcccaatcaaatatttcttatcataataatgctacttgggcagatatgcatataaatatatacattataattatccaaaaataatatatatatatggtttgagaataaatttgtattggtactaaacaggtggatatgtggttaatggtttgttgtggtaatgtagtgaagtagtgatgttaatgagtagttgttgatttagtat

SEQ ID NO: 266980 - DNA, 1178 bp, Cannabis indica
ttctttagatctatagttatacacttataattctatttgtgacatcaagtattctatttggttttactgttgtgaaaatattactttaagcaaatgctaagggcaatatgtatatatttaatgtcatcatcatatataaatcaaaaaaaaaaaattttatgtttataaatgtttcctcgcttagaaatagttagctcattttttagatacaaatcagtacgtataagattcttaaaatgattataatattaatacgacagtataattgttaaattatagagggaaagaagaaattaatattataaaatttatgtcgtatatatatgataacaaaaaaaaaaaaaaagaaagaaataatttcattaataacaaatattatatatctcatcaatctaacaaataatttcttacgttggaaccgacaaaattgggaaaccatgcaacttattctttgtagtgcagcacaaattgtgtttaaatcatgcatttcatattgtcagcctcgtaaagacaacaaaaagttagctgtctctgttaatcatttcaatttggtgaatatttcatacagatataataataattaggaaataatatataataatccctggtctaattgtagggttaagcaatatcttaaaattaatgatgttaattaattacagcacttgccctcacgtccttgtttgttttgtggcatctataacaatttatacatcacaaaaaaaatagtttgaattgtgtatgaaatagtaaattagtataatactactagtaggcccgtttcaaaaactttgcgcacttcatgactatatcatctatatataataatattaagaacttaactaattaagaataatataaattatccatacctaattacaagaagcaataagttatgctctcacgcgacatatatatatatatatatattataaacttgctcttaatttttggaagaaattaaagctataattaccttatatattgatcaattaatgtgtatctttctctaattatacattttattatatgtggtgctgtgttgctttggccatatatgcattatctctaattaaagatcaaaatcaaattaatttaattaaaagatattttatgtacatatgacagcatgatatcgcgatcgtgatatggaaattaatatttatatatatatatta

SEQ ID NO: 266981 - DNA, 1162 bp, Cannabis indica
gattattattaaattttatcttaaaaaaaatcagttcaaggtcctatttgtaccattttgaaaagatacaaggtctaattttgccatttaaaaaataaaaagttcaattaatagcttttacaaaacacaggatccaaaaatgatatttaccaacaaaatagcccttatacttctcatttaaaaaaaaaaaaaattaaaagtgaaaatatttctacgaacacactattaatctattaccttaatatttcattacattgaacaaaacaccattttactttttgagtcatcaacttttaaagtttaaactaattttttcagtaaaataatcatgaaaaaagataatgataaagcaacgacacaaaccaaaaaaattgggtaaaagtaagacaaaattctcttggaagtttattttaatttgttcgttttcggttactagttctagaaggaatcattcatacttaattatagacaatgtttacgtagaagtgaaagaaaacttgaaaagacaaaaaaggaaaagaacaaagcacaaattagacggccgaaaagtttgaaagacccaaacttggcgggccgaccccctctcaaagtcaaatttcatctaaccattgggccatgcccagttaaccggcccattatattcttatgtcactttcataaaacaaatatggaacaccaacaatgtcaccacttctacaacttttatctctttattgtatgtatccatgtattttttgaattaaatgttcacatattttgtattgcgcacaataaatatttggtcaatttataattgcattttcattctagaatgtgatacgaaaagtgtctttagtttataagtgtaagagaaaggaatgaaacttttgtgattctaatagtttgaattctagattggagatttatcattcctctctgttgtcttttacagttttactacaaaattagtaattatcaaaactaatttttttagtaaaatttaattttctcatgaatattgaaaattattcttaattcaaaagattactttagttacaaattataattatcaaaatatttttaaagtgactcatagtcttttgatcgatcgatataacacttaactagagatggaaaattggtcggttaatgtacggggaatgcaatcccgcccccatccccg

SEQ ID NO: 266982 - DNA, 1551 bp, Cannabis indica
agattgagaagagatgcatgaccccaactgcatgttccatagtcacatttctcaggaggccaccaatccatagtagcacaaataaaatcatcatcaatcctcccaatgataactttcccatcaatggaaacagtcccttctatgttcccatctcctgctacaagctcagaacccacaaaaaccaggctcaagctaaagaaacacacccaaaaacacaaccccattttcaaaaactcaaaaatctgagaacccattttccagattctctccaatgcagaagatctcggcctctctctgtatctctcttaataagacaataaacccataaaaatgagaagtttaagctacagtagagatacccttttggacactaatgaatggaggacaggtacaaagaatggaacagaaggatatttatatataaaagtaaaagatgagtgagctataaatgcaaacacgagatgtgcataaactaacatgtgatacttgaagttgaattcaatttcaaaacctcatttttctttttggctttgagttatcattattagtagtcttgaaatctgaatactgttaaataaatgagtgtggttttggtttcaagcactcagcttttttccagtttgaaataatgaaatgaaaatgtaaggtttggttgtgtttgtttatagtgggcctttggtggtttcggctttgctttcccttaacgaaaactacaaagtttcaccaaatggacaaatgtcactgatttatatctggtttttccttcacacccttttgtgattcaagtttgtgaatgggtaaaaatactatcttgatccacaatatattgtgagatttgggttctcatgaaaatatttgtatgtgttcaaaatttaaattagaaagttgaattttatatatagcagaaaataccaaacattgtttttagtattttaccatctaaaaaagacatttttttttaagacgagaaattatgaactaagttaggtttcgaaagagactgtaaactaaacccatgtaatgattgagttaatgtgttttgtgttagtttagtttaccaatatattattaataaagttaataatatattattcatcactcaacaaggtataattttatataatattatgacattatacattactaaatctcaattaaggaattacagaacattctcacgtggatagttataagaatttgcttattttgatgtcattattataattattatctatacagtgggacttatttattttgctggtgattatttaatggttaaattaaaaaaataactattatgtttatatttttataatttgctataataggttgtcaaaaatttattattaaaaaagtatttattaattaaattaattatgtacttaaaataaaaattaattaatattttaaaataaaattagtcttaattaatattttattattaattaaactttaaagtaaaattaacgttaattaatattttataaagaaaaataatctattaataaataaaattttattagattacatataatttattaatttttttta

SEQ ID NO: 266983 - DNA, 2379 bp, Cannabis indica
tattttatatattaaatttttttaatttttttttttaaatttacggtttgaattaatttctccaatgaattttattttacaataaaaaactttgtgcaaataaaaaaatatctttttaatttaaatttcttttgggagaaattagctaggagttaggatttcttgctatggaatgattgagataaatatatagatgaactaaaaaaaaagtttaatgtataagtaatttatagttaagatgttacaatattttatatatggtaattaattaattatttgatttataaaatataattaattaaaaatattttgattatagtccttagttaattactaaatattttaatttttaaattaattgttaaaatattctgataattaattgtggcatagatactaaaatatttcacacatataaatataagttacctgtctccaagctcactacttattctgtaaaaaaataatacgatctatctaatagagttcgaaagagcttgaaaatctgaatatccacacaaaccaaattttattattttttgcaaatcctaaaatcgtgtgtaactgaaattcaaatgatcaaaatatgttcgatttaatttcgtatttcatacacaatcatatatatatcatacataaaaatatccaaagatacacatattatatagctaggtcctaggtacaaataaacatataataatttttttaggtatatttttatataaatatggttggtatatttacacatcgagctagttattattaattatgaaatcatgaaattgaaattattggttgaagggtgggagtagtagggactgtattagcttaggtaataatcataattgatcataatatttcaattagctttttaaaaggagagagtaataaatcataccaaaaattcgagcacaatttgtcaaactttctaaaagctcctttaaatttagcattaataacaatcattaattactacattcactcatcaattatgatcaccttaacttaatgttcatataattgataaataaaaatgttatttccatacacagatatataaactgttatttttgtttttgcatgcctccatcccaacaaaatcttcttttttttttctttctttttaatctatagatatttgtcttgtttttcttattttgtaggacaaaaatatgctaagaaataagaaaattttgtatgaattgaaaaaaaaaattacataaataccattaatatataattttttatttcattgccaattagtttttgagatgaactttatttatcttatcccgaattctaatatggtatcgtttgtgagcaaacagatactttccagtgttgggtctttgatctgttttaaaaatttacaaatttctcgacgtgtacatccacaaatttctcgatagtccggtcatggtctattaaaggtcgttcgttatacccatactttttaggtctaaacgtgagaaatgtgtattaaagttaatctcacattgctaatgtgtggagataaattgtcatatataatatgattgagctactcttctcattgtcaattgattttgagatagaaccttattcatcttattctaaattctgacaagaatgatctttggttaacagaatttgcaggtagtgtttattcataaatttgtcgtaattttaattatgtaacatttaaaatttttaaccgttctacaaattttattacctataatcttattaagatgattctttttaacggtaatttatctaagtttgtgtaagtcacttcgacttgtttttaggcattgccttattgaagatttcatttcattaaaaaaaaaacccataaatggttttacaagttgtgaaaaaataataataattaaaaattgcaaaggactcaataaacaatgtattaagtgtgggtccgtactaatgagacatgaaaacgataattgcggagaaaaaaagagtttaatttgatggttcttccaaacgaaagaatcttacttacaatgtcttcattttattttattttatttggactttgactaaaactaagtaagagaattggaaatggtgtgtgggtcccaccattattaccacatttcatttattattctttttctacttaggtgtcacgaatttggtcatgtcctcttattcaattgtcaaattaaaaaattgcagtctcaaactcgaaacttttgtaagtttgctaattcttattttaatagattttttagtttttttaaaaaatattacgtgttgatattaaattacggtataaattttcaaaagactcactttgatactgtaacgtccctgcttcaagtctccattgggcccttacacccacggactaatgactcttatacacgagtacgccac

SEQ ID NO: 266984 - DNA, 2377 bp, Cannabis indica
aaaaaaaaaaacttaattcaagattcaaacccggacccaaacccggatcggggcccgaatccagacatggacctgaaccagatctactcgggacccaaacccagacctggaccggacccggacccaaacccaggactggactagggacctacacctgggaccaaacccagactcgggttctgagacccagatccgagctcaggactggacttggactcatgttccgagaccggacccaaactcgaacttgagacctggacccggacccaagactcgagactgaacctaaacccaggatttgggaggtgggaccgagacctggacttagactcgggaccctagacctggacccggacccaagaccttaacccaaacttggacccgggcccaagactcagactcggacccgagcccgagacccggaactggactagaacctgacccgtagttggtgttggggttgagtttattgaaaatatattataactttacacaatctattaatacaagtcaatatcaaacatagtatgatattaaatgattctaattcaaaattaaatatggatataaaattataagtttagatataaaattaaaattctaaaggaaaaaaaaggaaagaaaaagaagtcaggaatctaatccgatttgagtatccgatctaacgaggccgggtgaacgaattattacatgatttagattgggtcagatcataacaaatcagatctgacacgatccatttgcactcctaatcccaaaaactaaaagttttgccaaatgaggcacactattgataaatcttggaataaatttgcacccaaaatgccatattacatacatttcattacaaatccaactcacttttcctctagaggcttgttcaacatacccacacttgtactatgtttacaatttaactccacccaacaccaaaccatatttgtaaacaagaattgctaaaaggtatgattagtgcctaacattcttcttagtgtcatactataatagtataattaatgtaattatatattgaatcacatataacttaaaaaaatatattttaaaaaatatcgctaaccaattatccaattatagagcgtacctatcaaaattgttgaacagtggacaataataatgctcttttgtaaatatatgtgatagactagcattttaatagtaatgagaggagaaaaaggtggatccataaaagcacatgtaaaatttgtaacaatactacaacaacccccaacaacattaattaacaatcaagccacctaatggcttccatttatgtggtccccggccgtgtattacttttatggggtcttgaagaaaatttaaaaaatgaaccttttatttgaaatctaaattaaattcaaataagattttaaactatttttctaaaatttttttgggaccttaatggattaatgttttaaaaaatatatattaaaagaaaaaaaaaaaaaaaactaaagagaccttttaaattgaagggtcttgagcaacgactccggccaccctatcctaaaaatagataaattttgtagaaccgtatctataccacttttcttaactaacgtctcaaaaattatgtaaataattcgttgcccattctaacatagaagccattgtagttacaaattttcttatggggcacacaattcctaacattacaagcctcccaagcaagagtaaaaaaaaaaactcatatctatgatctaccaataggatcctcttaaaaacatgagttactactttaatgcccttttccttccacatcttttatatgcaaagtggacaacatccaatcaattcaattgaaccgatttaattcaatctatttacaaaaaattggatattcaagtgtaataggattgaattgaataataaaagttggattctaattggattgaatcggttattggatgtcaatcttaaaatctaaagattaagctatttacatgaaaactttgtagcttggtcagagttatcttttgctattgcgattcaatttttgctactcaaataagtcttgtctctgtgatatggttttgagtattttaatcttatttttgtgatatagttttaagtattttaatcttgagctgctgcaataggagagtagacaagagcatgcattattatttcatcatggagaccacaaacagggcatagaccattgacatccaccctcttagtgatcaattggactttcatggaatttgaaggtcagaatgcaaaaataaaaaaagaaacaaattatgcaccatattaatgtagattcaaactctaacaccattaataatgtgtaatttggtccatgaagagagaagaaaaaaagttgaaagtacgaagttgtaacaataaattctat

SEQ ID NO: 266985 - DNA, 2830 bp, Cannabis indica
ttattgtgtttgtttgaacttggagtttggtttggtttaaggagtagagggagagttttgaatttttatagtaaggtgtgtaattcaaccgttgtggggatggatttttacaacggctacgtgggtaaaaggtttaaaggtcccacttttatcctagaatgagtaaaatgaatggattattaataatgataattccctcctcagagttttaaaatttttgaggtctgttctgtacctcgcctgtgccacttatgagtcatgactcgactttctttttttgggtgttttacacacgtgacttagctcaatcatttataatattggaactgttagtctctagacatttttgaagcaaaatactatataaaatagtcaattcccaaggcaacgtaaatgaactctacaaaatcctgaccgctaatctctcattgtgggaacaaatgtgtatttttgaacaaaaagttactaatgtttattgtttaaatacgcatataataataaaataaacgtactttaatcagtgtggttccacatccgttaccgtttatgtttttttagtgagaaatgacacctagatttaaccagaagaaaagaaatataaaatattattaaacatgagtttagataaagacaaaacagacaatactggaattcacttggtgaaaaagaaaagacaatactggaattcaagaagaaaatacaatgaagactttaaataaaatacatgaatattcaacaactccaagagtgttgtcttagatttacttttctcaatctcattctatccagactcatcatttaaataattattataaattcaaatttttattaaataactcatttaaaaaagtaaattcaacttaaaaaactattaaaaattcaataaatgttcatatcttcctttcccaatatcaaaaatttataatgggtataaagagaagttagagagcgcctcttcgagatgttctaaaaaggcataaatcaacatcctaatgaagccaattagattaaatatttaggttatattcaaaataaatcatcattcagcacagaaaattacagcaacaaacagtacacaccatgttgctagaggtgcatgcagcatcctcatcataagtagagaccattagctgaatatgaagaaacatcgtatccagtgttaaatgagtgtttcatcttccaccatgctttatctccaaactctcagctgcaaaatacagtaaaaaaaaaatataagtacctgatggagttggatatctctagccctgacaataaacaataaattcaccctgaaattcttctcaaaatcaacaaaatgcataccagtcttgtgagttcttctcaccagtataaaatatttcatccgaagtataaaccatttcatctgaatgggttaaaatagtctcaaatctgtctaatgatgcttggaactttcctgaattcatgttgaacaatggctcaccggtgcccaacgccctattagtacaagaatcttatgtcttaataaggaaaggagacatgtacatataaaaagagataaatgttgacatttggaagagtcaaactcattaaagagtttaagtacttgcccagtaatttctggaaggacataatcagccctccacccaaatcgaaaatccaaaccagggcacaagccaagtgttgttttattacgaattcgagatataccatctccaccaaaacatgtactaagcttccatttccaaccagttgcatgcataagaaagttatggcctattccaacctgtcaatagtagacaaagttgagcgcggctactaacattgaagttcaagtccataagagttaagaggtctataagtgcaagaagaaacatcatatactaagatatcatcaaacatgagtaatcaatatacttaggtcacgtttggatagtgggattaaattaaaaaaaaaaacattaaaaaaacataaaagaatgaattagtattagttaatcattggtaggcaataaattagaaagaaacatgttgaatgcagaaaagtaattcaagtgagaataagttatcccatactaggaagattaattagatagttggattaatttctcaatatcttctctaaattgataaacttacattatacaagtacaatcatctctccaaacataacgttaaggtagtaagttttttcagcatcttgacatatctatggaagagaggatcaagaaaataagctggttcaatcatacctgaagatttagatatttggttacagggatttttttttgaaagaaggcggacatcctgttgaagaggttcgtaaacaaacttccacattttatcaggagacaatggcttcaacacaagttttccttgaaactcattagatggagcattataaaactgagcaaaaggaaaaacagtataagtcctcaaaatgaatgaaaattagtcagcgccaatatacttatgttcatacacataaacacaaactatcagaaaatataacaaattgaacttaatggtaaagatacagagcattagaacacctgacaatcgcttgaaccagtattcaaatacaggaaatctatgaatgaaacatgaggagtgtagttaatccacaacttggataaagactaagcaaaccaaactcaatgaccaagatacattagacaaattacaaaacaataagcagcaatgaagcacctactttgctcataagatcaagtcaagtggtctgccatggtttgctcctctcatagaacctacttagcaattgttagagttttatgctctgaagattgtagggattaaacaaatatggcaaataatatcatctagagtttgt

SEQ ID NO: 266986 - DNA, 1674 bp, Cannabis indica
aattaaagaggtatatttatttttatgcaacctcatgggtctctctccagttctggacctccaataaaagaaaataaatcaaagaagatgggtgaaagttcaatcattaaagagagactgaaaattgactcaaaaaaaagtaagagcaaagtgcaaatgtagctacctttttgggttttgataagtgacacctagaaaaagtctgccactaccattttcttcttttctttatctctctctttgacccaattttgatcatgatttcttgatgaggcaatgaaagacagcacctaaacagttaaatgaagtatgggtcatttacaaaacaactacaaagatatgactatggcattataattagctatagcatataggttccctcatgggaaagttattattatggtttagttgatttaaaaaggattttttttatatgggttatatttacataccccatttctagaacaatattattggactgaaccaaatcaataactccaaattgaattggtcaaaaaaaaaaaaaattactctatctcttatctaataagggaataaaacagtaaaatatcgaacactagttgccaattgccattagcacttcaagatttgcttttttctcagtatcataatatatacaagctagtatagtgtttgtagtttgataaagagcatataaataaataaacaaataaaccctctagataaaattagtggccggcatgaatataatctagagttagagaaaatggttttatataatgaaaaataattaatgtaattacttacgagtgattggataagttgctcgtcgtacgtggacatatacatgccatgtgaattaattgattctctttcgtggaagtagctagagaaatggagtgaaaataacagtagtactgtagtgcatagagaaaataaagttggatatgtatgtaagtgttatcgttcgtttatatatttatatggattacaaattaaaaggactagtattacaactcacatatttgtgcttttgaagatcatgtggaaaagttttttagttttttattcaataaaagagaagttcaagatcaatatggatagtcaccctcaaattcctgtaccctgcacatggcagtgtttttcattaatactttctattaattactttattcaaatatttcatgttcttgttcaaatatgtcggacaaattttcttcgattaattttttccacgttcaaataattaaacagatcacggaatgctagttctattaaagggtgcaagaattttgtaaaaaataaaaacatttggtgtaggtataatgaacgtaacatttggttggctataactgtcaaatcaaatcataaaaaatcccacattgatacagagtaacgtgggtaatatattttgggatatgattttgtcccgtgtactttcacggaatgtattctgtggtatattagatgggtctcaggtacattaaatgagtgtcagagtacgttactattttttaaccctaattacccctagatcaatctcagctgtcagatcaaatgactccctcatctgacggttgtcgtacatcacggattacaatccgtgaaagtacaataacgggacaaaatcatatcccaatatattttacctataacctataaataatgttttttcgtttcactaatattatt

SEQ ID NO: 266987 - DNA, 908 bp, Cannabis indica
aaatatatacataatacatgcgtgcactcaccatgtaaagaatatatttttactggtggataattttttgttttctttacttacttttggttggcaccgaaaaaataaataattaaatgtagtaaattaaaaaaattgaattaattaatgaaaatttgttggaaaagtttaagatgaaaaacaagaaattatatatatttatttatggcacactaattaatcttatctggcaaattgaaagcaaaatattatatacatataaatcctcatgaacaagaacctaatcggcttttctctacacgtacgtaatttttatccttaatttatatcttctacaaatttagtgtatttttttaatacttaattaacatttgtattaaaaaatatgttcaaagaaaaacatttgaattaaaattgacagctaaactattttatatttttttcttctatatagtaaactacctttagtgccatagataaggacaacaatttaattagagaagcagttggaataaattttataatggaaatattttagaggttattatataatcacaagtcaatcaattgattaagtcagctaatagaaatgttgttcaaaactatattcttcatcgtatttattatcattatatttattatctagagactagaacaccatttaattattgattgacgccgatgtatttgaggtcgtttattaatctaattaatatattataaaaaatgtgtaaaaaaatatataatattacataattctatataattttaaggaatatttacaaataaacatatatatttaggattttaacatgttcataatttttaattaattttctaaaaaataataaactcaaaaagttaaatatataaatataaaatttaatatttatattttgatatattac

SEQ ID NO: 266988 - DNA, 2893 bp, Cannabis indica
ataatactatacaatacaataatgtgtcatacggcgtaccaaacgaactattaccctacatattaatacacacaatatatagggtatttaacacatgccacgtggacatagcactttgccacgaaaataaggacttttcaaacatttaattacaaaaataatgtgtgattttaattacatatctatttttttaatgcaattatattaatataataagctaaaataataatttgtaatttcattagaacatctcctctgttagaaatacgatcaggattagaattagaaaaacgagtcaaataatcgaccacctaaaaatcatttgccaataaaaaaactaataaaaaaatcagaataaaagattgcagtttcacaattaatattaagaacacctatattaagtttcatctaccgttcaaaagacacaacaatagaaaacagcacgttcattcaaccttgtagcttgagccctcaactattatttaaggtacataattgcactactagcaacccctctactcgcaaagaacttgttattcctaatcaataacagtgatttgatggtgagccatcaaagaataaagaagaaccaacaacgaaaataaaataaaataaaattaaataaaatcatgtcatagagacaagactaaaacactcaaaaccatgtcacagagacaagactaatcacagtaataaaaagtgaatcacaatagcaaaacacaacctcgaccaagtcccacctatgcctagggaagatcggcaggcctaccggagaaaaaagacaacctcctataattaaatttaaaaacaagaaactctaaaagaaaggggtttaattagtggtgaggtgtcgagtattttttagcttcaaaaactaagtgttctaattgtatagttattggacaaactttatactgatcttattgagagtgaataaaaattataaaagcctcaatggctttgaaagttgttcctacaatggattaaatcggggttgaaaattctacagtggaacaacttaaaatccttggtgttattatgtttttgatttatttttcaatctctggtttattggttcatgtttagtatatttatggtgattgagccatgatgtttgatgatagttttttaccacaaattgtatcagagctgagggttagatcgatcaagattcaagtttaaggtttcaagaaagccatcaagaacatggctagtgcaaagttatacactgacaagtttaatagggccaatgattttggacttcgaatgaaaaagatgaaggatctactggttcataatgggataaacagaagccattaatgaagccggactcaagaaattgagataaaggcacatagtggaatcttgcttagcttaggagatgaggttttaagagaattttccagtgagaaaaaggccttgggaatgtggaataaacttggcacgatttacatgaagaagtcattagcaaataagttgtatttgaagaagaagatgtatactctcagaatggatgaaggcaaagatttgagaaagcgtcttgatggctttaataagatcactcttgatctgtataacattaggtcaagcttgaagaaaaggatttgacaataatcttcctcagttcattgccaacgacttatgagcattatgtagacccagtcctcaatggtaaagagacttcaccatgtctgaggtgaaagttgcattgagttctaaagaaaattcaaaagaaaacagatgacaaagatggtgatagtggtgaaggcttgtttagcagaggaagacacaaatcaaaacctaaaacctctcaacataatggtttagctaagatgatcaatagaaccattctggagagagtaagatgtatgttgaaatgtgctaatttggaaataaagttttggggagaagctgtcaaaactgcctatactactttattaacaggtgcccttctgctgcaattgagttcaagactccacaagagaaatggacaggtgaggttattagctagcctagaaaaacttaaagtttttgattgcttggcctatgctcatgttagacaagataaattgtaatcaaggactataaaaaaatgcacgttcttaggattttcaaatggtgtgaagggaaacaagctatgcttgaatacggtttcaatgagatgtgtgactttgaaagttgttcctacagtggactaaatcggggtttgaaaaacttgcagtgaaaccacttaaaatccttaatgttattgtgttttttgatttatttttcggtttattaggttcatgttaagtctatttatggtgattgagccttgatgttcggtgatagttttcactactaatttttatatttttatttttctacaagtagaaaaataatatggtactttttctcaattagaaaaaagaaatattaaaagagggatatagaaaaaaaaaaaaaaaagtgtttaaactagctaataaagaattgtaataatgaaaaaagttgtcttcaaaattttatttcacatataaaatatgtatacctagatactgaatacatcttttttatttaataaaaaaacctacttgatcaacttattgcatgcactaattaaagttttgatgctaacggattccataaaaatgagataaatcttcttctattctattatattctatatctgataaaatgaggctgggttagaagtgtaaagatacttttttcttttcatctaacaatgaataattttattgaaataaaaaattataatatcatacaaactttaagaaatataaaaccaaataaaagaatgaatttcattataccatattaatttttcatctacccgaagaacatgtcgagctaattcatgtacagtcccattagtttttcaatatacatggat

SEQ ID NO: 266989 - DNA, 2307 bp, Cannabis indica
aaaaaaaccctaaatataatataatgaataaaataaaaggatgaggggacaagaaggtttccatccatgaacgatcattggttttctttctttcatatatacaggtccaaacaatatataatattatatcattataatttcaagtgtttacccaagtatggacccactggttttgcaagtgtatgattgtgggtcaagattgtattgtgtataatcaacttgaaaattgccagcacaatttggtagtgtttttcttcgaaaaataagatataatgataaaataaaactatattgaaaagtggaactagatagttttcattattattattattatacattattctattttaaatttttacttgctatataactaattttctaatcatgcatacaataaccattttatggtacagttgcagttttgattgttttcaattaatatctataagtattttagatattttcagtatatcaattttagtcttccggtatctagttgatgaacatgaagtagagttttttattcaattctttctaaataaaaaaattccatgaaaaaataaaaattgacattttatttacaaaaatactttcataagatgtgagtaacaattttatctttaatgaacttttatttaactaaaaatataccacttacacatatccattcatgtcagccgaaaccaccttccagccattaccaatcccacgttcaaaatctacaaagaccacctcacagccataactttcgacatcttcttcttccaactacctactttattatcaaaaaaaatttatatatctttcatttcgtatatataatgactattacatgtggttctattttccatctctattgccaaaaaaaagattcaaaaataggtgataaatcaattgctaacaaagctaaagggaaacgcccaatcatcgacgatgatgactccgatttaactccccctatggccaaaggtggtcttcgtacagtgaagaagtcaaaggtgcctttgcttgaaaataaatttcaatttcgatgactagaagggaaagaagaagtcaactttaagacaactgtgatgaaattataatgcaacagttatatctgttgcgagccaactaacataaaaccacaaaacaacttataattccacatatttaatacaaatgaatattacaataatcgtgttttatcagatcgcatatttgacaatttcgagccctatttttataatattatgatattgtagtaacaaaattataattcaactaacgtgaaactgaaatgcaacactaaaaatattaaatgtggatgtatatctataagaaactacttgttagtttttgtcactgatcgataattagttgtaccttaatagtaatatgtggagaaacaacgttagcaaaatatttatgcaactgttatgaaacattaaaaattagaatagtgtttttacgtacgtaactttatctacatgtctattcatgatttaatatgaacaaaattcaccattggaaatctggaaaacaacaaaaatgcatcgggataaacatttaattatagtattaatgtaatttttattttgtattatacttgagttgaattgtttgggaacttcagttcaactttttgagatctgcatttcatatggatttgaaaattatagtcaggacattagttttatgcgaattaaattggatttttggtggaattttagttttgtagtagttttatgcacttttttcatgaattcgaaatagaccatgttattttgattgattccggtcatcttttcaagtaaagtcaccgaaattaatggtggttctctttctggttgaattttgtttcgattgtgtagggtgctgggatggtcgatcgaaggttgtgtacgtgagtttgtacttcttctcaggtgatgttgccagaattaatggtactttcttgcctgccggagttttttcatcgttgctaacctgattgcatcgcacgaaggtttcaatcccggaaagtgtggatcatatgggttgaaagtgtgtgtaaaaggtatttgtgtaattttctttattgggttgtatctttatttatttggccgggtgaaagtttttttataatattgttactttattttgttaaaattgaaaaaaaaagtcattttttattattattattattttatatgttgtaattattcaaaattacttgtaaatttttataaaattttgaatagtttaggtagtattaaaacacttttatttatttttttatttttcgatcacaaaaataaaactagatcatttttttaaaaaaaaaaa

SEQ ID NO: 266990 - DNA, 2749 bp, Cannabis indica
tttttttttttttttaattgggctgagatactactcttaaattgggataatatattttaatttcatttgatttaatatatgtcatcaaataatctgacatttatatatatatatatatatatatgatcatatgaaatcctactctaattaatattttagatagaggatagtattagtagatcaaatgtttgaatagttactataatgtagtcaacaattcgatttctggaaatttccttcacatctggactgcagatggtttaatttttggcatattccattttttcactctttagattgcttcccataaccaattacaagaaggaagctgtctaaatttctttgaaacacaaatccacgatgatgcccaataattagtttgatattgtcactgtcaagtttgcatttgaaagttatttttctcccaaaccgctatacaattcattcaatgaaattttgtagcttttttctgcttattacttgtgactcagacacttttagctcctttatgctttgtgacattgccacgattttttcttgttcagcttaaatgcatctgttacaagcatatgttaaatactctatttataactaactaatgtattttttttcttttgtagtataaacttgtagaaccatacacacccgatagtttaggatgaatggacggaattctagtactttgttatattcttcttatactacttattaagtttattatattcttgttatatatatgacatattgttttttttaacaagggaataattttattcaaaaaaacaactaaattacaaacaaagtagcagcatccactacacagaaaaatagcagcccaaaaaacgagaactgctctccaaaaaccaactaccactcaatgaatggggagataaaagtagttgagctccttttggacaatggaaatggaatatctaaaaacttaacagtttgtttgatcaggagactatctcgactatcttgaaagggggcgatccgactggccatgaaaaggatagctggttttggaccttggaaagcagcttatagggcccaggctgaggaaagagcgactcaatgcgaggtttccccatccatttggaataaactttggaatagtaaaatctcggagaggctcaagtttttttgggggtgcatcctatccaaagcacttcctgttcgttcggtaattgggaaaagttttccaatagaagatgacagttgccccctgtgtggaactaaggttgaaactatggaacatctgttcctctcctgtaacattgcttctcgcttgtggcgatcctctccatgaggtatcttccccatttgcgatactagtattcgaatgtgggattgggttaaattcttgtgggacctaaaaaacaaaggcattaacgcgaatgtggctttcctctatgcttcattaattattgacacaatctggctgactcgcaatgacaagatacacaacaattatccagtagatatttttaaatgcattaactctattcgtgtttcttttgcagatcaccattaactctattcgtgtttcttttgcagatcaccatgcttacttgctcccttgccccatatcgagatcgatggatgtctggcgaccctccctaggattggttgaagttgaactatgacattagagttgggatggatagcatgtgtgcagctgtggtcgcaagggatcatgttggcatggtgatctgggttctaagctggagttttccgatactttttgtagggaagcggcggcttgctgtttagccttggaggaggcgaaggcttgtggcgttaagtttattattgttgagagtgattcgagggcagtgatcaatgctcttaatgggaaggagtcccgttgggagcttgagaactatgtatctttttgtaatggatcctccattttttttattggttgtattttcgaacatataagtagacattctaattttgctgcctataatgtggctaagtgggcgttttcccaacaaaagtttagtttcttgtcgctatcctctatgcctgatgaattcttttgtaacgactgtgagttctaactgtttttcatttatatgtatgcacgcttttctttaaaaaaaaagacttcttttaaatttgaagtgaagaactaaataaaatcaccagtaacaaactaaacagacaaaatctccaatgattgtgaaaaagaagatgaataaaaatgggtatagtgaaattattgggaagatgggaacaagaaaaaaaaaaatgtttcaatttaaagtatatattactttaattatttttgttttttttttattattttgtattttaattagtttattatttttaatttgttaaatggtaagtgatgtggcattattcagatgaggtggcaattttttaagtgaaattacttactgaattattttctaaataataaaagtataattatcacttaatttgatagcaaatagtgagatatctatcaaagttttaaaagtctttaacagaaagtattattatcgtcgaattttttacttgaatatttaactctaatggagagttataattaaatagtggaattattttagaaatatacaaaaattacaaaaaaatattacaaaaatatagttatacaaaattttaaatattttaatgtttttaagattttatttacaaataatatagcttgttttcatattatttttatgtattactcttgtcatttagttgcttgttttcttagtttaatttttta

SEQ ID NO: 266991 - DNA, 2959 bp, Cannabis indica
aattgacagtaattgaaatgaaaaattccatcctgtgtcaccatttagaagttgaacataattactgaactcttgcaaaaatctaagaagcaaaatgagtaaacacgcttaaaatgaaagactgtctaacattaaagttagctttgcttgtagcttaccgcaactttcagttgtgcaccagccccgaagcttgattttcctgctggaattggaagcaccttagagtcactgatgggatctgatataggatcagtaggaatctcatcaccagcttctcgaagaatagcattgaacattgccacatctaatcttgccacacactgctccattatctatgcatttaaaaaaagtaaccaagtaaaaaaattgtctgaaaataataagatgcatttgcaataatttgtataaacccggtgaccttagctcatgaaatgggagcattattgagcttttgtgataaatgatacatgtagttttctttttttttttttttttttactaaaactaggatcccccccaacaatacaaatatttaaggacagaaaattatagcaagtgctatgtaccaggagagcctcgaagctcaataaatgtaaaacgtagttactttctaaatatggcaatactctttaataggaagcccaattgcatctctcttcttccccatcccaaaagaaaataagaaagattttatcatgtaagcttaccaatctagccaacataggcaagcagccacattcatgtccaccggcacgtacaggacaaagcctttcgaaggaatctctaaaggccttcttccataggtctaatgaaaaattcgcttgttcttcctggtcacctaaactagatgtcctgctgtagctttttcttaatccagaattactgtctttatcaacatcttttttcgggacagactgcatatgcggggtcaaagtctggaaataaataaaggaattagaaaagaaaaatatacacattaaaaataatatataaaataaaaattcttaaaagaatgctcttgctacagaaattggaaattcagaaacaagagataaatctgacctgccaccaaatagattcaacaattctagaaaaaatccaagtttcaatcttttctagtgcacatgtaaatgtacgtggctcctcccaatcacttaagctgctggacaaaagatccatgccatcccttttgctgggagagaatgccttccattttaagggagatgttactttgccttttaccttttgagtgccattcctattatttgaagatccagtagaaagtggatgctccacgctcccagcagcttggcttactattgctctcaacacaacagaatttgacagccaatatgttaacctggagcaaatgtcagagagaaatggatgaatacaagaaggaaatcataaaagatagatgagattatatgttgttcatcataaatattaacataaacagacaaacttccgcccagaaaactcaatccaactcaaggatcttaaaggaagatatcctattattctgctaaatatggttttatccaatttcttctactaaagcctatctttggaagaacccaaaaatgatatttatcattggaagatgctatatgaaaagaacaaataactaaaagaagatgactagacagtagagaaatttgaaaagggaaatgcagaaaaaactattttaacagtctatacctagggacatcatttccacaagcttttgcaaccagaactaatcctgaaacagcacttctagctgcattagcccttctagactgggaactctctcggcaagcatgaaggtacagtcgagaaaggcgcctagctggtgcatgtaccttactcatagaacttccatgctcagcaattactgaataaagagaagcctcaattgcagcagcttccctcaactctccttcaagcattttcactctgttctccaactgctgcatcttactttctaaaatggcacttctagtgtctcttggaaacaccttaggatcttttctttccttaagtctgaggctacccatgccgctttgtgcatcaccttgaacaccggtttccctactctctgcagactgactgctaacaaccaatccattcctagaaggatctgctctaacagattttacatgttttaatctttcaatattcagaatactttctttcactccaagattttccctgcttggagatgatgtatcacttcccaatgatagctttctggtaacatcttgtgcatattcatcttctttcaaagagctttcctcggttaactgctgtccttcatccttaatcttttcctcctcttttccttctctgtcatcccttgttccattcgcctccaagaaatctctaccgatttccttctgtccgttattatttccattaacttcggagttaccattggatgtcagttgctcaactgcctggggtttaccatttgtaaaattaattcttccattagcgacattcccgtgaatatcttgagctaaatattcacgatcaattctagtgtcaagattctcttccacgttttcattcaccaaagatgaagaggaatgagcacgttcaacactttttagtattttggcagaacttgaaactggagagtgggacacagaagcatgattatttagtggacttcccatatcagaagataagtccatggaagacgagcgcgacaaacttcgcctcacatttccacttggcgagttctgtcgtactagatttgatttttcaagctgtagttttgaggatccagtaggcttcttgttactcccatcagtgccctcagtcattgtgtctattccattctgcaaaatgttcaaaacaggtcatatgaacaacaaaatcatatggaaattctctgtttctctctctccctcacacatacacacacacaagcaccaaaggcagtgggagtcacagtagcactaaagtaatattg

SEQ ID NO: 266992 - DNA, 1638 bp, Cannabis indica
tttaacaaaatacagggtccaatctgtaacttttgcaaaacatggggtccaaaatggtatttacccttattagggagtatagacaagaaatgataaaatgcactatcggtgtcttgcacttttgttaggtatcatatcgctattagtgtaattaagtattatattctgtataatttgatttaataacttttagagagtatcgctaaccaattgtaagacgacactcctagatggtgctaatactactggtatccaataacaatgctcgaatataaacataggatacacgtacttctcagtagacccttttacacttatgtatcatcatggattcctcgaacttgatagctttaccagctgtcagggtatcttggatttttcatggaaacttttgaaggctccagctccatctttgagagttggtctcagatctatcacttttgtttatatttagttttcatgtcttacttaacttgcatgatttacttacttatgcctttattttatttttgtagtgtaggacgcagtgaagacggctgtcaatttttgggccagcgtggtgaaaaggactaagacactgagttcggcttctgggtcactcaaaaagcttctagttcccagcctaaggccaaagaagtggctccccctcaggcaaagccatctcactcattgacacccttattaatccaactgccatcaatttggctatcccactcaactaagtccctttagccattacttcagcgcctgctacgacaacgggaattgattaggtcattgacttatgcaaagaagaagttataattcaacctgtagttcgaaaagaggtctgtaaacgcagcagtacatactaccaagaaggccagactatatgcttcggaagcttagtgaaaaaaaaatggcttgtaaagatccaactgggagtaccactcctagtgactttgatgatgaatacaaaaggaatccaattgctccttctttcccaatcaagcatgtaatgtccgatgattacaaagctgcattagagatgaggctaactagatgataaactagacatgggatgacaggcgagagcaacatccgcctaatgtcttgtcgactctcctcgagacgaatcactgagttagcagcgcgagacccatcaatcaaattttcaataaaagttctagacaagtccactactacctttgtattcattaggacgttgtgaagcgatattactccctttgctgataatcttctcaagcaagtcgggacctctataggctagattagaccaaaaaggtcggccatcactgggagtgagaatgtaatgttcttgagtcaagctccctgtcactaggctaccagattctagattttactttcatgtcttgtagcatttcttatcatgtgataatttgactaagtgaattcttttcttctttcaatgtttccatcttagttcatcgaattgcagatgctattgccaaaacatatatggagcttaggaccgcttgattggagtgtaatgcggcaatcaagcaatgggaggctgctctggcggacttggatacggccaggaaggagagggatgctgctaaataggtctgagaaaaaattagggaggaatttgaaatcaagcacttcgaagcccat

SEQ ID NO: 266993 - DNA, 1248 bp, Cannabis indica
aaattaaaatattaaaatttaattattactcaatagattaattattatccaaaaaataacttaaaatcataaaaatgatactaatatattaaattatacaacataaattacgaactataaaatattattagaaatataaataaaatattaaacggatcaccatcagggtggggagtgtagtccccgtacctattctgtttaattttcggggacaaaaaataatcctcatccctgtcttgttctccatttagacaagaaatcttttaagggtggatctattgataaaatgtgtatatcttgtattcaatctatgatttataatatctttttaattaacataaaggagttatattcatcatctattgataaaaataaaaaaaataaagagcaaagtcatacccattaaaagacattgttttgtagatcctctaagtgaggatccaatagtactttatctgatcccttttcattttcagtggtttcgaagagaggagcctcaagctttggagggttctgcacataaatcactagctagtaaatatttattttattttattttaaaaaaataattaattaaaaaagaaagaaaatattgtattgtattgtattgtattatattaagttagtagtaccatgcaacgaactagagcccaattgacaccgcgaaagaaaggatgtcgtttaatttcattagcaccttccctcgaacctaatctgttcttcggatctctatgcaacaaccgatacatcaattgttttgcttgtagacttacctaaaatatttaacaattaggtatttaagttcttgaatcgtaacaattttaatgaaaaaaaaaatgttatttagttacgagctgaaattataataatttaagtattttatccgccaatataattaccggtatacttcctggaaatttgagatctttgtgaagaatattggcaaatgtcttttgtcttgtctttcctctgaatggtgtgtatccataaagcatttcatataaaagaatgcctgaagaacaaaataaaaagttttcataataaggaaagaaggaataaaaaaaaatggaaggatgaagaactattgttaagttgctaataagatttaaaagtaaataaataaatatttaaaaaataaacctattttatgtgtttttattataatgtgtacaaaaaatagtgtactttttaaaaaaaattagttatttctttggaaaaaagtttacaaaataaaaaaatagagaaaaa

SEQ ID NO: 266994 - DNA, 989 bp, Cannabis indica
ataagtcaagtaaatttttcgtatgggaaaaacgacatgaaacattacaaaagcaaaccagttcaaagtcaatacggctttgtcgtttctctaaggaatatatatagtccttccacgctcgaacagtgatcgaaaataagagagagatgggaatagcaagcaaggcaggggattgggcattcaaagctttcacggcgagccttggcgtggcaaccgtatatctcaccgccactttctccgtcaatgtctacaaaggcctcgcttggcacaaagctcaatcggtaatccctcttacaaattttcaaataagatctctcttatcatttcactcgtatgccctttttttatatagcttagcaaaacatttgtatgtgtaaatcttcttctaatccttgttccccctcccttctatccttttcaaaatttccatgaaagattgttcttttgctttatttattcaatgggtcatgggtttctgttgaaaggaattgcttgtgttcttcaccgttaaatttcccaaatgagatgagctgttttctctcagttagtttctctcaactaacatggtatgagagccaagcaaaaacttccgtttccgcctcctccatttcggacctttaaatgtgttctagtttttagtgttgggttttcaaaaatctacaaatttgccacacccacaaaattcccaatttgacctagttttcaagtccaaaattgaggagggtatataagattatgggctacacctctcattgacaattggttttaaaatggaacccatgcaccttagccatacactcttacaattctaagtttttaagcatacaataacacattcaattttaatggaaccagccaagttgcagagccaaaatgggcttttgcttttgcattatagtgctcttttacacttttaacagtgtatttgattttattttaatgggtttacggagtttagctgtaaataatgtcttatgttcattattttt

SEQ ID NO: 266995 - DNA, 1174 bp, Cannabis indica
ggaccagataatgagcattcagagattgagaacacgagttcaaatgaagtagggagtcctaaaaaagacatgcctcagcgggttgccatgtactgcacaggaggaattcgatgtgaaaaggcttcaagttttctcctcagtaaaggtttcaaagaggtgattccttctgctgctttagattttgtcaatcttctgataattatggtcaccactcaccaccctattccaggaatgtttatgtccaaaaaattatgttgaagcaagaacaggttttatccacacaatcataaattggaacaagattgtttattagatcaccgacgaattaaaaaactaccaactggagcacactcttctgcctaacatattttcagagaggattgataaagggaaatggtttataattttatctgacttgacacatttcttcacatccttcttccttcccaggtttatcatcttgaaggtggaattcttaagtatcttgaagacattcctgagccagagagcctgtgggagggagaatgttttgtgtttgacaagcgggtttcagtggagcacggtttaataccaggaacttataagctgtgctatgggtgcaaacaaccagtaagtgatgctgacatggaatcccctctatgggagctcggagtttcatgtcctcactgttactcatcgaaatctgaagaagagaaggagagggcaagagcccgccaaaggcaatttgagacgtggggagtaattggtggtcctcacaagggtcgccggcccatacctgattctgagggtgtaaagaatcctactcgactctcaagttcagcctaactaatcacatcaagaaattataatgcagttgcatagaggagcttttattgtttggatctgttaatgaaatggcatgtaacaaatcctcaaaagggtcattatactcttttgggacatttttgtgatgagaatttgctgtattgccttttttttttttttttgtaaaaagaactgtattgcccaaatttgagtgtttattaagaaaatgcatattgcagttataacataaacttggcctgatatagattggctaacatagggggaatttttagtaaaaattcaggggcaagatatgctagtggtaatactaatactaatagttcggccaaagcttatcttgtataaaact

SEQ ID NO: 266996 - DNA, 3711 bp, Cannabis indica
agattctcatcagaaccgttggccctagctcgcccttctcgtctccatgttccttcttcattaaagtaagcctaacccatctctctctttcccttttccaatctgggttttatctctttctttctgttatgatctttattgtaatttcatagttgaaaatctgtgtttgtaattgttgtgactattcgttattgcatttttctcatttattatgtgatgattaatctcaaatttagcacaatgtgtttcaccaatggtgatttatttctaactaatcttgaaaactctgaagatgttcttgcttggttatttgcatattctgaagaatcaacatcatgtaatattgacctatttttatgttcctcacaataaggtgaatgatttgaaaaaattgattgctgggaataactgtttgccacttgagaatttgagacttattttgcgaggaaatgtattgcgtgacaacaaaaacggtgatgatacatgtatacaactcaataatggtggtaagggtctcatcttaacaataattggatttgttgtatactttgccccattactttgttggatttgaatcatgtaagaattgggatagtgaattttaggccaatgtatggtgtttaaaatttcatttcagattcactgatcgttgctgttaaaccgaagccacctgtaaaaactcttcgggatggacttgatgacgatgatgatgaagatgatgaagatctggtacaaagagctctaacttaattgaaatgaatttaatccatgtataaacttgctattagttttcatttttatttatcttttgtgattttatggaatcccagaagtttcaacttccaccaacatcaagccgatggaaaaggatgctttactcttttttgcatgacaagctaaagcttcctggtaaaattaaagttagttatgcctatccatttagataacattctattgactgattgattttttcccttttgattggtagatatccttttgatggcaattttcactatgagtataaagatgtggattataatcactatgtggtttatattggcccctgttgctcatagatggggtatcggtcctctatatgtaagtttgctaatcttttcttcatcccttttgtaatttagttagggtactcttgtgttataacttgtttaggttcacctgtgtgtgaaagcagaattagtctctatggctattctctactaattgctgatacatgttgctacctaggttgagaaagtaaaccctctcttctcattcttcaacaattttaagcataagtcataatgtttccagtcttgtattgggtcctatctttaaccagaaaaaaataaaagatgaaagcatatcttaccagggtctttgaagcagtaatgttttgtcaatttagttacagaaattttaccttcatctgtagttaagttgtcgtctaaagtggtaaccggttaccaccacatcaaaaaagttttcatctagagtgcttccatttccatggcctctggtctctggccttgaccatttaaaaatctatcattgaattgtttcctattttgcatgatgtcacctcagtaacttgataataaacaaagacaaacaaagtacatatttttatttgtataactttgttttactctaaagggccatgtagatagtgctattgattttgggggcaaagtactgaccaagtaaaagaaattaatgatgattagagatgattgatcatacatttgagctgccttgttcgcagctttttaaggaagataccatacaatttatttatgtgctatatgttcaggtacttgcaacgggctttgccatcattctcttgaatcttggaaagcggcagcctggtgatgtcaggtatacgtttatggttgatcttgtagtttatatatgctcttacgcgctggatattttacgacaaaattgaaaagatggattccacactaactgaatgaaactaatgcaaacacaatctatgtttggaatgccagaaaggagaatagagagtataagaaaaagtaaaacactaatcctatagataagtccaatctgagtaagctaattgaattggaggttaatcctagctcagcctgaagattaaaatattccaatgctgttgttacttgttgatcttgatagagagttggtcttgtgctgttttacaatttgtagctcatgtttggttggattgacagttatattagtgtcagaacaaatttcatatgaaattgatactctgaaattaatccctacacttaaatttctccatttattgttatctataattaaaaaaaaaaatgtccataagaacctgctttgtatgcggttcctctaggggaggtaaagctggaaaatttatcaaataaatcacttattgaagtgtttttgctaagtggacttatagttttctctaaatagattttgggttgtgttctttttcaacacattattagaaatagtcataaaatctgtaaccttcccttcagtttttcatggggccgatctaataatatatgctagagcttcctgcctctactcttaataattgtcaggataggattttgcagggtggtattgatggtgtatatgaaacattatattcatatctttgaaattttagttaagagttgaagaatatgatgataaagcttacaaacctaacaagtgatgaatttcaacctgtttgagtactgaaatctttttccgaccctatggcattaacttactattaaaattcaaggatgttgaattgtttaaccacacttgcattgccttttcatcttgagattcatgtatttgataaaatgatctcttgctaaccaacctctgcaacttattttcttctctggatctctatgttcgccaaatcttttcttgtactttctcatattctagtgttgggtttgtcttgtggaacagccttagcatttctgtctcataacatttttcattgccaaatattacagcgcatattctattttcaacgaagatttcagagagcttcctggaacacttaacgctgatcgtctggatagggatgtaaggtcgggtcagttttaagactgtttctgtctattatcttctgttgttggtgtttctacaaatgcgccttagcacaatacacaagtgctactctagtgatctttgttttgtggctgtttcttagttttcattattttcatctgtgctttttttttcaaacctcatgaaggaagacagtagtgatccttacctgtacagtatataattcataggtaaacatggacattgttttgttttggagataatgataaaaaaacacaaaaattgtacccttttccccaataaacttgttagaatattttttgtaagtgttgactgcgattctttgccattgtcgatacttagggttcgtttggtacatcgtattacacggttttgtattgtatagtattatattaaattgtattttatgtaaaattatatgtgatattagtttttatgggtatataaatatataatatttatgtatgaattaaaattgagaaattacttcatgtactattttttaatttttttttcaaattttcgatttggatttctaaaatggtttctccggtggtttttatgtgagttgctatacgcattttggttgtgatttaggttgctccgttagttacaatagcatttttttatatagaatttcataaaaat

SEQ ID NO: 266997 - DNA, 1870 bp, Cannabis indica
aagtaccgaataaaaaacgcttgaaacacaagccatcagaagtcgtctacttctttcattgaacccatttacactgagaaccttctctagaaaactccactccatcttgtcataagccttatgatatctagtttaatagccataaggccccctgccccttttatgttgaattttatgaataatttcttgcgtgaggatggaggattcagcaatcccccttccaggaataaaggctgattgaaaaggggataccaagtcttccataagcggcctcaatctattggagaggatcttcacaattaccttgtaagagaaattgcaaaggcttattaggcggaactgatctacattcaaggggaactccactttaggaataaggcatatgaaagtactattgagtctggggtcaatgtaaccactctggaaaacttccttgacagtagaacaaaggcaagatcccactatatcccaatactttctaaagaagcaacctgaaaacccgtcaggtcccggggccttcaagggatgcaagttgaacacaaccttctttatctcctcatcagatggaattttcacaagttcctcattcgaatggggagtgatacacttaacaaaaagatcatcaaactcatcttcagttgtcgaacgagaagaagaaaaaagctccaagaaatgggatttaattatccttgctatattattcttatccttccaaatctttccatatttgtccttgattgcccaaatattgtttcttcttcttttaataaccgtggctgagtgaaagtattttgtattacgatcgcctaaagcaagccaaatttccctggatttttgtctccacatgctttcttgtttcgaccaagaagctaacaactgaacttaaattctagactcttcttccttaagtgctgccgaaatggattactgttggatccattctagtcttcgctccagggtcttgatatctgtaacattaacattttgcagtgttcttttccatacttgtagagcctttcttgtattgctaacatttcgcaacagagaatcagttgcatctctgcttgtaaaactccaggactttgctacttcaaccctgcacgatgtttcccaagtccagacttcgaagaagcaaaatgggatgtagcctcttgctgcaaacagatgagtatccaagattattggagcatgatccgagattgaaatgggtaagttgagaacacccgaacaagcatattctgtcacccaattaacagagcaaagcgctctgtctaatctctctctaatcagtccaccattgaatcttttatttttccatgtatacttgttgccaataaagcggagatccacgcatcccgtattatcttggaaattcttcagccatcttgtgtcggctatggtaactttgttgcctcctattttctcctcttgattagcaatacaattaagatcacctatcattacccaaggaatttgacattggttgatctccatttccaaactactccagaaggcatccttaacttgtgcataaggagtaccataaactgcaaacaatttccaatgaatctaagtttggaaatcccacactgttgcttcaaagaaaccatctgtcgcataattgactacaagatttatgttgtaattccaaaataaacacaagcctcccgcaaggccttttgaactaatacaaactgtacctgaaaatcccaggttacgagccaaaacttccattctatcttcttctacttttttctccatcaaaaaaatataatacggattgtactttttaacccaaacctttaaggcttagggtgtcgggtctcttgcgaggccccgacaattcaacgaaaggcacttcatggggctg

SEQ ID NO: 266998 - DNA, 1453 bp, Cannabis indica
ccaattgcaagtcgacacatttagaaggtgctaggcaccactggtgcctaatagcaatgctcattgcccattagtaactttcattattaatcaatgtcttaatcatcattgcttttcttcataacaactcttttttcataccacatatataccatgactaattagtttatagaaatgccacgttctgatgaataaataaggaaaatactatttttatagtattatttagaataaataagatttgttcctcttgcataaattcctcgtgaaatataaaaattgttacaaatatctttctctagttatattctgtttagttctttaaacaatttattgatataatactaatgtacattaattttaaaaattcaaacaaaaaacaaatacaaaaataacattttaatgatgaataataagaatgtatatatacattgttagaactaaaattgtttgtataagtttagtgttattttggttatcttaaaattgttaaataaaccatcgtattgcatctatacctgtaatttgtggtagcaaattggttttaaaaatgaatagaatgtaacagaacgaagatatttataacaatttgtataattcaagtgaaatttttgtaaaaaaaattgccaaaaattggtttttatcttctttttgccgaaaaaaaattattatttgttttttcagtccatggaacaactccatataatataaaaataaaatatttttctaattaaatttaaaaagtaaacataagagctcaaatttttttaatatttttccatcataagtaatacatgcatttgatttattgagaaaattagattctatacccttttatattatcttcttttatttttactttttttaaaatctatcaaatttacctctttttttaaacactgaattaatttttttcctgtcacttcaaaatacttttatgtcagggtattttgagtacagtacatataaaaaaactatttttcaattaaatataaattagagataaatttgattaattgataaaataaagaagtatttttaatttactgtcttttttctgttggcaaagcatatacacgtatataaattgagaactacaagagtaccctccctgatgtgaatattctataatgatgatgaaatttacaaaaatattagaattttggtgaatttttacaaaaatactgtcacacaaatatttttttcaaaaatattgtgcttttataaacaaccgtagaatacaaaatagaacaactaaaacaacagtgaaacaactaaaaataactatagaacaacaataaaaattgaacacagtatacagtcactactacaaacatatcttttattttcgttttttcctttaataaattaaaaatccgaagataaaactattttaatgcacctatcatcgcttatttagtgaaatttttattatattttcggtctttgttaa

SEQ ID NO: 266999 - DNA, 1281 bp, Cannabis indica
ttttacttaattaatttatatgagacttaacattacacacctaaataagtggtagcattaattaatacacatcattattaaaacgatgctagtctatttttatatacagtaaatgaaaacgatgcatcattattgtagcactaccccacaacaaccaatgtagataaacacatatttaattggtatagtagatcgagggcttaccaaatgtggcagaattaaacgttgtccaaccatctacgacgctgcggtttccagtaatcaccgtctgattgattccatctccaatgatcattagattccatttattcttagcaacaaccacatactcttcataaacaccagcagtgacataaatcaaagagtacccttcactcgaatccgttttgttcggagtcgcattaattgcatcgttaatggtagtaaagttaccacttccgtcttgactcaccgtcacgatgtccctaaccaaaacctctgcatcggcaacatcttgatcggcgaggtttctacggcttacagtctcatacaccactctgttttgactcgacatcttcatcttcatgtgtccttttctaaaccccttaagttgttctcctttaggggtccaagtagtcactttcttcttcttaggcacccaacctctcgtaaccagagctagagagacgctatatagcttagtgtcgttggcaagagggattgatataccgttctttacattccaagacgacgccgttccttgtattccatccaaacaagtttgttggttagttaagatggcactgagaaaagtctggatgtcttcggcttttaaggtcgaaagaactcgactcgttttgttaaccgtttggaatgagcttgacaagaattccatgttgagagtcgctagagaacgacagtcctctagagctcgaaccgctgcaaccgataaggttgagcgtcggcgtaaatacttttctattaaggataagaattttcttgcttgtgacagtgattttcgaacggagaatcggccgtagtcgtagacattcccgtgggtgtgggttggaagtacagatttgcagtaggaaggatccggtgtcgttttgcataggtttttgggagttgtagttgtgttaggagaggtttctgctgaagttgagattgaattaatagctgagatataaaagagtatgagaaatgatgtagctaaaatggagagtagctttgaagtcatggttaatagtggtaaaaagagagcacttgagttggagaggatattgagaaagtagtagtgggatt

SEQ ID NO: 267000 - DNA, 2758 bp, Cannabis indica
ttaactcgcctaattaattcaaataaagctaatgtgtacaaaaaaattctgcaacaatctaaaggtaagacttgacaatgcatagtttcaacaagaggagatatcaactaaacattacaatgatgaaactaaggacactgcagattaatcaactcaaatataatttgccatacaaaatattgactgttacaatctccattactagtatcttagttagcagcatgaccaaattacttcatctcaaactttatacttaacatttgactttagtttatctatttcattcatgtttgacacacaattcaacaagataattaatccaaagttaaaaatcatgagatgctcaagtacattatgcttcttgtattatggtagaaataattattaagatgtcgtagcgatttttaatatttggctatgtattgtgctaaatttacgctcgacataagggtggggcagctagggcaggaccaacgctccaaaatgtaaccaaaaagtttcttttgaaaatactcaaaagtttcttaaaagaaaacttacttttaattttttaacatacatatggaatcaattcattatgcatcgtctactgtgttgcagcagaaaattccacctttgcatgctaaactcttggccattctagctggtttatagcttggtatccaaccacgattaacgcgatttagtattgaatcgaattgtcttaaaactatccaattaatctattcaaaggaggaaggttgttgagacattgacagtgtactaaattatattccttatttgtcttttttgagaatgtagatagaatttcttttgtatacggtgaaacaaatagggttacttacgctttagccaattatactttgactaataaaattagtgctaatggattgaagttaatccctcttatgctaatctcgcattgcaactagattcgcctatcctttgtaattatttttgaagaacttttgtttaaaaaaaaacctcatataacttatcaagttactaatgacctataaaattagatataaattaaagaagtattaaaaaaaggataaaaattaacataaaaaatagatatacagtctaatcaaaacctctagtatttctctttatttgcattattaaccggtttatttaatgaaattaggattattatcatatttctctctaaaaaaagattattatttattaaagtaaactataattatataacaatgatattttataatatttgaatttaaattactaagcttttttatatttatatatatgtattatgcctatacgtatatttcggctaaatatcaaaattaattatcttttcctccaatattaataataacaacatctaatttttaaaataatatatttgaaaattaaggaaagcccaaatttaaatcttatccacacatacaatttaaaattgaatttaaactttaatgacttatttctctaatgaaattaggattatgatctattaattaaattaaactattatcatataaaaatatcaatttttaatatctgaatttaaatgtctaagcgtttttatatgtattatatttggttaatttaaattttggtaattatcttttctaaatcaaaaatctactcctaatacgattaggctaattatttttcctataaaaagaagagggtttggatcgataattcataattctcaagtactcaaagtcgtgaacaaatattcactaactctcttttcttttcttattttctcgagaaaatattcacaaagtgatcgatcaaatatgggtggtgcaattgttgatcaggaataataatggaaaacaatatcctggaaaactcacatgtaaagttctttggacttgtattgttgcagcttcaggggggtttaatttttggttatgatcttggaatttcaggtacctaataacaataattatcatattcatataattactattattaaaaatctaattgtactttatttgatttgacctaataaataatgattaggtggagtgacttctatggattcattcttaaagcaattctttccatctgtgtacgccaaagaaagctcagtaactttatcagacgatcaatactgtaaatttgatagtcaaatcctaacattgttcacatcatcactatacgtagctgcattggtgtcttccattggagcttcaaagataactagattgttaggaagaagagtgactatgctttggggtggtattctgtttctgtgtggagcagttctcaatgcatctgctcaaaatgtttggatgcttattgtgggtcgtctatttttgggattcggtattggatgcgctaatcaggttaattataattaattactctcccattattcaattcatattcttaattttaattttatatttgtttctataattatataatacaattttttatgtactttatagttatattacttattttttattataacaagatttaacaaaaattgaaaattatgatgaatagtttccatgcacaaaaatagaattcaaaatagtgagtaatttgcactagtataaagctaaattaaaaaattagagactcgaagttacacatacactctaaaggcataagcgggctatgcctgtgtctagggctcacccagcgattttgaaaaatactatatcttttttaataaaagggttcaaattttttttttcctgtgacccactttgttttcggaccgaccctgactctaaccaaactaaattgtttattacttaataag

SEQ ID NO: 267001 - DNA, 1918 bp, Cannabis indica
actaatctgcacatgcggtttttttaatctcccaaactgtacctgcacggcaaaactaaaaaactggaaaaaccacaccgtaaaaaatggtgcgatgcagtgcgatttttgcatttttgcgatttggactatcaccaataattaaactatcacaaatacaacaaagcttgagcaacacttgtcaaaattaccataaggcttggaaataaatataaaaaaaattaagttttcacaatacaataattagtagactttagattggacattcacatattagacctaaataaatataaaaatttgtatttttacaattgtgtggtacggtgcgatttgaaccgcatattaacaattcaaaaccgcaagcattcacatattggacctaaataaatataaaaatttgtatttttataattgtgcggtacggtgcgatttgaaccgcatattaacgattcaaaaccgcaaactgtatttaagaaaaattcaaaccgcaaccgcaccacaaagaatttcaaaccgcatttttttgcagtgaagacggtttgagcagtttgatcaacacctctaatttcgagtgtgtcatacatatatttgaaatctatcaatgattgatgaaagtgagtaatctccgaaacaagttcttttattttgaggcaatcacatataatattatagctgttaacttcaaaagttattaacaaatctacttttcaagattatagagtttgcaatgagccagagtcaaaatatattaagagccagagatctctctcgtgaatcataaacagtattcactctcatggaaacctcatctttatagatagtgcactgacacaattgtaattttattcttttagaagatattgactgactctgttaattatttcatgcttttttgaacagtttccttcgagcaaaggggaccaaaaacctaccgttgtctcaatattattacttggtagcttatgaaagagaaaaaaataaagatgaggcggcttaaccgcaatgacccataaagaagttattggcaataataactattatgatacgagatcttttagctctatcccacttccacaatcacaaccattctcatcaattgctgcacttttcaagatatgtggaaaaatttaagatcctcgttcgattttgtcctgattatcaactgtgaaaatcctggactcagtgttttatgtcccgaagtaggacaaaaaaccaagaacaaaaattaaacatgacttactccttttacaattattaataacatatgtacagtatgtcatcatggataagatatatatctaataaattattatatggaaaatataaattgatattttatttataaaatatatctctgtgtagacaatatttatatcttttatgtgattttaattaccaaaatacttcttacactatcacttacccaatcagacgatagttgcagggtggttgtcgggtggttggtcgaaggttgcatcagacgaaagttgttgagggtggctggctgaaggttgcatcagacgaaggtttcaatcagacgaaataattgttagcaaaatgtttatgcaattgtaatgtaactattatgaaacattaaaaatcagtttagtgtttctacatatctaactctatctacatgtctctttatgatttaatatgaataaattcatcattaaaaatttagaaaacaacgaaaatacagtagaataaacattttattatagtattgatgtaattctttttagattatactttagttggattgtttgggaactctagttcaattttttgagatatgcattttatatggatctgaaaattgaagtcaaacattagttttatacaaattaaactagatttttggttgaattttagtttcgtagtagtttttctacacttttttcatgaattcgaaaca

SEQ ID NO: 267002 - DNA, 1597 bp, Cannabis indica
cagtcaatgattggacatggtcttggggctgctggtggattggaagcaatagcaaccattaaagcaataaacacaggatggcttcatccaaccattaaccaagatagtaccataaatcatacccatttaatttttatttatttttttcctaattttatgcctcaattctaccaatttggattattttaatggggtttttttgatctaaccccagttgaatttttttaatctttttttttttctttaacaggatttggagcctgatgttacaattgacactgttccaaatgtaatgaagaaacatgaagttaatattggtatgtcaaagtaattaaggaaaagggttaaccttaattaatccatttaaaatagttaattgtttatatatgattaattaattataatttcttctgattttacctttgcagctatctcaaactcatttggctttggtgggcacaattcagtggttgtttttgctccttttagaccttaaaaaagaataattaaacatctttaatttaagattaatttatttcagaactataaaactatttgtaatatgataagaggctatgatatgtgttgctatatatataaggattagatgagattaagcttattctcttctttacattttccaatgaataaaagtatctttcttctttctttctttgcaatgttattgtctaaagtttttctaatcttaattggtatcaacccttaataaatcaaaattatatagggaaaagcaaataaattaagaagaataagaaagaaaaaaaaattaaggctatgtttggaagttagattttgctggggaatgaaaaaaataagaaaaatatagggaaataaaaaattaaaattaaaagaaaataaattctcatgtataacaaatatttattatgtgcgtgattgaaatttattaaaaaaaacaaaaagtaaattttttttataagagaatgtattttttttcactcgaaaatcataaaattgtttaatcaaatagtctcttgctttttttttttttggtttgtaatattgagaaataacttaaatatttactataccataaaatattatttataatttatgaacgcttttatttcaaaaaaaaataaatattaaattatagtaaataataaagagtgcattatatagtataaatgccccttgttacaatatgtgtatacatatatatatatatataatagtggtttttgtgtagtcattgttgatggtgaccccttttacttcattgtacaaatgaaatgtcactctcttctcttcttgataacagtttttaaaattactcaaaatcttaataaatgtgtcaaaacttaagggtaaaataaatagataccttaaaagtacataaaataaataaatatgtatggcttattttggcaatgctaatgctatgtaccaaactaaactttgcaagttgcttcaaacataggttctaaaaaaaaaggattattttatacggtttttttatgtatatttttacgaaaatttatatagcacctaaaggaaacttaaatcgcaactaacatttacataataactcacatcccacatagaaatcactggagca

SEQ ID NO: 267003 - DNA, 2202 bp, Cannabis indica
cccagcccagtcaggtaaatagaaaagcccagcccactaattttagggcaacatccttatgtttattcccactctttcttcttcattctttctcagcggtggaacacatcttcttcatacctaaacctctcctccttctttgcgcagacaccaccacggtcggcagttttagacttgtgagtttcttcttcttcttcttcttccgacctaatctctttttctgttaatgattttgcttttagcaagttggaatcgacattgttgtttgtttggttttgtcatagtttgaatctggttgaatccatattttcatatctcatattagtttattttatgaataattgttattcgatttcatgtgtaaaagatacccttttgaaaaataataatcagtgaatgcttccaagttgaaaaaagtgattctttttgcgaatggttctcatttatattattctattatatgcagaagctaagctaccatggtgagaatcagtgttcttaatgatgctttaaagagcatgtacaatgctgagaagagaggcaaaagacaagtgatgatcagaccctcctcaaaagtgatcatcaagttcttgatcgtcatgcagaagcatggtaagtatatgcggaacttggcttttttcacacgtttaattcattacattgctgttgtgtttaaatgtaaactatttattgtgataggttacattggtgagtttgaatatgttgatgaccaccgctctggaaagattgtggtggaactcaatggaagactgaacaagtgtggtgtcattagtccccgatttgatattggagtcaaggagattgagggttggacagcaaggttgcttccatctcgtcaggttagtctaatcctatgaattatgattactaaattgtatgtgtttgcaacttgagcaggttcatttatattttgtactttagggattttgtgaacttgggattgttgaaaaagtagatttttggttttgcgaaatgctaggaagttttgaaattttgtttagggccacactgcaaattaagagttatatcttctttattgtatagcttagagtgtctgtctcattcattctttcatacaagctttcttacattcctctttatgtgaaaacttgcagttcggctacattgttttgactacctccgccggaatcatggatcacgaggaggctcgtaggaaaaatgttggaggcaaggttcttggtttcttttactagttctatccatgttactgagtgtggggttgtctttttgtcatcaattttgagattttctcgatattacgctatgtaggtcgtttgttttaatttagacgatatttgttcttaaagagggagtttttgtttttggagttttgctactttcatggagaaattcatccatgtttctggtttcatttatccattagctcaatacttaatgcttctaccaagtttctcattactttgcggtatgtgttagtgttactgtgttagaattgctgaaaagtgtttactcaagtgatctaaaatataagataaatgcaagaacagatgtcttgttatcattgttaaacaatcttctatttaagaatttttaatgttaaacaaatacatttattctaaaagttttgacattagtattgtgtttttattttttatacaaagatggttttggtgttaatagtagtgtgcctaacaaatagtagaccggatgtgcttataatagtagggaagtcacttttgtcactgggatattattattgattacttgtctcaggaaccaaaagattgaatggtttcaatgattgatttaacaaagaagacaaaaccattgtcatcttggggacacagaattataagacaactattgaaaaacagtgtaacatcatgggacagtggggggtcatctggttcaaatttttcatagcagattccaaccagaacaccattggcttgtgttttgttgagaaccaaatgcaaagtaacctgaactagattaccaatatgaataggctgtttagggtgttattgatcttttgttgagatgttaatgagaacatagtagaaatcagaagcagccaatgttgcagtcattaattttttaattcttgttgtccccagatctcaaagagagattcttatattgccattgaggggtgtacataaatttttttaaactgctcaacccgcctaatgtttatat

SEQ ID NO: 267004 - DNA, 1469 bp, Cannabis indica
aaggcgaaggctgaacaggagtgaacctgagctcggatgagattgtacatgttgaagcggcgcgacctggagtgttcggtctcgggacatctggggattgtattttgttagtcgctgtgcgacctatgaaaaatgtatattttggaatgttaattttacaaagtttaaaaacgggatcccgacattgtaaatattttattatattacaaagtttaatatttaatgcaaaagttttaatttgacacgttttttgagaaaattctttgattagcaaagattgcacagtaatcgaaaaagactgtagcgtgccttagcattagggcgttacaatttaacattatactagcagtccaactacggccaccaagtatgcaattcaaccaaaataattttcaaattaactcaccaaaccaaaacttagctcgggctggctgaaacttgcgggttctgattctctggctcaattctactgtgcacccgagctattgattcgagtatggcgagatgtggtggctgataatgtccttcttttctcgtgcttggcagctgggttcatgacgcttgggctgagaaggtgaaaatggctggtgcgaggtggagttcaggtgggggtaggttggattgtgtatgatctggttttcgaaaggtgactacgagttggttcaagttgaactgaatgtggaggctagggcttgtatttgggtgaggatcgactaaacatggctcggctgggtgttaattgcggctgtgtgagggttgaactgggtcgagctagcagctggattcgtggttgaacggaggtgtgttctcggttgttgttgagtgagggtggaagtgctgggttcgagctgggagagtgacaggttgctgggtgcgatttgatggctacggaggtgtgttcgaagtggtgtggggttcgatttgggtgattggagaggggaggttaggttcgtgggggcgactaggaatggctcgggttggtgctgggaggttcgaacggaggttctaggttagtagctgggggcgattttggtcggattggtgtgaagtgaacggaggtgatgttgttaatttcggcttgggctgggttgctggtcgaatggggttacaggttggtttgatttctggtgaaggtccaatgcttgggtgcgttggtggttcgaaggtgcggctgagattaagatggtgatggtgaactgagtattgaggaaggagacggctgggtttgtgaagaagatgaaagtgatggtggtagggttgatgttgggttgaccattaagtggacgagtcaacacttactggggcccagttgaccaaataattgggcccaagactgattaaactcatgtgaaatggggtctttgtatctccaaaatcaacttgggctcactcaattcaaaattaagtacaaccccaaatgatttatctgaacaaaaatagacaatatccaatgattgcatcatgaacaa

SEQ ID NO: 267005 - DNA, 1912 bp, Cannabis indica
gtgtactgttgtagttgctcagtaagctattatttaataaccaatggatgcccattcgacataagttaatttagtgaaaatataaaatgacatcagtttatttctgaaagttgcaaaatatgcacaaaagtacaattgacaatacatagacaaacgggtaatacttgagcaataatcatcagaatatatacaataagtcttcgagacaatataatcaaaggcatggcaagactagttgtccccaggaaactccttagactgcgggtttctataatttccaacaacaaaagaatttatccacaaagcacatagtactccaattgctattaattaatgtcaagtgcaaaagggcaggtcagatattggatcatgatatgtacgcctttaccagatctttgaagttgcagatgtaaccagtcctgggacaagtaatttttccattattcttcttagccatgtcttcaagggcctgccaagcaaaaataatgttaaagacctaaaaagtaaattaggatataaaatacatctaacatttgtttattctgaaccttagtactgtagacgtagccattaggcaagacttgtggtgggttctctgtgtccattagttctttagttatgtagcatacaagctttgagtgatgttgttttgagtatggtaatgaaagagctagttttcgaaaattctcctgcgacaaggggtcttccttggtacaatcatcttcgtaacagtatctacgtcaggtcaaggtaaaatagcacgattggattcagcaagcggtaacccataacacctggacagtgtacacacaaaagaaaaaacacaggaccatagctttcggatttttttctgcatttctagtatgctggcataaagatcaattggcaaagaaaatatcctaagatcaattgataaaccattacatgtaagtggatacggggttttcagagcagacaagcctgcttgtaaatatatatttagcaaaggctcaagagtcatgccatataatttacagaactcctgtttgaattggtccacaaggtaatcccattgctttggttcaaataaaacctggaggacatgaaaatcagcttgcagaatggaacaaaaatacagtaaaaaagtaacttacagatcaaagattcatctatgcacccaagtcattgtacattactagttatataaattaagttgagcttctgtaacaagattttttaaaatgctaaatagcctgtaagataatacacaatcaatttacaagagtctaactaataccaaacaaactactataacaagcaacaacatgaatcaagacaaatcctcctaagaataaaaaaaaaaaacctcttacacatctatattgtaatttggaattgaacttgactatcatttaacaccagtggtgcaaacaaggttgcccatttaattttaaaggccttttagagggggcaagggaagggaaggaaagaattttttaaaaagaaaaaaaaacaaatgtttctatgttcttccatctgtccaccaaaatcaagtagagaagttcacttggaaagaaaactagtgctgctaaataaccaacaaacaaataacaaaaaaagcagccaactatttgaactaaagagtaaaaaacatattttagaccaaacaaaaaggtcaccttgtatgtagaacactcagtagtactcttatatgctagtgtgacaaatacccgctgcaattctttcatatgggaagatccccatggtgcaaggtacttccgagcatatgtaatagctcgaaggttattttctagctcgtaccaactctataaactcttgaagtctcaactgaaattcgaatttgctctgctattaaagaagtcaatacagtacttggcattagaaaagcagtacatttactcgtgacactacg

SEQ ID NO: 267006 - DNA, 4083 bp, Cannabis indica
agttctggtttcaaactctcaaagattctaattacaaatcagagctagggttacctcacttgatctgttttgtttctgggagaacgacaaatcattttggtttaaacgatttgtcgtgtaggagtttaacgacttgctgtgtcttgccgtttgatcttattggctttaattctaggtcaaaaattaaccctgtcgttttgattaatattgagttggtgtagggacattcttggaactcaagaaaattctacacatatgcttgtaatacttaattctccactaatataaattaatgcacaaccaacaatcagaaggtctttctaggcttgtaatgttaggcttaggaaaaggtagttgaaatggtcatttaggctttcctatacctccaatcatgtcaccgaaattttttttcacacaatcccgattctcctttctaattacatgagagaattttttttttccatttttttttcaacaagattgcaacaactttatatttattatttttttaaaatttgacactggttatcagatttttttttccaggttgctgttaatcttaatttttttatattctcgcaactttcacactttttctcacacacatacaatactctctggagtactctgtggaacctctctattccctcaaaggttaaagttttaatttggcacgcttgcttagattggtttccaactaaatgtaacttggccatgtaagggatgaatttcattgatgttggttgctcggtttgtggtgtgggggaaggagacgtctttccatgccttatggggttactctagtctccattcgatgactttccaaatacagtttgtccttacagagtcaattcttcctagaatgaatcttatggggtttatcaaacaacatgcaacttttctccctaaagatgagttgggtttgttgctgattattttatggaggaattggttttgtcgtaatcaatgggtccatcataagaagttgttggacgttgagggtgttgtgggctagtctaaagaatttcttttaaggttccaggatgctaatggcctaatttcttcccattcttctatctcttggacatcaaatactcatgccgatcctctgacttggacttcgcctagtattgggatgttgatgctggtactgatagtattaataggaaagtgggaattagctagtgtggttctccgtaatcatcttggcatgaaccttgcatcaggggcgatacctgtgtcgacttttctctcactgcctatagctaaagccactacctttcaaggccttcttctttgcttgaagctaggctactctactattgaggtcaagtgtgactgtgagcatgttgtcaaagtacttaataaaaaaagagtacctctttgttgaatttgataatgttcttaatgacatttataattgtactatttttgttaaagtttctaagttctctcattgtaatagaaacgccaatggttatgccccataacatagctaaattggccctttcacttgaaagtgctaaaatttagtggtcgagtggtccatacctaatttgagttgtactctattttgttggcgtttggcattttaacgagaatatagataattttctagtcaatttttgtgagcccacataattcagggagatttaaattaaatatttgtatacagtatattttgatcgataaaattaaaaccttttaatttactgaccattaattgctgcaaattatctgcaacttgaaggaagtttatatttattagtatgtgacatattatcagtaaacaattatatacatatatcagaaagctacagagtacagatgaattaataaaaatgaacaactacaacatattataatctgttcaacatcgacattaaacatccactaagtaatatattagcattgatataattaaactaataatatatcgaagtactttattgattgcatcgatttaattattttgtaatacatgtctgcttatagaaaagcaattttcttgcccgtcgtagcatatcttaatttattactcaattaattagttgagccaatatctattctatataaagtgtgcctatataactgaattcttggtttatgagaaattcatgggtaaaataatacaatattatttatatataataaaataataaaataaaaaaaaacaaatctcattaatatatttgaatgaagtgatatttgatgctaattattgtcacaactctcttctcctcctcagctttcgtctcaggcgctttcattttttgcaaacattacggaaatatttttttgcccctcagttaaatttaccactcctttatatgcaaatttttcaagcacatttgtacagagttcacttatcgacaaaagggtaaaaagagaaggaaaaaaaagtacagtaggagaaaaaaactaaataaaaagaaagggtcaagatctcttctaaacaaaagaaagccgatcggagccgtcaaaattggactgtgtgttttcttttcttcaaatatattttacttgggctccactcaagccggatattccaaccccaactctatcttacacgcgccgtcatcagaggtggtacatccgtcactaccggtggtctcgatctttctcttcgtcacaggaaccacatggcgtcgtgcatgcgaagccggctgaaagcccagtgtcagctcaagcgccggctcattatcccgcgttgcgtcattaccgggcttggtagctgactcagtgtcggctctgaacaacagagaaacctcggctgtctcgactgaaaccatgcttgtctcggtctctttactgtcaccgtcgacgttgggtgtggggtcagactggtgactcaccgacgagtcatgactcgtggaacgatttacctgatcatctgcgcagtaactcgcccacttggattgagtcgtgtcgcagcgagttccctcgacctcgaactcggtcgccttccttgcctttggcttaacaacgtttctcttaaaccgacaacgcgtcttcgtcactcattgttggttgattccgctttgaatattaagttattattatcagtttttgctctttatttttaggatttcttattcattattttgttgaatgtgatctgatatatcaaaagatcaaatcttttatgcagatttgtatgtgatttacttgcaaactcttctcccattttcccaaaattatctgcagataatgaatattttttttgtttgatatatgcaaccatgccaactaaacaacaattttaattactttattgttatttgctattgtttttttttttggttatgtaatggatttgcggtgggtgagctgggagtatgtatatatataggatcggacatatgctcttattgtgtttgtacctaaaactgtctattgtgtttcaaagcattatattagtgcgactcaacatatgctcctaatctatgtgtgactttatacatatcaggttgttctgctttgtaggattatctttataacttaaccgtttactgtttttattttttcaacagagtacttgcttttaattgatgattgtgttgtaatgtgttcaatttttagtgttatggcatatgtctcaacgattggcaccaaactctagatgttgtgatgattagaaacggagaataattaaattattttttgcagaaatatagtttgtttgtctaaaaaactacagaaaaatcatctgccaataaatttgtatgtagatccaaaacgaacgatgagtcaattcaccgttcaaacagccaagtcgatggaagattaggataaaattttagtatggcattctattttaagactttatttaataattctttttccctattttatgatgccacttttttttaactttcgctacaaatgttttctttaaattttgcgaaacacctatattttcctttaaatttttcagaaacaaataataaatgttaaagtcatatattgttatgacttatcataaattatttttttaaattaaggataactacaatattaatattcaaatattgaaattaacgtactttttatttttaataacaatttacatatcataaattt

SEQ ID NO: 267007 - DNA, 783 bp, Cannabis indica
gggaagctgattttgccatgtacaagtagtagtaccagaaatttatctgtgactgttacattatctggtaacattgccttgtttgcaatacagagcctaaaacgacagggtttagtgactcaaattttcatggtgttccataagcacttggttgaagttttggctgcaaatgttgtagtccaccatacccaattgactattactgtcacagcttttgtgaatggtaatggaagcaatattgttgaggagattaagagagacattttgatgttatagagtttgaattttaagggtatatagggatatgaatctttgtggagtgtggttcttaggacagtgacaagaaattacttaacaaaagaacttgttcatattaacaaaaacaggctaatgacaggagttaatggattcaatattctcaaggccatgtgaggttgagcctcaagctgaatctttcttattttgtttttatttccctttttaattatagcatagtaaaaaaagtaccattctaccagtatacgaacagttctgaaaatttaaaggacctatatttgtactgctggtaaaagtgtctgagacccaaatcattgccattgcaaatggtccaaatttgtaaaatgaacttgtcgtaaaattaggactaaagtgcagaataaaaaacaactaaacttaatcaacaaacaattagtaatgacaagattaattgatcacaaatacgaatagaagaaaacagggatgaacaaagtattaaaaatttagaaacgattaaaccagtaaaac

SEQ ID NO: 267008 - DNA, 3645 bp, Cannabis indica
tttgttttctttttttttttctgtttttatttacgttttaagaaaattaatttactttagttagtaaaatcaggcatttattcataatgacaaaaaatagaaagttattcgaaatgacaaaagagtcaaaggtgtaaaaaaataaacggcaattggataggccggctagctcttttttaataaagtttaacaacggaagacctggacatattatataaaagcccttgttgacgtaacagataaagatgttacatactttcatttattattagggcataaagaggaagagcatgaagaagaaatttcgtagataaattatattataactaataagcagccaataaaaacaagagtactttcctgggttgaagacaagtagttttgctggcttaattggtaaaaaattcgagagaatagtaggtaacgtcattcattcctctctctgtgtataatgcatacaaaatatccacacattacaatactaataataataacgttatatgttgtatatactcttgccacgcacgccacctgcacatcacacacagaatattcccacatccccacactttgaaaccgcttctccactcccaatattctccaactccattctctccatctctctctcaccaaaacaaaccccatttatcgaacgcccgagttccccacattttatcctatatctcctttcacaccattcattcccttgttattatttgatactttttaaaggtggcatccgtagggcccaacacttttaaaaaatagcattctataatttattaacgattattccctgaaaaatattacgtcgaaattatataatacccgatatacaattacactaatagggatatggcgcgtaaaaatgtactagaagtagaacccgtagtactttttagcatttctcgtttattccgctttcttattttgcatgcttacgtatatctatatgtatatatttatatatatactctaatactcagtcactaaatgatcacctcaaacataccaacactaaaaactgttatttttagttacaattttttaatcacaatataattttttttctgactaaatgtgatttttagtcacaaaaaaatattacttgtgactaaaatatagtatttaattacaagttgtcactaatttaattttattcacaataagtattgtgattataaaaatacatttagtaacaacaaattataatttttgagactaatacttttagccacgaccttttagtcataacataggaataataatttataattagtcacaattttttacttttaattacaaattttgttgtggctaaaagtaaattttttttgtatagtatattgcaggacttcatccatccacctccccagacttgacactcacgcgccgcgcgtaaatatataaacatataaatgatatatatgatgtgtgcaaatggactggatatatattatatatgcaaagtcatatatataattctttttcgggctggaattaaggagaggggatacatgtaagataccatcatcaatattatcatatggttttttgaatttttgtaacgtcgaatttatatttggcatgtttccttgaggacatgcattttttatgtcattatttatttatttgaaaaaaaaaatctgtgaaagttaagtaatatatctgcttattccttccacatatgttttcttgttcaatataatatgatatttgaatgaatatatgcaaattttgtaaagaataatcaccaataatgaatggcccctatgctatatatgattctcaataaatagagaatccatgaataattattaatgaaccatataaatatatgtatatcaataatagttgaagagagtatatatatatatagtcaaagaatgtattgaaagagacctcttaataaagaatgtcttggtgaaaaatgatatatcattattataaagaagaaactcttttgatacatgtatagtttttttcccccaatcatgaagacatttttgaaccaaaaaaatcaggcctgaaattctgtgtcttcatttttctttttcacaatcgaaactccaaagactaaaaaaactgaccccccctagtcctcgtaccctagcgagtgtgaaaacaagtatttttttttttaaaaaaaaaaagttgcagaagaagacaaacttttgctacggagtcttacttggtatttattctctttctgttgtaacccttttggaccctttctcattctctctttctctctcttttcttcttcttctatctcttaatttctctctgatctatttggaggagacagtacactgagagaatatatagagctatagaaattttattatatatgggtgatagttatctaagtagttcagtagtgtcttctcttgatcaaaatggcactggggaacagtacaattcttcaaaatcaggtgtaattaaatcatcatcatcatcttcttcttcttcatcatcaacatcatcatcatctggtgtaattgtaatgaataatattgacaattcaactgaaatgaaaggtagtagttcggcggtgaggccttatattcggtcgaaaatgcctcggcttcggtggactccggatcttcaccgatgctttgtgcatgctgttgaacgccttggaggagaagatagtaaattattatagctcactcttcttaattataattattatgtatagttaattattaatgaaggttaattgatttttatttttattaatttttatatatatatatatatgtgtaggagccacaccgaagatggtgctgcagataatggatgtccagggccttaccatatctcacgtgaagagtcatcttcaggtacgtaattgatcaacaatcaaatccatgatacgatgatgctctttttctttttcgatctttttcaatattttctatatatattcttgattaattcgagatttttttatttttttactttcttaatttaatttgatttggaaaatatctcaaggtttagttctgtcgtgcgtacgttataataattatttttgctgtgatcacacagatgtacaggagcatgaagcatgagcaacttattcaaggtatatatatatataaaatccttaattaatttttattcaattaattatccattaatggtatttatatacatatatataaatatatataaaattacagaaacaacagtagtcacttgttttattgtccattcaatgaatttattaaacagctagctcaatttcgaaaagtggttatgaaaaagaagaagaagaaatagaaaatatctttcaaaaagtgacttttggtataaaaaaatctaccaaaagtacagtaaagaattgcttaatacgttttagaggtttttcttaaataaataagtgagtactttcaaaataaataaataagtgagactccttcggttagaaataatcttaaacactaaaacgtatatatgagtgatgtgttggtgtcatattttttcaaagtcagagctagatgatataggccaccatatataggttaaaagaatgtatggaaatccatatatttatactttggtatacgttatttgtttatttaaagttatatatatagtttttaatatggcaagtaagctgtaattccatatatatat

SEQ ID NO: 267009 - DNA, 2350 bp, Cannabis indica
tatatatatatatatagatgagatttaatttgtgtttatatatatatttattagagggaagaaggaaacaaatgagctttgatttataccttagccaaaaaacatgatgagatattagcaaggactcttgagcctggttcctacaagaaaatattgtctcttgttattgttgatggattttcagctgagatcactgaacaacaggtatatatttttatctttatatttttcaattataaaaaaatatataaaaaatttcatttttcttcttattaggccaatgtgcttagatctgccaaagaagtgaggttggtggagaaaaatcaagaacttaaatgaatctgtttatagtcagattaaatctgacccgatctatttacactcttacaaatctccgttcttatggccatttgaactcgtctcaaattaattaatttgttaccttaaaggggtagctaaagtagttttataattaattttgattttgttaccttaaaaggggtaaactattatttaatatatagtgttattattatgtatttaatatattcaagtagcactattatacttagtctactttgaatatttattatcattaattaatgtccagcctgcagttgctttgatttaataatgttatatatattattgtgtatattaattctctttaattttcattaatttgatttactaatgctatatatacaggggcggacccacattgtagcgagggggggcagtcgcccccctaaaaaaaaaatcgagaaaaaatgtatatgtattttaattagttacagcatctatttgtattaaaagatgatatttatagacataatagtaaccttggtgtaatggttaaggtagttggtaaatacgttagagggtgaaggttcaaatcccactaactacactttatatttttttttatacgagtttagattattttgtaagttgatatttatgagaatagtaatttattgcatagatatataagtttttaacttattatacaaataaatatttaaattatttttagcaataattaaatgtcaaattattatttatgtgtgtcatttttttattgatatatctaaactatttttttttcaaaaaaaaatttaatgacgtagacaatcaaaaattatcacgtgacaatttatttaacacttaacatttaggtataatctacagaagttctagaaatataatttaagtattattatcgctaaaaattaaacttaagtatttatttaaaactgtgagttaaatttaagtatttatgtcacaaattattcttttaaaaaatatacatttatacttacagttgttacttgttacatgtaaaacttatgttaaatgattcataattaacgtgtagacttacagttgttacttgttacatgtaaaacttatgttaaatgattcataattaacgtgtagcaaaaatattaaacttgtcataatataaacaagttaatgatgttgataatttgagccaataaataggttaattaggatttttaaacattaacatgtatttaatatgttttttaaactttttaagtcatttaaaatttccttattattggatttaagaatttttatcaattttgtcaatgtgacgattgttcatatattaaattgtgctcataattaactttagatatctactaaatcatgattaattctgaactttaacatatattaaattttattctcgaaattttcatccacgtcagactttcttcagtaaaattaggcaaaaatttttaaatctaacaatctcaatagttcgaaaaaaaaatttaacgacctgaaaaatttaaaaaacataaattagtatatatcaaagttcaaaaggtaaaaatctaaattaactttaacagattacacagggttgtgttaattcaacacgtttaatttatatataaatttgtgaaatttttgagttttgataccattaataaaggggtcatgctggtttgagtttgatatttatttgtaaattatttaagtcttgatacgaatattatatcattcaaaggtagatttaaataagagcatggggcatcaagatgactagctagcgttttataattagttagtaaattttctatattctttattacaataaaataagtaagactcgatattatattgtaacgctaccgcttcaaatcttcattgagcttgtacacccacataataatgactcttatacacgagtacgtcactctggctgcttcatggactgatgacaactgaccctacaaaccaacacgagatccggcgtgttttgtcctcactcgcatgctttccgagaaaattttccaagagatcacccatcctg

SEQ ID NO: 267010 - DNA, 1111 bp, Cannabis indica
atgaggaaattggtttggatccagcacttgtgaatgttgtgacagttcttgaaccattcctttccaaggttttttctgttcttttctaaaaaccttatattattgaaataatgtaatgtgtgaagtattatgtgcttctaatcgttccaagtaaatgcaaattcaacaacataactttgatgcattgcttggtgttcagtcttatagaggaaatgcactaaatatggaaatgaaagatatatttatgtgaaaacggttgaaccatattgacaggccactatgtgattctttaaaggttgatgaatatatctattttggattttttttattttggaaggtagattctattacatagacctggattcctttgagagatctgaatcatgggcattccttcattttgagctgagtgttaataaccattggcatcttctactttgcagcatcttcttagagtagttccagtcattggcatacttaatgacaaggaatcattcaagcctgctcccaatcctgatgaagtagaggctgtatttgatgccccattggaaatgtttatcaaggttccctgtcattctatatttcacttttgtcaaatcatgtctaaaatggatctttaatagaaacctttatatttttgctttgtcccaggatgagaacagaagagtagaagagagagagtggatggggaacaagtaccttattcatttctttgactatgaaacagagaataagaagttcttgatatggggtttgactgctgggatcttgattaaagcagcatcagttgtataccaacggccaccaccttttccagagcaaaatcctatcttcaaaattcttgaaaatgtagaaaaggataccgcattgccctagttataagaagaaaaataattctttggagtgtaataatgtgagtgtgttatttcacctaattttgaatctgcagtttatataaacatcttcagttttgaagctttaaccctctcctattatttatttattttttttgacaatgaactttcattgaaaatactccaaagtttatacattaagaaaagatgaaaaatcatctatccaaactagtttatcatccaccctgagtgcacga

SEQ ID NO: 267011 - DNA, 1210 bp, Cannabis indica
cttgtcaatggagaagtgagctagaaaattttccaattataatgtttttttggtttggacgcttctctaactgcacctttatatttgcagtgatttatgctatcttagagactggagggtagtagtatctgtctctgaagcttttgggttggtatttatctggctggagctgttgatggtctgcggtttttgtgccctgttgtcatagagttctttttctatttttgtgttttttttttattattctcttcttttctcccccttgaaacagtcttatacactagactatgcgctttaagtttgtgttttttctcatatgctgatcttgtatggattgattctgttggctaatagttcatactttatctgctatggttgtttgattttcgtttgagaacccttcagttttttatctgttttagtagtaattactttttcttttaattattattttaacataaagaaaatgatggtcttagaacaaaccttaaataccagccgacttttgttgtttgggaaaagatattcaattgccaaatcaagatgtggatgacgcttgtgtttttaggtgatttgggttttgtactatctaatgtcaatccttaaaataaaaatacgaataaggagcttttgtaatatttctgcttcatctaccgaagtaaacgattgagaaaaacaaaatgtaatttgtacgggtttgttggatcacatctaaacatttattggatgttggattaaattggttctatacgtggtatgtattttatatatatttattggtttaatttgggtttattcaatattttagacttagtactttttgaatcggattggatccatctaatattttaagtccatattggattggattcatccaatctaagaaagaagagaatttttaatgttaatttttatgtatatattttacgtgtaataataaaaaatttaattactcatccaaactaaatgaaaatactaattagttcgattggatgttggatgtattgaatttttagacacctcatccaacattcaattggatattcaaaaataacatacaattcaatccgatcacaattggatatccaatgtttggccgtcggttgtaattggatcggtcagttgtcattggattggatgatttatgcacacccctaaggaagtccacgaggaaggagagattgctcaagtggggtttggcggttgcaga

SEQ ID NO: 267012 - DNA, 800 bp, Cannabis indica
agtatttggactcctcgtcaactggtatgtgttgtacatggtaatttggccttcttgttgatatggtgtactccacatggcatgtggataaaaattagaataatagggacattatttatcgtttttaaaattggcgcccttaattttcttttttcttgcagtgtagatagtttaataattagattaattattgaaatacatcaacatttggcttatacagcggtctccatttggtcgtccatgttatttcctcctgtcatactaatttaagtattaattaaactttgctaggaggtgtaaaggttaaaacatttactatggtcatcaaaaattaatgaacatgaacaaggcaaccaaacttttgtatgtatttgtctttttacgtggagagaaataagagaatgatatgatgagacatccaaatttatttacttatttattttgctagctagtagtgtcctttccttaaacgtcaatattagccccaaatcaggcacacaaatactaaaggatttaaggccacaagccgcaagaacaacagcgaaagaacatgccataaatgttgtttattttcataatacaaaagtgaaaagcaaagctgtctaacaaatttatttattttatatggatatagtaaattttatgtgtaggtttaccttatttattatggtgtatagagttttttttagacagctaattatgagacaatagttttttgggtacgaactgctagttgaaaacgatattacgtaataaacaagtgaatagagccaaaaatttagttgcttatttctttttaa

SEQ ID NO: 267013 - DNA, 3188 bp, Cannabis indica
cttaaatagaatttatacattatatacataataatgaaataaatcatgtgaaccatgcaacataaaaatgttatttctgatctttattaactaataaatctgattatattgaaataggttttatttaggacacaaaacccaacacttataatgtatttatatcctattgcttatatctcgcattatttatttttttatttcagtctaataataataaaaatagagcaacaatacaacgtgcataactatccctattatagagtaactgaatttgatggtaacttccaatccgaatggagaattaaaatagaacttcttttacaaaaagaaaatatatctaaacttgtctctatagaaactccctagctcatattacgtgaacattctagttacgttgtgaggagagtttataaccgatggcaccataataatgttcgtgctaggtttgtcttattggcttcattcaatgaagagataagagatatgtatgactgtttagtctatgcctgtgacatctggaagatagtacataataagtattttgcactcagaccaatttacttatgagagaaatactcatcataacaagatgcatattttgacagagttacgaagctagaaaggaaggtaaatatgattcgcttttcttcatgtttataaacaatagtgaattaaattattcttaaccactgacattgtttctctcttgcatgtaaatttgtgaatagacgacgaatgtaatttgaggttgtgagacttctacaaagttcgagatggagaaggattttagaagagcaatgaagaagtcaattttttattttaaattttaaagacattttctattagatttattgtttaaaattttagttgcatatttaaagtttatttcatttaaataattttattttggaatgtctgaggaaccaataatcaacataaataacaactgattaagcaatttattaatgcgtaaaaggttgattttgttggtcttctcgagactagagtaaaggctccaaaacttggagtcttgtacttgaatgtgtttcaaggttggtgtttttcttccaacatagcatggcatccgggtgggaaaattgtaatagcgtggaatcctctgcgattcatggttgatattattaaatgcactagccaactaatgcatttaaaaatgtcaactattgatggttttaacagtttcttaactgtgatttatgctgctaataatcaggcagaaaggagaactttatggaaggacttgagggagctgatatacttcagataactggttactcatgggagacttcaacgatatactggctaaagaagaaagaattgtcttaagagtcaaatcctatcctgattctgacttccttcagtgtgtcaactcttgtgagttagaggatgtcaagtctagtggcaatttttttacatggacgaataaacagcctggagaggatagaatctattccaagattgataggattcttgccaattaagcttggataaatagatttgagtatgcagaagctgtattccttaacgaaggtgtttttgatcattcacccggtattttaacgcttcatcttggtttggtgagtggaaagaagccattcaaatactttcgaatgtggaagtcacaccctaagtatgagttggctctgaaggatatatggaggacttcggtaagaggctcaaagatgtatcaagtggtgtccaaaatgaaacaatttaaagtgtagctaaaggagattaataaggagggcttctcagatcttcatagtgcaatgcaaaaggcaaaggttgacttggataaatggcagaatttactacagcagcagcctttgaatggggaaatacatagtaaagaaaaagaggccagggaagtgttaatcaaggtgcatacagattattcttcgtttctgcaacagaaggcaagaatggcgtggattgagaatggtgatagcaacacggctttgttccatgcttgtattaagcatagaataaggcaaaaccgcatcctctcaatagaagcacatgatggaaatcaggttattgaaccagagcttatcactgaagcattcctgaacttctacaaagacctgcttggaaccaaaatggaaaatagaaggatagtgaagatcagtgtgttatctaaaggagttggggtttctactgagcaatcgtaaatgctaactcggggattctctaaagatgaagtgaagacagcagcttttagtattccagtgggcaaatctccaagtcctgatggattctctagtagtttttttcaagataattgggagactattggagatgacatatgtgatgcagtaatttcttttttggaatcaggtaatatactcaaagaaatcaactcaactattattacccttgttccaaaaattaaatgtcctaacactgttaaggattttaggccaattgcttgttgcaatgttatttacaagattgcaacaaagctattgagtgctagaattcgagacattctccctgaaataatttctccttctcaaggaggatttattaaggggagatttatagggcataatatcatgatatgtcaggacttggtgagacattataatcggaaagctaataaaccaagttgtttgatcaagctagatctacaaaaggcatatgacactattgaatggggatttttggaagaaatgctagaaggtttaaactttccaaagaagttcattcagctaataatgaactgtatcacaactcctaggttctctcttatgttcaatggatccttgcatggattctttggagctagaagaggacttagccagggggatcccatgtctcctctactatttgtcttgggaatggaatacttgtctagactcatgaggaagataggagagaagaaggactttcggtttcatgacagatgctctcaactccaactaaatcatttggcttttgctgatgatgtgcttttgttttgtcatggagacacacagagtatcacttatatgcttaaggccctcaaattattctccctcacttcagtattacatccaaatgccagtaaaactgcaatttattgtagtaacatgcaagaaggaagtgtgaagaagttgattaaagcatcagggttctctagacaagtattaccatttacttatctggggatactgttggaattattttac

SEQ ID NO: 267014 - DNA, 1968 bp, Cannabis indica
aaacttttagaacaaatacatatagtttagtaattaactcattaattaaaaaaaaaaaaacaaaaaagatgagacacaatttgatccacctgaaaacacgtcggtctgaataaaggatgacaagaaaatataaacttacatgctgtaccaaatttaccctttaaaatgttagcaattaacatgacacaataatacaacctatattattgcaggttggcccaatactcattgttactaagaaactgaaagaaaatgtttagacacagtaccaaacagacctctccaaaagaaggtagagtttcgatacttttcttctattgcaaataaattattctcagataatggcaggttgtgttgtacaagaaatcgaatgagtaattgagctttaagtaacatgtcaaacttgattatataaaatatagaataaataaaaggatgttgttgtaccttgactaaacaaaagtttgaatttgaaataaccaaagattaaaaaaaagcattgaccaaaaacattagagatatcttaaacatcatattcaatcataatgatacttgaggaaagtatgatgccaatgacataaccaaaggagcattacatgttttgatcaagtgttcatgaaatgcaattttaatgaggaaaatcattgtaaaaatcatacaaccagaaaacagttgaacctgtctccatatgaaatctagagagtgttgtttcatcttttgattaatacaatgacagattaaatacataactgtgttctaatcaagggctcacaactatcattgactgtttgtttatcatttcattgtcttaattagccccttaatgagtacttcttccctgtaaaaggctggaatttaggctcttctttcttctccgcctctggttttttcgtttccttgggagcttcctgtaaccgatatgaaattttgagaacattctatgcactagggaaatgaaatttgagggttaaaaagatgacaatgaaaagacagaagaagaaaaacaaaagacaaccttctgtgaaggtgtacgattcggtccaaaaacaagctttccttgagattgacgagcagtagcttgagaactagaccctgtggaaggttgtgccttaccatgggcaacaacaggatgcttgtcttttgaccctgaagaagaagccggtgctggttgagtcttcaaaggtttcccgtccaagcgcctacctgacccggtaaaagggttaaacttaggttcttcttcaacaggggcctcttcagctacaagacatgagtaaatttatgaaactcgggatgattgccgaagtgacagaatctcaataatgattttaattgaaaagggtgacaggattagtgaaaatttaccttgagcagatgccttgtttataggaacatgttgaacaggcctttcaggttcaacgtagtccaacggtggggcaaagtccacttcacagtccgtctcaattatacttatggcgtcagctggctttgtttctattatatttatgtaatacttcttgttgttataagcaaccataatactatcgccagtcgataaacaggagaaatttctcagcgttgtctctaaactgcacatcacaacagagtagaattgatacattaattggtgcaaccatagcaaagggaaaaaaacacaataattgagtttatcatttaccagtaaaaaattatgaaacatagaatgcaataacattatcccaattcttttaatgttaacttatctcatgttagagggataaatttggtgatcaaattaatttttttaaataggttcattcgtgagaaaatttatcaaattatatcacatttctcaaacatgacagataagaagaactcaaaagtcctaaggcaaactaccaaagttgcatatacatgggtgaaaagcataccgactaacatggcagatcatgcataatgttctatattagtagcacattttcattcaaggga

SEQ ID NO: 267015 - DNA, 1448 bp, Cannabis indica
cgttggctcacggataccctttgtgtggctagcagtcggggaactcctcttcacggagactcttctcgcaaagttggtacgtactttatctttttggagcaccaatcgaggagtctggaaggctatgacactttttccttcctcgattaaaacccatgtgtcatgctcacgaaaatgtggataacaactattttttaacttttttaaaaatttatagtttgagttgctcgagtaatttctcttgtggtttttatgtgggttgatatgtagattttaattgcgatttaggttgctccgttagttactataagagtttgtatgcagaatttcgtaaaaataacaaaaaaaaaaaaaaaaaactatttaaagtaataaaaaaacccacaaacaataaagataagtggtttcactttgttttattcaagcatccatttatacttctatatatttttaaagagcattgttgttagctatcagtggtgcatactactttttagatgtgtcgtcttgtgataaagttaatacggtacataaaatctaatacttagttgacctataatactttttatcatttcttatttttttttttattttgcttccagtcatataattacattgtgttaaataattacttttcagtgccaagttcaataatttgattgtaaaataaaattgtcaaacaaggaaaaacacaaaaaacagttctcgtgataagaaggatttaaatgcgaaaattgttaaaatagtatggtagatagatataaagggtaggagatgctgggcaggtagggagatttaagtgaagaaattaaggataccaatagatgaggtttttattaagatagttaaatgcaagagccaatttgagaggtccccataataataattattatacttgccacacaaaatagaagagaagaagaagaagaagaggaagtagacatttgaatttaaaaacgaagtgaggttaagtgtggtgaaagagacatatagttgactgggttaagggtgacgatgactttgggatccatcgctatcaaccaagcgaccaccacctaaccacttgaaccctcccatacatcttagccacacacactatcatatcatatatccaatgcttgttcttatcttccacttttctaatttttaatgaaattatataatgcatttattttttaatatatctctctcaccaaactttgttaatttcctaccagctacactttttctaagatgcgctatgctcttaacctacgcacccccaataaatactttttccttttgttttttaatttaaccctataagttaaacagacaaactcatctactcatgcagtcagaagattcaccgtacaaacaacatcaacaacaatgaaataaaagttaggtgcatttaaagcttttcttttagtactgatgagagtggaaataagagagagagagagaga

SEQ ID NO: 267016 - DNA, 1502 bp, Cannabis indica
gtgtacagaatcgatgagcaaatccgaagttttgatgatctttccttgaaggacatcaagaagtttgcgcactcagtgactgttgacaaatcctctatctacccagataatatgttatttttgactggtgctacagatgttgtgaaaaagattcacagccacaagcttcctgtttacgtacaaacattcagcaatgagtttgtatcacaagcatgggatttcttatccgatccaactgtggaaataaattcttatgtcatgggagctaaagttgatggtataatcacagagttcccaaaaacaactgctagatacagaagtaagtatacgtagttttctgttaaattgttaatgctcttttgaccatcactattgaattatactagccagttatttttcataataacaagttcatttatgtaaagaaatatacttattttagaggccaaaagtgaagttcactgctaattgagggggtttgatattgatgcaggtaaccgttgtttgggattgggtgacaacacaccaccttacatgagccctgttgagcctggcagtctgatggaacttattacacctccttatatgccaccagctgagtctccagacccagttctggtatcgggcgatgtggttgagccacctttgtcttctgtctaagccttacaccaatgaaaccaacatcacacaataataatgcgcagcctatgctccttcctgctctcctcaaactggtatataaatatatataatacttatatatatttatatgtatatgtctttggcattgcttgatactcaattgtgttggagatttttgctgcttcaatataaggcaaatccattgttttacggatccctttcttctactgtgaatttctcgtgttgatgttataattatcttcattctttttccaaatgctaattgttgaaaatgttgagcggtagtgtgaccctatagactgagatattgtaatttgttatttattataacaaaataaatataattttattgtatatttgcctatttgttatgagtgttttataagtatcatttattgtgattattgatatgagagcctatatcattttatattgtattgtgcatttgatcaaataactagagaattgactgcgtctctcacaagctgttgtttaaattttatgctcacaataataataaaaatctaataaaaaataagaaaatttacgtaaaataacaaaattcatacatttttttttgatatatttttaatgccacatgagtttttccttttatactttttacctttttcaattaaacttttttataagttgtataattacatttatacagtttatacatatttctctagctctttttctcttcctcatgttgatacgaatcactaaattcttattctttaatcgcacaattgttatattattttgaataatataatattacataggttaaatatttgtaacatattaataagtgaagagttacttgttactataag

SEQ ID NO: 267017 - DNA, 720 bp, Cannabis indica
ttttttttaaaaaaagagaattagaggttgaccaagttaataaaatgaattagttccaaaagaattggagatggtagaagtactaataataagaaagaagcaccaaataaaatggggtttctcctcctcactcgttctaactccaatttcttctcctccgattttgttgcactaaaataattactaattctgattaattaatcttaacattatttatgttcaataaaaaccacgaaatcacatagtaacttcttctatcttcatttacactttccttcctttcctatcgttttctctttcgtacttacatacccaactccttactaaacgaatccgctttatttttcaccaaaaaacgcgttctttattattattttgtattatttcatttccactatttaacagacctttgtttctgtctcaaaaaagaaaagagagagagagagctttgtttcctcgtatttcctcttaaaattttaagcaagtttattcatatattctccaacagtaattaattgtgttcatacgcgttttgatttgattctccatctatatatataaatcgatatagtagtagttatagttactggtgaagaagaagaagagggttttataagacttatgagatggaaaattatctgaatgaaaattttagtagcagttcaggtcgaaacactcgtcggatgaggcgttgcagaaatggagacaactatgctccgt

SEQ ID NO: 267018 - DNA, 2354 bp, Cannabis indica
atatttattgactatttttatttgacccctcatcaaattagatattatctttatggtatccacatattaaaatcatgacaattatgccttaagtcataaattttatttcaaaatagattatataaatttgacttatttatttgatcacccaaacacacattttatatatacaattgtgaccctaataaattcctaaagatagtcaagtaatatgatacacaatggtaatacagatagacagggaagaagaaagtggtggaataatttttattcaagaatagacaagccttgggttaattgtctctcggaaaaatattgcaagaagcactcgttttggggtactagagctagggacaatgactcaactttctggaaaggtgttttgcattctagagaagttatatgcagagaagcgatgactctgttggggaatggagaatcagtggacatttggcaccaaccctggatcccgtggctagagtatgaagagttccgtagtttgatggatgggggaggtcgagattcccctacattaagacaatagttgatgtttcgctggataatgggagatggaacatagagcttgtaaaggaaatgtttggtgatgtcttgggcgatagaattggcagaatcccccgattgccagttgagcaacatgatcaaattgtttggaaaaaggcaatggatggccaattctcggtcaagagagcttttgaagcctcacaggatcgtgatccaaatgaagacaccagtgtttggaagaaagtggagttcgaagcttcactatagacattcggttatgttatggagagctatttcgggtagtcttccaactaaggatagactgagtttcgttagggataagacttgctcgctttgtgggggaggatgaaacggctgtgcatattttctgggagtgttcgtgtgcgagggccctctggttcagcagcccgtttgccgtctatggcggagcgggaggtggtcattcagtcaagggcagattccagtggttaacagagagaatccctgctgatctattgacccgtctcctctcattcctgggctgtttgattgaaggtatatggaaatctagaaatgaaaacttattcaaaggaggagtgcccaatttaatgcaggttcgtgaagctataatgagaagatacccggaatcaatggacataatggagagggatgcggatggtgctgcaactttttggtctggagtgtgtgaagggaaaatcagcaattcggtggagatttttgcagtttcggatgctgcttggaaagactctagagctggcctagcagtgggtttgctagatagacgcaacaacaccagtgaatggtatacgaggcatgtgcctgcctcttctgcagctgaggcagagttgctcgccatccagtgggcgatgaagatggctgctcagaggggaaccaagtcttttgctggtgcgttggacgcaaaggtgttgattgatgctttgaaaaaagggtctgccccccgatttggaatttgaaacctctggccttggaggttctgcagttgtgtaattcatttgattattgtaatttcttttttattcttcgtcaagacaatctaatttgtgatggtttagctaagttggttagagacaatagtcagtataacaactatattttcagggagagatcccctgttgtgattctcagctttttaatttaatgaacttcccttagttctttaaaaaagaaaaaaaaaacaatatatcaggattcgggggcagttctatgataagtaaacattccatgtacatcctactgcccactaccaatcaattacatttcttacgtcaaccgtaggtgtaccatttatgcgatttatgataaaataaaagtatgcaagttgcaacttgtaaatttctccatgttccctgctgccagtactcctccactatctccaagaagtccatacggttctccacgttttacaaagcaacgaagcagtcctcctcttggctctcaactgaagatttgtgttcattttatttagattagactttggaggtatataattagttatttttggtaaggaatgatacagagattatgttttatcattttgaaaacattgttttatttttgggcaccatattagctgttaattttttagctctgttatgactaatcaaagatgtttgcaaagtattatactttatgataatttgcaaatattttcaagaatataatgtaatgttaaaaggaacgtggttttaactcaaattgtgagtttttgtttcttatgctactgctgactaattagttgctttgcaaaaaggcctgattttatctttgttaaaatgttgtactgaggtgtt

SEQ ID NO: 267019 - DNA, 2324 bp, Cannabis indica
aggttgccgctagcagttcactaaactctttcctacattcatcattttgttattataagaaaatatacataagcttttataaagcaatcaattggtcaaaatttaatgttatttatactacataatttacaaacaatattacttacaaattaacacctccttaattattgcttacctagctactattaccacagattacttattattattatatgttccttaatttctcataatacgaaaatgtcatatattttagaaaaaaattattaacatgcgaaatccatatttattaaaattgatcctatatttaaaacaaattattagaaaaaccatatatagtaatgaaaacaaaaactccatatatattactaatattaatgatgtgtcatatgtatattaagaggaaccaatctcattcataataaagatcctaattttgctcctactacgtctcctctaattattaacaaataatctttttgattgtatcaatcactttaaattttaatttttcacaattagtttaaataaattattttctcttaacaaaaacacaaaatcaatgaccaatgatgatgatgatacaagcactcaaactcttgaaactgtcgctgaaaaagtgaccgaaaatgatattccgacaacagcgccaccgccacaagactcccataacaccaagtctgaggcagccatggaatctctctccgccatcattccctcaattcctccctcccaaaacccctctcactctctcctccacgacccacaaatctccgaccaaatcaccgccctcctccgccacccctcctccggcaccggcgacaacaacctctgccgctggctctacgacaccttccaatccggcgatcctaaactccaactcgtagtcatccgatttgtacccgtaatcgcatgcgcgtacctctcacgcgccacccttcgcagaccactcgcgggtttcgaagccatcttgctcgccctctacgcgcacgaaacaacctcacgcgccggccagccggtgaccgtcaacgtcccggacatgtccaaccctagcctgtaccacgagccgacgtcgccgaccaaaaacagcaccaacaactccacgtcgctccacatctccgtcgtgtcgccgagcctggaaccccaccggacggtgaggtccacgcgccgggcgtggatcgtgggagtggctttggagttatactacagcaaaatttacgagatgcctttgaattctaaggttgagttttgtgagtcggttagagtgtgggcctgtggtgagtcgggaccgagtcaactcggtgaagaacaggggaggcgtatttcgttaccgtgggagctgttgcagccgattatgagggttttgggtcactgtattgtgtattgtggtggtagtaaggacaatatggtaatttttgatgctgctatggttgcttgtaaggctttgcatgaaagagccgtacaggatattaatcccaagggtattttggtcactgagagtttgcttaggcttggaaatagtagtattattagcttggaagaaccaaaggacaataaagaacaagaaaacgacacttattgtgataaaaacgacaataatggtcagcaacagttgcttggtgattctactgatgaggaagaggaagatgatgatgatgatgatgatgatgagagtgaagatatttgtagtgatattaataatcactctggaccaataactggtgatctagaatattgatgatgaagattacaaaatttttttatttttatattttgatatatatatgatcaataaaacatttatgttttaccacatgtttaatcaacatttaaaaaataaattatagaaaattatgttgggatacattttatagaaaatttcattctgagcttggtttgttgatgaatatgaccacaagatcttgagagatgaggttgttattttcgaataaagcgttaacattgtttatataattgcttattttatttttaagcaattaatctcaacattaatattaacattttatatgctgaaacggatttgattcccattaatatatattttttcaattactcctttatatgcatattcacattcacaatctctatatttaactcgtattttgcgagttagtacccgacctatttaatctaggagatatgcttgttttgtactttcacatgtctttgttatttgctatatgtttgataatttctgaattgtgtatgaatttatattgaaccatgttattttctgttattatttgtagttaaatttcaaatcttcattgttgatctaactagccttgttgctctaatgacac

SEQ ID NO: 267020 - DNA, 1721 bp, Cannabis indica
gctagaaaggagctacaaaattattctcaccaacaatataagaaaaaaaaaatataaaatagtagcatcaataatgtctaaacattcttatatattttataatgattattaaattaaaataaataaaatttaatagtattttagtacctttaacacttctatttacaaaattcaacatatcaaaatgatttttgtgataaatgaagcaaagatagaaaataaagattttttttttcacttgggatcgatatgaattcaaaattagctacatattattccaataaatatagaatggaattgatccattggatgattttgtgtttattaccatcattaataaggtaagatattaatgaaatttgtaagaaatagaattaactaaagtatttcatttgaataaatatagatcctaaaatattggataattttatgtttattacatataattaataagttcaactattagttaactctgcaaaatatcagagtttagaattagttaagtaatttattccaataaaaatagaatcaaaatggattaatattttatatttattataaagtataactaagttcaaatattaataaactatatagaagatacgagttgagaattggctaatttcaaaatgtaagaaaagttatctattaaagcaagtgtaaaaatagtaacatatcttgttttatatatgtttattaaaattattatatgcattagtctagtttatttaaaataagtatactaaaagtgagttgttattgcaatattttaagtggaatacatattttgtaatttttttcatgagatgtgcaaaaaatatgttttattattatatatatgtatattatgaaaaaaaaataaaaaaaatatgaaaaataatttggaacagccagctatcttatactatttttgctatatattttttaactttcttttaattttttccacaatttttttttttagaaaaactatttttgcaaacgtttgccataaaaattataaaaatcaatatttgcgtacaaataacattatttaaattttaaatacaacctatgcatggtaaattaattagctataataaactatacaattctattttcttaagaatatatatggatgaaaaatagtgtgtgactaaaattctctaaaaaaaacccatttaaaaaaaaaaactactctagaaaaacaaaaatacataaaacttgttcattcataaattaaaaattgaataataggagataatctatggcacataaataataaaataaatgaaaaataagaagtggatgataatgaaataagaaattgcaccgccctttagtttgcatccaatcacacattgaaaatgaaattaaaaaaaaaataataaataaataaaatgagatattgaacaccaaatacttctatcttaattactcatccaattttcagctactacaatccacatatgttgtcataaaatcttaatttaattacaatatacacatacatatgtgtatattttttattatcttttgttattacacaccaaaatctaatactattagaagtgaagttttataaatatattgttagtaattttttataataattatcaagtatatagatttgttatttattttatgctaattaagattttttatccaaactttgacatgtaccaaatcatgtcttctgaacttttttggctgttaaaaattctccctgaattattaagatt

SEQ ID NO: 267021 - DNA, 1653 bp, Cannabis indica
aaaggtaaagaggtaaggagaataacgttaacaatacttggaaaacttaaatgtgatgttaacgttagttttaaaatttagatatataataaattactgctagtaaaaattcctttttaataggacaggaaaatatataggcacaagagattgtgtgcttccaagaaaaaagtagaaagactttctagtgttgctaatattctcaactcagtatttactcttaactattagttgtgtctggagctaattcattagtaagtgggcatagcctattctggagttttctttgcactcattctaggacacttttccaattggggcataagattttatatatttaatttgttatcaatataattaaaaattggtagcaaaatagttttattggacatcaaaatttactagtttggctactagaataataaaggtgttttattaccaaaatattagtaacaattaactacaaaagaatttggtagctaaaaacttacagcaaccctgattcaactaccacctatagttaccaatgaattttgtagcaaaaaaatgtatcagctaccaaacatatattatttgctataaaaggtatatttcaatttctttaaaatacaaaacatctgataaatttataaattaaagcaccaatgataaatattaaagaagctttaaaatttctctgtatagataattaaaatgaagaagctagtgaaagtactataataaatcattttcaaatcctaaaactatatagcaactgagataataaaactattcaatatgaaatattaattatctatttattacatcaaattctcaaatcccttaattattatgattctatcaacaacgagtttacaatgaaagataactacaaacatgcatattcctgaaacaaaataataaatcatcaaaatacaaaatataattgattttataaaaatttctacttacaaaaagagggcgagagggactaaaaaaataataatataatgaaattaatacatataaaatattgacatatacatatttggtttttttaagaggagtgttacttttctcttgaaaatactaaataaaaaaaattgaatcaaatatacaaactgtaattgatattatcaaagttgctacttacaaaattaaaatttatatatatgtaacaaacaatgttccatacaatatcattcatgatcgttttcgttaaggttagatcccaattaaaatgtactcattaatctgaattccaccaagtatttttacagctacaataatttaaaaaaaaaaaaaacaaatctgtattaattttcggatccaaatattctccattcgagttgatcaggtttactgttcttctgatgtagaatctttacagacaaatgggtgagttaacaatttggaggcagaccaccttttacttgattccttttgcaaacaacattcaacgaagctctttaactcatccgaaaccccttctggcagactcggcagctcaccgaaacatacaacgcacatcaaagtaggccaatcagctctctcgcctggcggaagtagcggaaaatgacccatataaagctccattagagtcacacccaaactccagatatctccggcgtaaccgtcataattttcatcgtaagtttgcgaatcgaacctctc

SEQ ID NO: 267022 - DNA, 761 bp, Cannabis indica
ttacaaaaatattaaattaaatattttcattttctttttgaaatctcgatgaaatctatgaaatggcgttctttatttttagaattttttttaaagtatgaaatgagtgatatgtgtgtatatgtaaggatgacgtggtaaagtttagggagtcgatcgaagcaaaaactggaggaaaaaaaaggaaagtgaagtaattaaacataaacgacaagaaacaaattattaatttattttccaaagaaataattatactgaatttaatttaatttttagcttatttttagttgtgtcatcagaaaacgacacgtagtgttacgattttattataactgacaaacggtcacggctctttaaaacccggccttttctttttactgacaccaccacgaccaccaccatgcctatttcgtctcaccgactcctctatataactcgcccagttcttttctttccttagctcatacgttagttgaaaattgaaaatgtccattttttttttcttaatttgtttaaatgcagtatcaaattttaatttagctaatttgaaatcaaacttttatattacaattacattttctgaaaaaattatccacgatgtacatatataaataaaacaaaatcacacacacaaaagattctaccaatcttcacaagccttgtatgacgacattccttcacaaagagagttaacaactccgtgagaaaaaggcacaatgtaagaataagcacaaaactattttgcgagacacataattgcc

SEQ ID NO: 267023 - DNA, 4098 bp, Cannabis indica
acttcaaaaattattttgtgttctcatttttaaaaataattttttgaaaacaaaaaacagaaaacaatatcaaacatgctcttatgagctttaactctcacctctagaacaccaactaaacccacttttattttaaagactaaatgtttaacctgtaattgcttattgagtttgttgattccctgaacgttccaatttatgggtctatccatttaaaataggagaatctttcccatttttgattcatgtccttatttccctcagtgagagaaccttttcctcttcccaccaaagcttgaatcagggagcattctccactttctacagcaatcagtgagtattttccacttcctaccaaatcttgaagttattagaaatcacaattgattgggtgacctttataagcttcttccattttgtttgtctttctgaaacttctcatcatccacctttgctttactcttttcttgttccaccttcctctcttgcttcttttccactaaaattagctttgtcttagttagtaatttgcaagttcacattctttttgcaaaccacaacaatatgttccaagtttttgcactcattgcacaccattgggatccattcatacttcaccctaactttaatctctttattgatttcattatgaaaagtgataagctcaggaaattaatgaaacattctaacgtacttcaatcaatatcctgagaaaattcaattgttctctattcttagtaatggaatctcccataattggtgtctccaatttcccaacaatcttaaacaaagaactccctgcacccaatatttcaagtaacatgaacttgaatccatgttggaactgtgtacacattctctttattgaagtctatgatgaggcccaacgtttcatgatgactagtttttgtcgaaaaatagaaatcctccctcaattatttcatctcttgtattgatggcctgaaatctaacaataaaaatgcatggtttcagcaaacccactttacctactcttttctccttccaaatttgccttgcaaaactatcaaaagatccatctggaggatttgctctcaaaacatagcatgtcataactgattgccagtatactatttcattttctatatgtttcaatctaaattttttgatttagagatttacttccaaatttagcacttaaattatgaataacagagctctataaaattggaggcgtaacaatcttacctgcttgaacttgaccttcacacgtcttcgttgcttttaaaaagtttatgaaattaatctaagcgagcctcctattcaaacaaatgcatgagtgttgacctcaaaatcacaacttttgctacatcctcaatcgtctgagaaaccatcacaccagctaactcctcttcaccttcatcaaaatcaaaaatggatagagcatccactcctaagatctcggacattgatttgttttgaaaaccaaatctaaagaagttggacccttcttcttagtcgtaaccttcctctttcccttcagtttagagctaaccgccgtcttattccccagagaagaagccttgcatggacaaccccaacccgccatggaaccagaagaatctagatctcggaaccctagctatacttttccccttttgttttccatagtcttatattatattgttcttgtattacttgttagttaggatgttagttggactgttttccattctgttatggtagttatgtaacaacttttgacagctgctctttatttgttacatttacttatcttgtatataaacagagttgttgctcatttctgtaataatgagaaatctgttcaattctctcattctctttcgttctcttctttccaacatggtatcagagtgattttttttttctgcttttgcattgcttctctgcaactttcttcatcttcaagcatcatcaatggctgctacctttactcccgttgtgttttctcacaaagtctctgttcaacttgacgataacaatttcctggcgtcctcagatcttctctgctatacgtggtcatcgtcttcaagattacatatctgattcgttccaacctcctctcaagtatttgaatcaagaagatgaagttctcagtcaaatcaatctaaggtacactgaatggaaggttcaagatcagctactctactcttggcttctctcttccatgtccgatgggattcctacacctatcgttggtgctgaaacatccactcagatctggaaaactttggaggtatatttcgtgactcaaacttttgctaagattgatctttacactaccagttgcaaaatcaaaagaaaggttccttgtctataaatgaatatctgcttcgtattaaaactatcgttgattgattactatttgttggccatcttgttactgtaaaagagcatgttgatgcaatattcaaaggttctgcttatgacacatttgttattagtgtcaactcaagaaattctccctactctgtggctaaaatcgagactttgcttttgtctcaagaacatcgtatggagaatcacagtagagatcttgattctgttaatttagctactaatcgtggttcttgtttcaaaccacaatatttccccaatctctctaacaatgcagattctcgatctctcactcctcccaacacaaacaccaatcagggacgacaatgcattctttaaatttcatcctaaccattgtgctgtcaaagatcaggtttcgaaggaaactctgcttgaaggacatcttaagcatggtctttatgtccttcactcctcacagtttcatatgccctcttccagccttggacacaatcttgcatcttcatctagtacacatactgttaatgtgcactcgttagataacagttcttgtaataatttttctttgtggcacaagaaattagctcatccctctgccaaaattgtacaagccatcatggctaaatgtaatatttcagacagaaataaaagtgcttcagatttttgtgatgcatgttgtttaggcaaaactcataagtttccttttccaaactcaaaaactatctatactatgcctttacaactaattcacactgacatatggggtgcctctcccatgctatcatcctcgggatataggtattacattcacttcattgatgctttttcaagatacacttgggtttttcttttgaaagccaaatctgaagccttacccacttttatcaacttcaaaacccatgttgaaaaagaatttggccatgctattatatctgttcaatcagattggggggggggggaggagagtttcaagcccttgaaccttatctcattcaacatgccatttctcatcgtgtttcctgtccaacaactcaccaacaaaatggtgttgctgaaaggaaacataggcatcttatagaatctgccctcacacttttagctcaggcttctatgcctttagcctattggggtgaagctgttcgaacttcatgttacatcataaacaggcttcccactcctgttcttgccaatgatattcccctacacaaactttttcacaaagaccctgactattccactttaaaaatatttggttatgcatgttttcctaatacccgaccctacaatagacacaagttagagtttagattagaaaaatgcacttttcttggctatagtttaaagctcaaaggctataagtgtctatcctcttctggtagaatttttatatcaagggatgtgttatttgatgaatatacttttccctttgctaaaatgtctactaacacttctttgtcttctggttttaactctactggaccatcatctattattcctcgatctgaccaagctccaccacatcaacatcagcaacttgctgatccaaacagcagtactacagcaactgattctgctgatcacttgtctgcttccaccagtaactctgctactgatcttgttccagctgctgctcctaacagaccaagtgatttcttaagcaattcctcttcatctaacattgcagccccaatctacttcaatttcagttcctcaaactgtgacagtcagtagtcccgtgatccgtaaggggaaacaccgggt

SEQ ID NO: 267024 - DNA, 734 bp, Cannabis indica
tttttttttattaaaagaaatttgctcacataagcaactctttcaattaattaccatgttaatgttataatgctccacattagtgtagtttgattgaatagggtcccaccaaataaagcattacttcaaatataaatgcctaggatgtgtcacagtaccatttatatccatttataatttttgttagcaagaaagtatactcctttttacaccaaatattcaatttatgctaagtgtcagttttctgaatgctcgttttttttattgtaaaaggaatcgaactttatatgcatatttatatatatttacatatatagtgtcgctactttagtggagttcagtaggttaaaaagaaaaagagagagtacataatcaatctagtacataatctttaattttgaatgctttattatcagattttgtgtagtttttatctatatatttgaagggtatatactatcagtgtgtataatattctcatagcattagaagccaaaggaggttggctgggcaatcaaaatttatatatttacaaattaacaattttcttttagcaatgtctatataagatgttctccactaattctttaatttccaaaagttctgtcagtgtaaatatatatatttataaagttaaattaaattctaactagtatcatcaaaatttaaaaattcttctaaaaggacaagtcaaaatacaagctaaaataatagtttatgtgcgaaaagagcca

SEQ ID NO: 267025 - DNA, 1405 bp, Cannabis indica
tttcccaagcgaatgtatgcatggaccttctcccatcttaatcaccccaccaaaagtctctaagtgcgttatccacctcattagcaatagttatgggaatgacatctaaggacgctacgtagttagagatggtcgagccagtagactttatgaggcacgttttccctgcgcttatgagaattctagctttccacccttggaccctttgcaggactttatccaccaagtggcttctatcattagtacgcctttgcaatctgaagaggggtagtcccaggtatgatgcattggctggcatcttcctcattcccaaaaatcgggatatagcttgcgacttcctttgtggaactccattggtgaagatcaatgattttttagaagtttatcgactatcccgatcgaccaatcgcaatacttggtcaggcaatccatgagaaccttaacttctttcatcgtttcctggccgaataacatgatgtcatccacgaacacaaaatggctaatagatgtaccattttcccccagtttgaagccctttaggaagcccttagtctctttgtcaagaaggagccaagataaagattctgccaccaaaataaaaagggtcggagataggggatcaccttgtctcaatcctctctctggcttgaatttccctacgatggatccatttaaaagcaactttatctcctggaccgtgatacatgccttcacccaatccgtaaaacgaggggaaagtccaaggtgggagaaaaccatgataataaactctcaatccatcttgtcataggccttttccatgtccaattttatcatcatgaatcccttagaccctcttttctttttcattgaatggactatttctctagcaatcatggtgttctccgcaatacttttgcctctaacaaaagttacttggtttggcgagataattttttggagaaggtcccagagtctagaggcaattaccttggaaataactttgcaagccttgttacaaagtgctataggtctgtagtcttttatataggcaggagtatctttttcttgggaaccagaacaatggttgtgtcgttgatatagtgtggcaattccacttgatggaagaagtgagtcaccatctcaacaagatcaccctttacagtctcccagtggtgagaataaaagctaaggggtaagccatctggcccaggtgccttatctttccccatctcattcaaggccgcagtcacttcctcttcagcgggcattgaattaagctcctcgatctcctgagtggataaaaccttattgaatagatcagcagggaggcctattaggtttgtgtcagtctttagataattcttgtaatttgaagagcagcttgcaatctcatcctgatcatgaatccagttgtcgccctttg

SEQ ID NO: 267026 - DNA, 1327 bp, Cannabis indica
catcttcattagctcattaaaagtacctagatggtacattagattcgttgtacaatcatatgatgtcatgcgcgacttcttgaaattaggtgaaagtggttcaccttgaatcttccttgagaaaggggattcatcatcgaacccaccatcgtataagtcttcctttaatgtgataactatctttcgacataggtcttgcatctttgcttccaactccttcatttttttgttcatcctttctgaagacttattgagtgtgactcgagtctgccttatagtgtgcatagggcctgtgagtagtacttttcttgtcccattgtcgtgtgacttctcactatgattgaagggtaacgtctttcatttgctttgatcttactacgattggttggttcaagttgtcttaaacaacttatagggtccttgtctcgttatgggccctttcctctctcatcttttggggtgcaatctattgatgatgtggagtcctttacaccaacatgagcgtttgggaccccacgtccttgctggtggcctttgtactgaaagtgaaaggcttgggttttgcctttgagtatgctcttcaataccttttgcatgcttgacatcgtcgtttctagcctttggttcttccagtagagataatttatctcatcttcatagtggaaggtttgagagtttgatctcacaaagtatgctagcttctcatttttggattcacattttgaagtggcggggtcttgtgacacaaatagtggtggatgtgcgccagagatggtcctccaagtggttgaatgattctgctgatgcggtcaaccaccaacattgtcattaattcatgttgtgttgggcgctctccttgagcaatagtctggttgttcaccctttggtcttctccagcaacgggaggtggaggttatcatgatggtagccaactcgttgccacctaaatgaactccattttcttggggatgtttcaaacgttcacacatggtgattggttgatactcaggggaagatgtagctatggcttgtcgttcccataaactatgccaaactgttgaagatgaaaactcatacactaacttaaggccaaaaaatcaaaactcacacacaagcattagaacgagaatgaaaacatgaaaatatgaaaactttgagaagtgctcatgataggctagttttaggtgcattgtataaagtgttttggaggtgtgtttcaattgattatattcattttgtgtccaaaatcacacttgttttctatttatttcaggtttaaatggtagaatttataatgtgaattgaaaataagaagaaacatgttaaa

SEQ ID NO: 267027 - DNA, 636 bp, Cannabis indica
aaaaaaaaaaaaaaatagtattgtgacaaatcgcatcttatccagtgagtcactatacattttttctcttcaatcaaaataatagaagtatagaactaatcgaaacttatttttatttcttatagaaagtggccaccacgtcataatataatatgcaaccaatatatgtatagtatactaaagtggcgaagctgtcgatgatcaacggaagatgaaactattacgttattattaacaatatatatttttttttgtttaggaataattataaaaacaatgctgagaaaatttggattgccaatctcaaaaccaggtctcttgtcgctgtatttgactaaaattcacgtactaccttcaacaatatcaccaaaaagaaggcagtggtggaggtgttcttcgtcgcaaataatggggtcttccgaagcgacgtcgttttcgtctcaaaagctccttttcaggcagctcttcgagaaggattcatccacctacacttaccttctcgccgatgtttctcaccccgatagacccgctctggtccttaattctcttccttctcttaatttacgtgaatttttccttctcgtgttcttacctttcttgttgttggcttcatttttcatatataagcacgagatt

SEQ ID NO: 267028 - DNA, 783 bp, Cannabis indica
ccccaaacgccgatttcgtttcactgcgaatctctccaagcgtttcgaagccgctgctatgcgccggaccaatcaaggtttgaaaaactttttaatttaattttttattaaacctaacaaaaagtttgactattcaaattagaagacgtgcctcgaccgtgtttggattgtaatattgtattgttttgaaatattcaaatttttgaggcaacttgattttttaattagtactttttacttgattgttttttgaatgtggggtaggatgttggtggatctgcatgtgctatatttacaaatgatgaattatattttatacatacatatatcaataaaaaaatatataatgatattaaatgtttaaaacagatttactttaaataaaaccagctggagttggtgattaaactttcagctttgaaaaagtatgaataaataaccattctataaaataggaaccatggctatttcctcatttgatatagtaattaatttctaaatgatgtaccttttttttactaacacataacattgtttctctatgacatagtaagtctattttactacaaatttatcactaaggcataactttaatatataacatgtgtgtaagtgtaacgtatgaaatttatctataactattgtaaattagtaagattaaaattccctctttatttgttagaggcaattgaggtaagctaccataagtataggagaaaactcttaaaagttagagaagtgatagaggatggcgttacttaaatttcagaaaatgtaaaacta

SEQ ID NO: 267029 - DNA, 1554 bp, Cannabis indica
aaaaaaattatattaggtacatttaataaataaaaatttaatggagatttcaaatgagaaaaaactaatattacgtactttattttttttatatataattgtatataaatattgattttttaatttgtatatgacttaattaattaatgaatatttatttatcaaactaataaaaaaattaacaaaattagagaattaaggagagaataaataagactaattagagagattttagagcgtcatgtcaccgcttcatacttctccttaatatatatagattttcaaaaaataactattaacgtcaagttgtccatgagctattccctgtctgggataaataatcgggattcgaatccattggccgaggttaccagctttaattaacgtctatatctcttctttgaggtagttgcattcgttggtgatgtctctcacatatactcacattcttactttggtcattttcttgcattcttccttataacattcttagaggcttccgataatggaccatattacatgtttccttataaacattctcctgagtatagatcaaactagtgtacttggcgtatttgtgttcatattctttctttccttttttagtagcctcgttttggttctgactctttccaccctcttgttcctgaagtggctcacatttgattctggaacctccatcttttgtgtcgactatctaggagcgatactacatctgggttaggccgctctaaacccagagaaattagtctacgcaggggcattcccagagacattgagtccgtagactgtaggagttgtaaactgggttcccgaatgcatgacgaacagaacgtaaacttatggagtgtaagtgggtgttgcatctggtggcgttggtacaagagtgactccaaaagcttgcatataagcatcttctaaatcgatgtgctaggaatatattaccaggatccagatttactaacaagtatgttgaattaatatcctaagtatgaatatctctaaaacaatgaaattaaacacataagagtttagaaaaccttatattgattgcagcgggatataatgactccttccgctcagatctataacccttgtttctttctgtcacagagtattatcaagatttgagtctggatctctttctctacttcgggttggttaccactgtctcacccactatgattgagtacttaacttgctatgtgtgggcatgacactctatcactataggccgactatgaagaacaatgaaggaggcttgaaaactgtatagatggtgtctctcatctactagttgtctgacagagaaaactaggtttgatttggttgaaggcaatagttagatgagatgagagcatcctgttccttttatagtgtttcaactagggattaggtttgaattatatggattaaaaaagaataaaatattgggcgaaaatcactagagtggcggaccacaaaaaggaccaatctctagttacaattttgccactttatttcaaccagttattcttctttcaataatactatactttccaattcaatcctata

SEQ ID NO: 267030 - DNA, 1798 bp, Cannabis indica
cttgtttttgaatcacattaatttggataatgtatatagagttaaaataattaatattcctaaatatataggtacgtcctatataatataaaattattacatcttgataaattattgtgataaaagatgtagcaacacttatatttaaaatatttacctaaaaattaaaacaaaatttaataaaataataattataacattcataataaaatatcatgatatatacattttgatatagatcattttccccttcattcatcttgatagtaattcgataatttattaagatgtatagtattgctctaatataaatttaagtattcaattgaaattaatatttctgacgtaactaatattttcgtattatatatataatttaagaaccgtagaataagtaaccggaggcattgaattcactctttttaaactcccaatcccacgtactttggcatactcttccaaaaccaaaacacacacattttttttttcagttaaaacaaatcaatcactatatattaccacttacaactcatatagttcttttaaaaaaaagaaaaaacaaaaatggtgactgggaggaaaacgtcgtcgttggagacagagatggcggatgcgaaggtggtggtagtgatggaggaaaatggggctcacactcagcgggccgtagaggcggtgggggcagctgatcattctcaccggaaagttgcagtgttggtccggaaagctgacgtggcacaggcaatactgagggtgttgagcgtggcaacgtcggtgatagcgttgttgttcatggttacagccaaagaggccagcactgtttttgtctatggctttcctctccctgttttttccaagtggtctttctctgattcattcgtgtaagtggaaatactatgatacccttctctgtttctttcttcattttgatgcttctgtagtttgggttctttccaaggtcaagtaagttaagtttgtatcattctttttttgccaagttctctctttgttcggtagttagatcaggtttattatgctttataaatggagattttgtcagtatatttactggctttcccggaacatgacctgaaaaacggcctttgtcctaagtttaattctttctaatattgttagactaagagtgtccacttatgatgacgaaattgcccttccacgtaacaacaaaaaaatatttggtattcgtacacgtagctacttttctaatttcatttcattgcttttcaatgaaaaaggaatcagacccgtgagtgtgtctccctttttattattttttttattagtctttgaagtctattctaatttgtctctttgttagacattattttgaaataataattttaattatgttatatgaaggaatgaaactctacttataagttttcattttaaattattagcttatatatatagtgctcatctactatgtgtgagcttccaaataattacaaagttgtgttaatttgatcaagcaattaaaatttaactttttttggaattgagaagtgtgtgatttttgatgaccgaaaaatgtgaattgaatgagcaggtacctggtaggggtatcagctgcagttgcagctcactcattgctgcagttaatcttaagtgcattgagattgctcagaaagtcatccgttgttcccacaagaaatcatgcatggctcatttttgcttgtgatcaggtaatacaccatatgcttttctctctcatttttcttttcctaaccattaattaataatcacatataactgttatatcctctctctctctctctct

SEQ ID NO: 267031 - DNA, 2178 bp, Cannabis indica
ggtttggctgttggaagggaatacatattttaaaactaataagttgagcatccattatgctgccacaccatcttgacaacaaaacattcaactattgtttgtcacatccagcgtcagcattattaatattacttctatttacaagcttcataattaccatccataaacaaaaaattgaactcacataaaaacaataaaaataaaaaaaaataaaaaatctgtgcatgtattgtaaagcattcttgagatattgaacgaataattattccttttacttcattcatatcaagacgagcaaaaataaaattacaagactgtctaatataaggaaccaggcaagggaaaacagcaatagaaagacaatttacataaatttacaaacatgttctgagaaatttaaacacaaggacaaagcttgttttttaatgtaaatataaggatctcagatcttcaaagtaacacgtcgggctctgacaaatttccagtaaagttcactctgcagtaatcgggaaattgcaaacctgactctgtaatatgtgggcatgacctcacatccaggtactccaaagagttgcatttctctagaagccggcctataccagcctctgtgatcttagggcaattattaaccttcaacaccttcaaagtcagcgctgattgtctacttgttaagcactcgaaggcagcatctgatacctcctcgcagcaaccaatgtcgagggcctcaaggtttctgcacttggtgaggatacagcttaatgaagaatttgaaatgttcaaacaccagtccatccgcaagttcttgagggtaaattcacaagcagtggctagtaattgtattgattcatcagtaatgtcacgacagccaccaattattagagtttcaagatttttgcagaatctggccagagataatattgatggattcccaattttgtagcaatccaacaacttgagtgtctttaaagaagttgcacatgcctctgaaacactggaaaccccaatatctcctacattgctgcatttattgatgtctagaaacttgatcccacgacaccccctgacaaggtctgaaagtcctgaatcagttatattagaacatccttggagccacaattcctctatattggggcaattcttggaaagggcttgtaaaactttgtcagtaacaagtctgcagccagccagatgaaggctgtgtagtttaggacaaccactagcaacagctaccaatcctttatcagtcaactttctgcaatatgatatatccaaggactgtagtgaagaaaggccatttccaattgccactattcctttatctgtaattcctgtatgtcaaattgcataatcttaggtagcttagataaggtttcaatcaacagataatactcctgctgataactttccaactcttcagatattaaaagaatttgggtaaataaacaaattttaatagccaaaagtaatatagcacaattatcatagaatctgattgacattaactactctagcccaaaaatgcaggaaaagaaaagagttcatttctataatataagataaaatcatcatgtcatactagaaagtttgcgattacggaaaatcatgaatgataaacagataatggcctagtaatgttgacactttcacaaaatgtacctactgaattcaagatgatcagactgaatacctttacaattctgcaaattgagaactttcaagcatttaaacccatcggcaataacagagagatcagaatcggtgacgccaggatagaaggaccgagaaacggactgggagagatccaattctagaagttgagagaacctggctgccattctctcaagcatgtgcggcccagcacgtgcgaatagcttcttcctctcggtgctctgcaagcggagccatcttttgcagaccaatccaaagagctccttatcctgatcgctctctagcttggccagcaccgaacggagctcgtcgtcagtcaatgcgtcgtttatgcagaccgtttcagacaagggcagaacttcggtagccattggtggagaagaagaaagacaacgaatttcttcaaagcttaaacctaattctgatcctaaccctaattgttataataaaatctacaaggcaccgtatggggaatcagggctggtaaggaaggaaccgagcggaagctcc

SEQ ID NO: 267032 - DNA, 1401 bp, Cannabis indica
atcttccttatgatgattctctacttctccacaaaacccaagccagtttaccttctcgacttcgcatgttatcagccaccgaacacactacgagtttcaccatcaaactttatcgagcacgtggaaagaagtggttgtttcaaccaagaaagcaaagattttcaagagaaggtgctacgaagatcaggcattggaaacgagacattcttgccgatttcagtgcatgaagtttgccctactccttctattaaggcaagcaaggcagagattgaacaagtactttttcctatagtgaaacaactcctctcaaaacagagaaaaaatttaacgataaaccctagagacattgacattcttgtcaccaactgcagcctgttttgccctactccttctatttcatccatggtgataagcaagttcgggtttagaagcgatatcaagtgctttagtcttagtggaatggggtgtagtgctgggattttggctataagtttggctaaagatttgcttaaagttcacaataactccatagctttggttcttagcatggaagctgtgtctccaaatggttaccagggccaagtcaagtctatgcttttgtccaatgttttgtttcgtatgggtggggcagccattcttttatcgaaccgaaaaatcgacaagccaattgctaagtacaagctccaacaccttgttaggacacatacaggatcagatgacaatgcttacaaatctgttttccaacattcagatgatgatggaaaacaaggggtatcaatctcaagatcacttattcatgttgctgcaaaagccctaaccatcaatgtttcatggttaggtcctttagtactaccctattctgaacaattccggtatggattgtctgcagtgttgaggcaagtgtggcaatcctcattctcatcttcatcctcaggtaggcagctaacgatttacgtgccgaattttaagatggcttttgagcatttttgcatacatgctggaggaagaggtgtgattgatgctcttgaagatagtctaaagttgaataaggaagatgtagaggcttcaagaatgacactatatagatttggtaacacttcctcttcttcagtttggtatgagcttagttatttggaggcaaaaggaagagtgaagaaaggagaccgtgtttggcaaattgcatttgggagtggtttcaagtgcaatagtgctgtttggaagtgcatttcaaatcttgattcaagtgaagcaaacacttggtcggacataattaatatgtaccctgttgaggtaccagaaatgtgaaaaaaaaaaatgacatgaatttttacatttgggttctctcattttatacaaatgatcaatatatatattgtagtaaaataagacgatgaaatgaca

SEQ ID NO: 267033 - DNA, 1095 bp, Cannabis indica
atattatatatcactatatgtaagtttcctctcttcacttattagtttggaatctctttaagaatatttttaatttattttcaccaaaacattgagggtagctgcagttccacattgtgttgtttttcttaatgtctgccatattgtgaaatcattataacaacatagtaggcaatagttagtggaaatgaaagatcattctcttcttaatttagggataacactttaataactctatatatcatcaattaagtaaaaccagacaggtcctgactatatataatataaattttggtgcccttaataaataaataaatatatttaattaaaaacaaattaaattttttatatgctacatatataaagacataaagggaaaaaaatatatagataaatttaaaataatttcaaagtattttgatgggatattccttaattaaatttatataatcaagtcatcataatttctttttttaataaataacatagctaaattattaacaatctttattgtgacatatatattgatcgaattagataagatttgatgggcaagttttgaaaagctatgttcaactcattctatatattacgttatattaatgatttgttgataattgaggctatatcattaaataaattctcagccttattttttagagtgtttgttattcttagtatttagtagtcgttgagatttttttctaccaaaaaaaaaaaaaattaagaattgttagcgaaattttataaacaatctatgcattagggtttcagtcatttctttaataactctttagtatgaggtagcatgtgtaaatcatgatataaattatttgttaagtatctgaaaaatctgtcataatttattaaaatttgttaagaatggagcaaaaaattttctttaaatatctatgtatctctatttgttgattattgaatttcaaaatgcatacctaagattaataatttttccctacaatattgaacatgtgattgtggttagagcttgaaaaagattaataaacagagaaaaaatgataagagaatagcataggaggagagctcgagcgttgtttgaatagacaagaagaaatt

SEQ ID NO: 267034 - DNA, 1170 bp, Cannabis indica
gtaaattaaacaattcacaaatcatagaacaaaaaaatactaattaaaaacttgcctcttgtgacgattgtgactggtatgcttaattgttttatcattcactacaaaattgtatctatgaaataaatgtgttttaagaaaatgaaataaataagtaatcaagttttcaattttcatcttcatgttcattttcttttcaacctaatattcattaatattaattgtcttacattttgtactcaagataaaaaaatttgttcttctttgttttctttacgagaccacgagtactggatattgtaccgattggtaatacgatcaaaaacaatatcgatagattgctaatacgttgtcaagaatcgaacaattacagcaagatagattgccaaagagcttcataaaagctttgctagaaatcctaaaatgagtgtggagtaaatgagagttgagcgtcctaagagactattttggagttgaggctacaaactagacagctatgagcagctagacagaaagctagaggggattcaggtggtgattatgctcactcatatgcaaacttaattaaggggttatgttattatgatccttaaatttaatctcagtaatattgttgctattgtccaaagcaacttaatggcaatccaaaagaattcggagggaaacgacgatgaactagcaactcttgatgcctcaggatatcgaacattttttggattatgtagttgtcatctcaaagggccataaaaggtaattttattgattggagtggggtttgatgtgaattttcacctcttcccaattgcataagcaattatagaagctgaaaatacaaataattggaagtggtaacttgttgtaatgttgttgaaagacttttgtagtgacaattgcttgttctaattactacaaacttttttatatgaagaattaattactagttattgcagactttatttttcaaattgaattattctttaatatgaatacttattaatatgaaaggtgagtttgttgatcagttttataatacaaattaaattattacatttattaaaatatacattattatattgatgtgaagaagaagaaaagagtcgtgtttttttttttgaaaatgaaatatcaacttcattgaaatgattagcattcagaatacataagggaaga

SEQ ID NO: 267035 - DNA, 2373 bp, Cannabis indica
cattattaaaaacaaactgctacacaatattcatttactaaaaattttatttttggcggtaaactccaaattttccctctgtattttcaattccctccttaactaccttaatgagccttctatggcacagttagcactctctctcgtcttcttccccaaattaaactctgtctcagctttctctcacaacttcatcagctcagctcaccatctgcacctatcctcaccccgacagactcaacccacccaaccataacctctgcttcacacacaacggcgacggtggcccaaccccaactcttatctctatcggagactccaaccccattcgaaccctaaacgaaccaaagaggttcattttctcacagccatttcgcaccatattctttggccgtctagggtcgatttcgcacccagcccgtgtcctccgtctcttggcccttagatttcgcatgcccactacaacaattttgttatatatctaataatgttttgacaaataatttcaatttctaatttgatgaaagcataagtctcgtttctctgatctatctctcttcacccggtcgctcttcaatttctcatcatcgtcgtcaccatcaccatcaacatcgccattgctcccaatctcaagctttggcatgggtaagtagttccccgaactttgttttgcaatctctactcgtttatttcccaaactgtaacactaagcttcactcttgtatcacaatgtctttaatatttatctttgtgtttttggtcagtattgatgaattaatttgatattaattaataatttcaccgtagaaaaaaactagcaaggtagctaggtaggtagtactaagtgatctatgatatggttaaaaattcattttgtggattaatttaattaggtgtagaggaaagtggttggaataaattaaaaattaaatcagcttctaaacaagactttcacacgttgactatgacaatggtcatacaaatcaatttaaacatgcttgatcttgtgttatatgagtttttgcatatacctacatgttctgttttcacttttcttacatattaaatttaaacttcaaattgattcttttgcagggctgaaatcttttgtaagttatcagttatgaactctaaggtgactaagtttgtaaggttagtttactcaaatcttacatattatcagctaaatttcctctaatattatattatattgggctgcattttagttatccactaaattttcattatacaaaactaaccattgtgattgtaaatttccttgtacagatttgtggagtataaatctgataggtctcaaagttctgagaataatttctccacaacaagagtatctgtaagagatgttttgggacaagttgggagaggtgtccaaaaggggtatgagaggattagaagccttggaaaaatcccaacttcccatcccattgttaagaagcaagaaaagaatccagaacttagaaagaacatttttaatcctcaaggacctttcgttcaaaaatggaacaagatatttgttctggcttgttttgtggctgtgtccttggaccctttattcttctacattgttggaattgatcataacaaacaatgcataactttggatgagcctttggaaatcattgcttgtgtccttcgaacatttatagatatcttttatgtactcagaattatctttcagtttcaaactgggtttataccccttcttctcgggattcggagaggcgagttagttaaagatcctctttccattgctaaagatacttgaaacctactctttgttgatgttctctctattcttccactgcctcaggtctgcatatacattatacatacatacatacatacacatatgtttgtaatctatttccactattgatcacatgaatgattaatgttgtttcagcttgtagttcttgttgtcatcccaaatatggaaagtcctgttccaatgatcacaaaggagtcgttgaaattcatcgttatctgtcagttaattccaaggctggtgcgaattgtaccactgttcaaagaagtaacaaaaacttctggcatactaacagagacagcatcagctggagctatttttaacctttatctgtatatgcttgcaagccatgtaagttattggaccttgttttccatccctactaagcattaatattaaaaccatcctttgtcatattcttatagctcaaatcaaatgatttcatgccagacattaggagctttgtggtacttgttctcccttgagagactagatacatgctggcgaaacgtgcttaagaaacacgattgggatactaaatatctctactgtagtcataatcgtgatgaagatttcaaatctactaa

SEQ ID NO: 267036 - DNA, 1962 bp, Cannabis indica
aatgtggagctatcccctcttcatcttattaccattaacttacccttaaaaccacttcttcatataaaacatatatatatacatctcatgcccctttaaccctaaagggttatttactaattgggcttaagtggtccaataatggtatactataatttaatgggccaattatagttttaagggtgctctcatgtgcctctaacataatatatgattattaaccatcccattatggtagtgaacaaatattgggcacatagttaatgattgcgtttatggtattaagctcatgattatattagtccacaataataattctaacaaatttgtcctacgtctactgtgaccatcatcatgattattccacaatagaaataataaacaatacaatttttttacagtcaaagatgatcttcaatggtttcttggtaccagaacacaactcactcttcatgtatcctttaaaccaaacccgagaaccccttttacaacaaccacactcaaagctctcaaaaaaattccactttacatttggttggaaggaataaataaaaataaaaaatagtaataaaataaaataaaatttaaaatgcatacaaaaataaaataatcattccatttcaatccaatactttataatgcaaccaaacatactaatataataaaatttcatttatttctattctatcctatttcattacctcaaaccaaacatcacataaatctaatctagttccatgaatatgagtacacacatgtatattgataagacaacttacttttttatttcagagtggaaaagcttgcttaggggagataatataccgttacatgactgctgacaagttctccccagagtgtcttctggattacttagacctctcatcagagtacaccacactggaaatagctaacaggatagaggcatccatacacatttggaagcagaagcatatgaaaaggagtataaatataatggtgaccaagccctgtaaatcatcctggggtggcatggtcaaaggcttttccagtgatacagaaagaagtaagcttctagcacaccgcgctgagacccttttacataatttaaagatgaggttccctgccctccctcaaactatcttggacctcactaagattcagaataacaaggtacgtaattttggaatcttagtgaatcggaaactttgtaagaaaaaatatgtacttgtactattagtgtggattgagctggctttgatctcccgtaaacactggacatatgcccaattataccaaaatgtggtagttttctaaagattttattcgaaatgttatttgcctaaatttttgagagttgctttgtaaccctttttaggtggggtggcctagggccaggcttgtgctaaggcgcgttaggcccgcgcctaaaacctacccaacccaggaacccaaaaaaatacttttcgtttaaaattatacataatatttttttttaaattttcaaaaatatcacatattttttcaataaaaatcttttttgaggtaattacatcatatacctcttttaacttgatggctttaatttttagcctctcttttaaaatctcttatgtttacctttttttttaaccattctaccaattttaccactatcaattaacgatagttttcattcttctctaatcaaaattttgcctcaactttcccacaaacctacacatccatctacaaagaatacaaatctattatgtttgaaattatgtcttagttatgtgagtgtgtgaggataatttaggtacaatactcataaaaagagatatatttgaattaaattttatttggaggtaaatttggttaatgtatatatataaaaaaaaaaaaggtattcttcaacttctcccaactttttttcggctaattaggattttttcctctccaactttgacatgtaccaaatcatgccccctgaactattgagat

SEQ ID NO: 267037 - DNA, 1058 bp, Cannabis indica
tgatgatgatgtacaacggttcatggtcatatcgagcagcttccagctagtcctgtccataactagaccttcttttagatctggaaagcgtggcatagaagacagcttcggacaattttcaataacaagtttagttaatgaaggcaacacattgatgtaattgtattcacaccatccctgtagcttaggcagatctgtgagccagagtctttctaggctcgaaaatagatttggattctttgttgatgaaaagaataattcatgaccaaccaaaatgtattctagattgtcaagatattctaggactaacaccttcagaccatgaatctgatgaatagcttgtagatttttgcaatttgagcatctgcttaatgaaagtttcactagcttacttgaaaattgggagctaaattgggagccaggacaacgcactgtaacacccctgaatccattaatagacaattcttcaattcaagataagaaggtagattattgtgaagaggtagctccccgtatacagacttgttccatttatcgactctccattctaatgacaaggattgaatttcagatggtacagccctcaaatactggattgctgtttcttcatgtctcaagttttaagtctcaaattttttattttgaactgttgtatgagctcgcttgaatctggcaacatcttcttttcctttatgccatgttgctgccgagacgaggaggaggaggattcttagctcatattgttagtaatatgtaaagtttagttgaagtaaagcgacattttttaattaactgatgtctttaattagcagccaactataaagttatataactaagttttgttcataattttataaatacatattgtttcattattattgtatattttttgataatcagataaataaaattattttttattaagaaatttagggagaaacacttaattgataacattacactattaaattaaaataattaattaagtatgtatatatataattattatctaattataattattatattctaaatttattatctaattatttttttga

SEQ ID NO: 267038 - DNA, 764 bp, Cannabis indica
attttattatttaatttaattaataattttataaatagaaagtctaaaataatatttaagctttaaagatcaaaattttgattaataattgaacgttgttgtttggtatcaaattatagtagcatatttaacaccataataaaattctctttcgaatgtataattagtaatattaaatatgtaacatcaaaatgatataatatccgtgatgctaaacattactagtatccttttgaacacaaaagtcgtttttttttaatggaacacaaaagttgtttgcgtacaaaagaacaatcgattattaatttacccatttatggggacaataatataagaatcattttatctcaattaatttagttgaattaaatgagtagcgttataattagaattattattgtgagtagagttataattgaatgagtgttgaacgtttcaaagtaaatattgaaagccgatggcaagttaatttatatgaagttttgagtcacttatctttgtaataatttttggactgtctccaaaatccgaacttcattttttcggagtagtttttcttttcttttcttttttttaacattttttttgggagtagtttaaatttgttaatttaaaaggatatttatattaaatattaattttttaaaattttatatttatagtttgataaaagattttttatattactatttctcctgcttaattttttgagatttttacacctcatgtcaaaattgacaccttttttacatttttatccttac

SEQ ID NO: 267039 - DNA, 1018 bp, Cannabis indica
ttttttttttttcattttttcacaatgcccttgtaattttatcataaaccacctttttaatatacgatatctgttaaactgataaactagacactttggtgctttgatagctatttgtctctctggtttgtttcccaatagtctcaactgtacaaactgagagagagagagagaaatataagttgcaagaaacgaggagtggaagagattagaatagctagggtttgatttaatttcatcgggaaggaaacaagttgcagaggtacacgttaaccccttccgcgtgcagcccttctttctttctttctctatttatctctgtctcgccctttacagtatatatgtgattttatgtaacaaaaagacacagagagagactagagagactactgtttattatgtatagcaagggagaaaagaaaaagtacacatttccgagggagacctgtctgatctgattatctacctttttacagtaaaaccaggccaacacatattttagagggaaaatcacctcctcaatcaataaaaaaaagtaattaaaacaaaacaaaaccctgtttgtaattttttttttctttcttttgatcagtagctatagctaataggatagcaggcaaaccctgcaaactttaggattttctgtaaaaagactcagttttttagcttaaaacccgggagaactatagcttgataggggaacagggagaaaaatggaaattattatattatgggttttagattaattagttaatacatataatcgtgtgtgtatatatgttttatataaatggatcagtttggggagaagaagaatagtaatactagtaatagttcgatgttgatgatgatgatgaataaaaatagggataataacaacaacaacatgcctctatctttcaccactggaaaccaaagagtcaccggcgccgagatcaatattaatcctcaagactactagtagtagtggcaatgatggtaagtaataataacagtaagaatttctacactactcatg

SEQ ID NO: 267040 - DNA, 785 bp, Cannabis indica
gtaaatttgattaattgatgaataaaaaagcatttttcaacttacccctaaacgaatggagtgatttatccactttagtttaagtaatgggcctctgtgagggcccgcgtttcctatttgaaattacaaattagacaacaatgaaagtattttaatgtcgactataattattatttttcaaataagaaaataatatttgaatagacaattaaattgatgtgatctctcttatagtgcgatctcattaaaaaaaataactaagcacataatgtgccaatcactattcaatcgaaaaaggaagagtttggtgttactcatttttatgcttgtacaaaggttagaaattaaaaacattatcggtggaatatactaattcaattcagctttgaattctaataaattaataatatgtccctcatttacagcctgcttttgttttgtttatattatgtaagttttattggtagtgtctagctataaattaatattaaatatggatatgttattaaatcattaaattaattattaccattaatgtttaattatattttccttttattatattgattttgtttactattcttttagtcatatttttatataaataagggttcaccttattagaataaagaactaaaaaattttcattcagtttctctttttctcttcatcttcttctttttcttcttttattcttatctattttatattattctatattattttataacatgttatcagtataaatctctgtccaagccttaaggtaagtattttattaaagt

SEQ ID NO: 267041 - DNA, 2116 bp, Cannabis indica
tcccttttccctatatatatagctaccacttttatattttgtagctgatctccattcatgagttttgttttaaaaatttgtttgagattccaaactttcaaccacttataatatttttttgggcagttgaaaaattgaccttactattcgaaagcatgaaaatgagggagatttgttttgagccttttggttgtatgaattaaataataggaaagaattgtgaattatggtaagtttgtgagagctcgtcaagcaactaaatcggctcaaaaaagcacagccaacactctagaaatttaaaataaatattatattggatttggaattgcatcatggaccaaattacaaatggtaacaataaatgatgatcgatgatgcctgttggatcatggtaaaacaatagagaagcattatggtaatacaaaaaaggaatttttacactacatacttaaatttttaaattttttacctttttactgtagggcgtaatctttttcaaaagtactgtgtaagttttatactgtgtactgcgttaagttttaactgttgtttcacggttgttttttagttgttctactgttgttttaattgtttattttacggttattttataaaaagataatatttgtataaaaatttcgtatgacagtaaaattgtaaggctttagcctaaaatctagtatttttgtaaaaacctctaagagagagagagagagattaattgggcctgatccagaaagatgaagaaggtgcattaattgggcctgactttcaacgaagtcagtcatatggcccatattaatgtaggccttgtttataatttatgtaacattaaaataaaaaaaaatcagccgtctgcttaataggtgtataaatatatagctgatgaaaaaaaatcacgattcactacgtagtacgtactctaaatcttatgactgatatcagatctgttttatcgtgtctctattagctggttttatttatttttttaatttaatctatatataatattgtacagtgttaagagttttatattaaaagtctcccactccacccaaattgcttgtcagaataacttatatattaagggtaaataattaacaaagtatgattgactattaatattataaatataattgagtgttgtaataagttttgtaatgtttcttttgttcatatatattttgctaatagtgcgattcatactccctcagccctcttaactttatatggttattttatttggtggtttagtggttctgattatataacttggctgattcaagtaggggtgttcataaattatccgattcaatccaattcgcacgatccaatccaatttgcaaaatgcggatatctgcatttgtgcggattggattggattgaaaaatctaaaatccgcacttgtgcggattggatgttgtttgacctcaaaaagtaaccgatccaatccaatccgcacttaattatatatattttaaaaaaattataatatataatatatattaattaaaaaaagacacaaacttctaatttcttaatcttttttagtaatatattgagttggtgcattttatttatttcataataaaaaacacaagaaaaataattcttattcacatagacacatacatataaatttaaatatatatactaacttatttattttagtaatagatacatatatattttagtataaatctaaagataagtacatatatattgatatatatgtatattggtttgatttgtatataaatagagatggaaatagattattttattggagtttaagaaacaatagtctttttttaatttttttttatttttattttttttgttaaaaggtagtacagaggccaatgtcttagactatttttttatttttttatgaaatattaaataatttattattaaaaaaaaaccgatctaaaataaccgatccaatccgcactattgcggatcggattggattggatttaaactcttatgcggatcggattggatccaaaatatgaaatccgcacttagtgcggattgaatgttgtttaccaaaaaaatacggattgaatcggatgaacactcctagattcaagctaagctgacattagttgta

SEQ ID NO: 267042 - DNA, 1616 bp, Cannabis indica
tcatgaaactataattagcacttggctaacaattgaaacaatttacacatacaaattacaactatcaatctactaacacaaaatattctataagtttggaatacttactattctctactaatataaattaatgcccatgcaactaagaattaaaatgtctttttaagcttgtaatgttaggcttaaatacgggtacaaggaattgtcatttagacttacctataccataaatttctataatcatgtcacccaatattttttcacaaacaaacctgatacccctttttttcttattcacgagagaaaatttgtatgtttttttttttttcgacaacattgtaacattttatttttatttctctttttttttcgaatttgacatctattgtcagaaaattttttttttttttttcatgttgttgccaatcaaaattatttttaaatattctctcaattttcacacttattcccacacacatatacaaacttcacatccaaatttcctcaaattactaaagatccacttatgatataattagggtcaaattttaaatattcattgatttatcttatttaggctcaatatgtgtagaaacaacaaaaacagataaaaaaactcaagcgagaaaggatgtcagtaaaaacatttcttactactacaccacacaacacatggtaagatactcaaatttttaaaggcaaactggtttaaaaccagctgaatacatccaggtgggcaaggattctcaagcagtcaacaatttgtttgaccaccacattgtgaccagacaaccttcccttaaatagtatatctataatagtccccatcatttcatcttgaccgttgatttttgattctgattgatctgagtgaagtagttgaatattgttgagaggtctcccacctcatgaaattgccaaagtagtagatggaatataaatacaaaataacaaacaactattatattaatcatcacaccatgcaattacagtattcttttccatattcatcacataatttatatatatatataaatatgtatgagttattataattaactgcactactactaataacactctatactacttgatcaatcatgaatattaatatatgctcatattattcattatattatgagattgtgattttttcaagacattattattaatgaattctgatggtgatcttatcttcttgatctgctcatgtatacataatcgagtaatattagggttcatttggtacagccatgggcagagccacagccaaaggaagagtggccatggcccccaacaattttatatcccttttaatatatatatataaatatttataaataaaaatacatatataaataaaaatatactaattaatatatataatataataaaacaaaagtgtataaacaactaataatatatataatataaattaagtgtttaatttattaaaaataaaattgaaagttttttagaagtgaattgacataaaattaaatttatatgagtagaaggtaaataaaataagataattgcttattaattattatttttttcttttactatttctactacttattattgttatatttttttttttacacatttgactc

SEQ ID NO: 267043 - DNA, 913 bp, Cannabis indica
acctcaaattcgccatggggttgtccccaaccagaactgagaatgcggaaaccttatcagtggcagtccctgacctctgcgtggcaattagcatcttaatatccccactctgccctcttgaagactcgtaatctttaacgtattgggccatcaatctctctgcaagctctctctttttctcaactactttcttccagtcctccacgttcctcacttccactttcgcccccttcccgatcactttcgattccaattcctccgcatccatataccatactccaagcccactagctttcatcaatggcagcttaggcatgttcttgaatctctcaaatcccaaaggcttgacattgctgtcctcaagtgagagaacagggggtttaggcttggggatttcattaggttttaaattctggtgcggtggcttctgggtgttcgtcgatttcgcagcattaggagcttgtttctccttcttatgaagcttattagtctggagacgaccagttttgcgaaaatcggcatcgttgaagcccgactgggaagaaggaactgaggacgagagaccgagtgaggaagcgaaagaagctatatcagacttgagaaggtccaaatcttcgggtttgttcgactgattcgttgaatctgagagcgccattgtgcatgggagaagctccggctccgaacaggaaaggaaagagttacgcgcgggctgttgaaggaggttctggccaaaaccctcctgagtcctgactacgttcttctctttgaatgcgtagggtttaaagcacttaattgggccggactccacccattgcaacccacggcccacttttttcaaggataagttgataattacatctttttattacacattcaccaaaaataattgcatatactgaaatttttcaatttt

SEQ ID NO: 267044 - DNA, 1481 bp, Cannabis indica
tcacatggagagtatcttgaagtgataggggtaaaattggtacaatgtttaaaaaaagaaggtaaaaatgatagattttaaaaaagaaaggtaaaaataaaagaagacaatataaaaagggtatagagtgtaatttcctctaattaaagtatgcatctagaaagatagacaacttcggaacctaaacatttatatctatatatgttcctgtaagaaatctatataatataaatatatatatatatatatatatatattgtgttgctgccttacattaattataattattatgtaaatatgatcattttctcactttagatacaccgaattaacatatttgggcaaatcgagaagtcatcaaccgtaagtagtataacgtaatataataatatatctggactagagtccacaagaagtgtacaaagaaaaaaaaaagtgtatatatatgtacatatatatacatatgtaattaaattactttgtatatatgaattgaagtgttcagaccagcgttgtagccggaggtggctacaatttcgtatttgcaatcgaagcgacgtcgttttatggtgagatatggacgtggctaagattgacatgcagaataagaagcagcagctaaaggagaacatactaaaactagttgagaaagataatgagagttttcttcagagactcagggacagaattaataggttttcaacttttgctttatgttccttctcttacttttttttttttttgcttatatatataatgtttgttattaaatttggtttataaactttttatagggtgggaattgagattccaaagattgaagttagatatgaagatttatcagttgaaggagatgtccatgttgggagcagagctcttccaactctacttaatgctaccttgaacaccatcgaggtaccaattaagctggaatgagttactaagaaagcagagaaatttgaatgatatttttagagaaatgctaaaaataacaccattttaatgcttattttatatttatatttgttgtatccataatgattaaaaaagttgttttgatatttattttgtgtagggtgtgttgggaatgattcaaatagctccatcaaagaagagaaaacttcaaatactcaaagatgtcagtggaatcattagaccctcaaggtgtaaatcattacaaatctattatgatttctatctacaatgccctggttttgatagcagtgttgtttttcactccaacactagttttttgtttgtgtgtcgtttattgtttacaataatgatttgtaggatgactctacttttggggcctccaagtgctgggaaaacaactttgctgaaggcacttgcaggaaaacttgatcaaaatttaagcgtgtgtttggtttttcccattagtatcatctttcataatttttcaatgtgtttttttagtaactaaatagttttgtatcataatcaggtatctggaaaagtga

SEQ ID NO: 267045 - DNA, 1313 bp, Cannabis indica
tatatatatatatatcttgttttttcaagagaaaatagttgtacttacatggtgaccaccttcaagaactatgtcctgaacactctcagtcacactagttccaggagcttcaaccttaatttcttgcttctcaagctcagctggggtgtcattatcaccatcttctaatttaacttctctgcttgattcagcagtgacactccaatgcttgatagccggtacatagtggtaccgctccgtcgaaaagacatacatatgagcaacagctgcaatagccatctgccaagccagtaaacataaacctgcatcatctttgctttaggagtataatagcaaaaccagacatttcacctcattaataaggccaagaccaacaaggacatattcttatcagattatgaaagtgcactatcttatattaacagaacaaataaaggcaagccaatgtagaaaaacagagtgctaaaagaatttagtgaagggactcacttctatgcaaatcaagaaatcctgcaatccactctgtaattctccctgtttaggtatagctccaaaagcacgcagtagagcaatagctacaccttgccaccaagtggcaaatacaatagccttgaaacttatgaactttgcaagtggttttattggttgaagtctttcatgagttacattgtagaattgcacaaggcaatacagagcccacatctggctgaaatttagtaccactgctaggtagggatatctacaacaaaagttaagatgtcaaaactagaacttgttttgttaacttgaaaattaaagttaaaaaaggctcattaaattttgttttcagaagggttaatgataataatgagaaacctacccataataccacttaaattctccatcaccataaacacctaggagctccaacaataatgctaagaaggcacaaacggttttcagaatcatctgagctaatgaaaaaaacaatatatgagaataaagatttcttcttaagaaaaaagaaatgatgaagaagctatacttacatattgtacaaggccaaatttctcgattgttaacaactcctttccaagaacacatggtcgagtgaagaagttccaaaacgacctatttctctcattaatatgattttcacttgcctcttctatcaatggtttgttcagcagttttcttgattcattttcaagttcttctatgacacttctttctcctcctgccatggttgtaacaattaaacaataatactactaataataaaagaaacataatatattataatagaccccaaaaaagaagatcatgatagagtg

SEQ ID NO: 267046 - DNA, 845 bp, Cannabis indica
aaaggccaataaactccaaatgcaaaataacatcattttcctatttattattggggacagaatgttgatgtgatgcttgcaactttttactaacaattgcaaaatcattagttgacaggaaatttgaggtttatactacatataagacaattgaattgaactacatcttcttagatcaggaaagaaggaagcaaaaaacagaaagatggaaatcaaaagaaatgatttattaatgtttattaatctcaggacataaaatcttatgatatttttttctttctttcaggtcatatgcctactaattttagctgctgatttgctggtttatgctctatatttgtcaccagtgggtgttacttctcttcctttaaggattgcaccatatataagagttatattttttgtcttgaacatcaggtattgtgtataaagtgtcccctttcccattcatgtttttgcacataatacacgaatatataaaaattaaatttgggaagcgcaagaatcttcacattgaactaaaggcttttgagcttagcttgaattaaaggtggcattcgtttttctattatgaaaccatcttgtctagctatgtacagtaatttcttatatcaatctgagctgagaggctaagttttgagaaagacaattgaaacttgatggattgggccattcaatcagttgtagtaatctaaaaaatctgtttttatgcgtgtgttttggctttgtattaatttattggtagtctttttgcatgctatatcactgtaagttaaggtggcctttcctaagctacgaaaacatatcctcggatcacatggaactaatcatctaaatgtaaactt

SEQ ID NO: 267047 - DNA, 1529 bp, Cannabis indica
aggctcgagagaccttgagaggaagtacttcttgtaggaaagatattaaatcttacgtgcatgagatactctaatatttagggatgatgtattactttgacaattataaagtaattcattggagatacttctaatagtaatagttagtagcaatatgccttttgattggccctttacaatagaaaataaaagcatattgtgtttgtgtctaatagcagtgactttgacattcttgagtttcttttacgcatattgacttgagttaatgttgtcttgacttctttaatgagataaagattattaacactttttcctctttggactaataaatgtttggaactttttctttgctccttatacaagttgggatattctatttttcatcccttcatatcagaaatcaaagaaagatagcaatgctaaatttttaagaaattagaaataaatgtaagaaaaaataaaaataaaaattacatatgtaaaatgtgagttagattatccatttttgctactgtttgattgatgaagctgattcaagaaatgataagaaacacataatttaatccactaactgtaatagagaaggtgaaaaggagaaatccaaatttaagctagtataagaaaacaaattgactcatttaattgtactatatttacaataaacccgacccaggccccaaacaggaccccaacccaaaccccagacattggccccgacctcaagccctgacctcggatgcgagacccagacccaaactcggatcccagaactaaccttgatccttgacctcaaccccgacctcgaccttgaccccaaccctggccccgacgcccgaccctgaacctcagtctcgaactctgacctgaccccgacccgaacatcggcctcagccttggaccccgacctccgactccgactttgacctcggttccagagttgtaccccaggccgaccccggaccctgacccaacctcgacctcgaccccagcctcggccctggcaccagcaccagcaccgaccccagactccgacctcgacctaaaccccaaccccgaccttgatgtcaaacccgagcctcaaaccatttttaaatattataataataagcaaatatgaattattatgtattaaataatatgattcatattgtattaaaatttattattgtaataattaatacactacaaaatttgcaatacgacctttatccaaacatagtattcctttttttagtaaaatgtattttttttttgtttttaaaattttaaaattaaaaagtgaaaataattttataaaatacgtttttttgaaaatattttcactttcctaattagaaaaataaaaaattgattaaaaaatattacgaaaaacactcgtaatttgtaagagtttgtaatatttgcatgcattattttctagagtataaataaatacagttctcaaaatgatcatactttctaagtcaacaaaaaacaatttcctcgaaattaaaattaaagaaagttgaaaatgtacttattcaaacttc

SEQ ID NO: 267048 - DNA, 1892 bp, Cannabis indica
cataacaatctttattgtattttttgtgcttatgtttatgtgaaaaaattgttagaccttaaaaaagaaaaaaaatagcaaagaaaaagaaggaaaaaaaaagaaaaagaaaaagaggtataataaagaaaaagagataagtatgaaaaaaaagaagtaaggctttatgtagttggaactttcctagtttgtactaaccactacttatatatatttatatataaatttagatgatgtttcaatagagttaattaaggcgaattaacttatgaatatttgttatttacaatacacttaattttattttaataaattaaaacttaataaatttttttaatttttattttaggcctccaaaatatgtgagccttaagcacaagtttaatccgcctatacctaaagccgaccttgtttaaggtctacccaactcagagatctaaaaaatattttcattttaaagaaaatgctcaataatctttatcatactaaaactcatttaattttagagtcggcctttatttagataatacctagttaattattgataaaaatctatgctaagtaaaatgacaaagtcaattaaaaattagtgatattatgataaggcaagcacccaagtgtggacatgtgattatctatatatcaattattattattattattttaaattagaaaataatgctaactagctcaccatatatatatcttttactaataatttgctaattagtaattatatatgtatttgtgtgtaaccttaattttttgtttaatttccttattttatatgcatttgtatgtgatgatggtattttagtatcttaatgtcatcattaattatatgagtaattatacatacatgcacttctgatttatacaaattaaactgcatgtgtaattaacttttagaagtttttccaaaaatatgtttttaccagctaaaatttctatataaaaatatacgattttgaagtttaaagttatagaaatataattttaaaaaaattaaaaaataatgataaatcaattttataacaactatgaaaaattatataattaaattataaaataataataaaaaaaaataacgataaaactaacttcatgacaattataaatgtattataaaacaatcaaaaaataatatcaaacagatgattaaagttcgtactcttgtaaataaaaaaattcaagccgtaaaaattaaaatttctccctattgtatttttataaaaattttaaatctttataaaaatatatatattctctacaaaaatttgttaattttaactatataattccctacaaaaataaagtaaaatttaaccatataagtaaatataacgtggttcttatgaaacaaatatgaatatataaatgttagtgtggttgatgaactttacatgaaataatgtcatattgatataatatctcccaataatagcatctataaatataatatatatatattgtaagctaattaattgtctatttatacatatgtagatgaaattattggttatgtattggaaatatttttggccttttgtggaatatataataatatgagaaagcaaaatctttaagaacccttagtggaaaatattgttcatgatgatgtggcaaatatatattgtattaaaataattattattaatataattggaattaaattaattgaatcaaattgtgtgaagtagtgatgcgagaaaagaaagaagccttaatgaattttgtgatataaaaaagcatgaactttgtcgttttattgtccaaaaaaaactattcaccctccttttctaatgagtaaattatattacatattcttttttttaatttggttttttaatttttatctttctattaaatttaatatatttatcttttttttt

SEQ ID NO: 267049 - DNA, 1656 bp, Cannabis indica
atgagcatatacagatgtatgatttcaatatgctgtttatgttgttaaaaaatatatatatcatgttcaccatgtgtctgtgagcaacaaattttatgcggccgtaccgtacgtatactattaattaattccatagaataatgttctcttatatgatttgatcggagacaaagtttgatgtcatataaaaaccgatcgatgcatgtgatgatatgtataaagagacactgtggtgataaattaaagtcaaaatactgaaataaatcatctatatatatgcaaataattaaatatacgtcaaatttatggaaattttgttaaaggcgccgttagtatatcatgttgttactgtctgattgtcttagcaatctattagattatacttacaaatctgttgtaacaataagcttctacactcttcattaatagcttgtactctttggactctctttaatttataaaggaatatatgatatagaagctttgtaactttatattttgcaaagtttattcttcgaagttatacagtaaaacactctaagctcgtccatgtatcaataatatatgataatggtggcttttgggatcaaggggccggccctcctcggccatttttttttttttttcatttacacaaaatcgtaaaaccctaactaaagaaaagtattttcaattgctttcgcaaaaattttgctcaagtatgattctacatgatcttcttttttgtttacttttgcattttgtttgttagccaagcttgatccagatcacaatcgagtactactactagctagtgcatatatatatatatatatatatatgcacatatatatatatgcatgccctgtttatgcatatatctctacactaaattaagtttcgaattttattattaatttataatatatgaattttgggtttaatgagtttaagcaaatattttgacgtcgaaataaagtttcattttatcatttactctaacttaataagtagtttaattaaaaaaattagagtttctcactcttaaatttatagctacaagaggttgttttttttttttttctagtcaagtccgtactttcctttcttaggcatatgtgcagcttggtcagagttgtattttactagcatgatttgatatttgttactagattatagtcttgtctctatgatatgattattttagtctttatctatgtgatatgattttaagtgttttattgtctgtatgatatgattttattttgttgttagtattttttttattcttcgatggctcaaatattagtggttgtgaaaaataaattttatatgattgaaggagttgttagtagtaaatttatgtacattgcacacaatagtgagtgcttataagctacaatgtttaatgaactttttgcaacaaatttctactgttatgtcttctgagtggtgaatgaaattgagtgtaaatgtttttaaaatttaattatctatgtatacatttattaagtatataggagtgtctcaaatgttaacatatataattaagtaattatataattattaattttggatgaaaacagtcatatatatgtttctcttcaaggtactttcatctgttaacaatatacagtttgccttaaaaaaaaaatccctagttatctttttgtttcc

SEQ ID NO: 267050 - DNA, 1502 bp, Cannabis indica
ttttcttttcttttcttacacatgaaacactttaatcataacactcttttcctttgcttaagtctccaatagaactttaaagttaaagacactccacacactggactggagtgtggtgcgtgacaccttaacgaatattgtaaaatggcagctctcctttttcagttgcatgcttagtgtgaataatcattaattatcaagggaactattatcctataaagtctaccaaattctttttagttcaagggaacttttgtttttcgataatatatatttcgaggtttgagtcactagtatcttaattaaaacaaaaacatttggtcaaagtatacttaataaaatccactcgatttaatagtctccttctagtaaattttaaggtcaaggtgaatgtcgatgacactatttttgaagctcatcaaaggtttgagtttgggtgtatagctcgtgatgcgaatgagagattattggaagctatttcagagagtagatgtggtattgtccaccccgaaatagctgaagtaataaagaattaagaaggctttgatctggataaaaggtaacggttgggatgatatggttgttgaatcaaacgccttagttgtggttcaaacaattaatagttcagttcatatgccctctcaatttagtttgttggtagaggattattaatttattttatctaatttcaagaatgttttaatttcttttgttaaacgatctgctaataggactgttcactgtgtggctagagagtcttgttttatgtcaaggtacgttcaatgagctgaatgctctaactgatttaaagaacattgtaatagctaattatgttgataatgaatgattccatcttttattaaaaaaataaataaataaataaattattagactatctccaatgaaacactaaaaactcaaatttagtgttatttttcattaaaattaatccaaccaaacactaaaaattatcctatataagtatctctcactattattagtgagacatgacaacacaaaaaattgttttttttagtttctaataattaaataatagttaaatttttttatatatttattatttatatttttatataaagataataaaatatatatatttttgtgtaatttatagtattgtgattgaaattcaaaaaaaatatttaattttaaaataataccttaatcattttggattcgtttagtaggttgtataagagtcgtattctattaaataataaacaatattatgtttagataaaacaatatattatattaatttttacgaccaaaaattttaatacaatgtaagttgtattatttaataacaactagtccgtatgaacatatattataatatttacaaaagatttgaggttaaccccaatctccaatccagatttaaggacccgaacccgaaccaaacttgggatctagacctgaactgagcttgggacccagacctggacccgaaactggacttgggatcgaactcgggaccc

SEQ ID NO: 267051 - DNA, 1116 bp, Cannabis indica
tggagctatccttgtaaggacagccaagagatagctgagagcagagtctactgaggaaagtgctacaattagcaacgctaccagaacaagagtcagagtagctgtcttcagctgcataaaaggaacgaaacaagtgagttgaactatgtaccatctaaaatattcacagttctaggatgtgtaagacataaatcacaacaccatttgatttcaacccattaaaattcatgaaatagttcaaggacctaaaaaatttagtaaaattaacatgcttgtattgagcttgtttcacatagaggtaaaaaggaataataaaaaaaggcggtgtctttggactgagctagctatacatactgtgctagggaagctcggccattctatatacttcagttgaccaggctgctcacttaaaaaaatgaacagagatctcatccacctattagcaattcaaatatcaccagcaataattaagtgttaatcaacaaataaatttgttataattggatgcaatttcatcaactgggttctgcttaagagttattagaggcctattaaaatgtcttaaatttaagaatagtaccacacagcttctttagcaatggttaaaagaaaaggttcgtggagcaagttatcctcgaagctagattgataaggttctcttcttgccatgtgcacaacacaggttgagcccaatttggatttttgaacataatcacttcccctttgagcctgccacaaataattttataccggtattatattgggatgataactaaacacatacgtaccaaatattgctcctgcgaaattacccatctagattgtaccactttgatgccattgtaacaactgatattgccctggaatagcagtgtgggcattatggaatgatgaatgaaacctgtgaaaaaggagacgaactaaatcagttactaaggaaaagtaagctcaggacaaatgctaaaagggggaaaacaagatgtatatacctgaacaaaatgtcgtagagtgagaaagaacaaccatccttgattaaaactcaaaagacctgtcaaaaagatatagacaaaatcagtgaaaaaatctaaccaacataattaaaaaaaaaaaaaaaaa

SEQ ID NO: 267052 - DNA, 1663 bp, Cannabis indica
aagagtgagacaaagaaattatcgtggttcagatctcaatttgagtcctattctagctctctcccaaggagtttctccactatgcaatggagttcacaaacaccaataatgagtttatcaattagagctacacacgaagagatatagcctctcaaacctttatgatcaaacagtttagaacaccataaatgctatggttcttcacctccaagagtctccaactttggctctctctctcaacactcttctctaatttttcactcactctaatgaattcttacttgcttacaaattacataacaataggtgtttaggagtctcctgcaaagtcttcttctctttggtcagctcagtgaccttggctacttgattttgaaggagaatacaaaagttttacctttcctctttcaaagtgttcacttctttgatcactacctctaggtcttcctcaagcttggatgtggacggcgtgtcctcaatctgttgcttgaggtctttaataagcttatttatggcaagaatcttcttgttggcttcacccaactgaaagtcttctgcttgacatccttttttgcatcttccaatgttgttttcaatgtgttggtggtttttttgacttttcgagcagcaaatttagctcacgaataagtgtatgtcatcttctaattaagcttcacaataaaataggtataaaacatgcacaacataatacatgtataaaatagtgaatggaaaagtgcttactcgagtgatctccttcaacattccgaccatcaggacctccacagacatctcatccgccccaacaagttgttcattcacctcaagcatcacttgatccttatagaaagtgagaatatccttacccttattggtctctagttgcaatactggttgagtagccaatgtctttggcagcccgggcctcttgatgtttttccctttagagcctttggcctgagtagttaaagcttgaaacttggaatttttcttggccaagggaataaaatcatagaccaccacctcacgaacattcgaagagacagtatctaggttggcctcagtggtaatctaaggagtttcagtgctcggagcaatactctttggaaaagtatcatctaccttctagcgtttggtgagagacttctgatgggaggcgtcacctaatctcttcttcagagaatgtgatactcttttcgacaagactgcataaaaaaagaacacttgtttgaatatataatcaaggacaatagggttttaaaatgaaaagacaatctaccctgcacatggatgggagcaccctctcgaacaagcaatgaaggagcatcctcatcagaagagtcgtcttcttcttcttcttcaaccacaaaagcctctccctttccttccacctagatggaaggatgagtagcctctttaggatcatctcttatcctaatacaccgctcaacaggtacttggtcgccttgggtagctttcttcttcttcgtcttcttcttcttcttcttcttcttgctcgagtgcaacctcctcaatcacttggccttaatggccaagaatgagatattctgagcttcttcaaggagtttaattattttctggatggatttcaagtcaaacagccaataggtatcataggtagaggactaaccccatccttgtg

SEQ ID NO: 267053 - DNA, 1719 bp, Cannabis indica
taaacaactgctaatttccaaattaactaagcgggctttacaactggaattttttcattaattgatacataaaccgtattattttatttatacaaatatgaaataaaaaaggaggaagatagctagctaactgaatcgattggaagaggttgtaaccaaccgattcactaacaaactttaatagaaatactacccactaatagcatttatgtgtgtaaaatctagttgaagcagaaatatgagcttttctaattaacataagcctttgatgagtaagcccagtccaactagcgttatatagttatgtcccctctttaagaatataaatacatattatttcattataatcatatttaataattggataaataaaattatttttaatttagagatcgagagagagaggaaaatttaattgatagtattgcacactatcaaatcgaatatgattaatatgaatcaataatatgtataccaaattattatttaattattattgtgatttaaattatatacaaatttatatcttaggtttatttattttctatttttgtaatttcagaacctgaattaatacatcaatctctattatagttgcttcttatatgtttatacggctgagtcattaaattccaaatatgattttcacagcctattatgcatggcaatttgtcgaagcaataaccatgtctagtatcatacatacaataggcatctatttatgctttatctttgaaagtttttgtgttgtgtaatttctttttcataaaagtttcatagttattcaggagagaattgtgtttgcttctcaaccattcataattacacattgagaataaatatacaaagcataatatttgaactttttctccaaattgtacaaaaatatatacttatactttgactgtggattatgattattattcatttattctcttaacataaatgtagcttaagttttagaaataaaaggaaactttcaacaaccaattaaattgtttattcattggaagaagagcatttatgattaatcaataagaataagtcatagtttaaagatacttttgaaaattgaacaataaagttaaaaatatctaagaaataatattatcataaatatagaaatacaatcttcaaatataaggtagcttttttttaacctaagatgatttcattcaaacatcaaacaaattaccaagtccaatacatctctcaacaagccaaaatatataacaaatcaatatctaaaaagataaattatgttttgtaaaagttaccgattagatgcttagttttgttaaaggaaaaaaccaaatcttgtaatttcaaaaataatataaaataggctaattaggatttttgcctcttgaactttgacatgtatcaaatcatgccccctgaacttttaaggtcgttaaaaatgcctcctgaactattgagattgttggatttaaggattttttttctaatttcattcaattttactatttcagtgattgtttatatactaaaccatgctctccagactttgatatctaccaaatcatgcccctcgaactttgatatgtactaaattatgccccttgaactttcatccatgttagacttttttactaaaattggaaaaaagtcctaaaatccaacaatctcaatagttcaggagggcatttttagtgaccttaaaagacatgtcaaagttcaggggacaaaaatcttaat

SEQ ID NO: 267054 - DNA, 815 bp, Cannabis indica
attatatttgattattgaaacagtaaatattacatcatcatgttcatggcaataagatgaataccgatacctcccatcataatcgtccttctctgtgtccaactcaagtaaccattttacaaacaaataacaaaacagaaacaatgatagtctatacatattactaaatcttcattgtttataatacagaaagatcaggacccattttgggatataacaaactatcgaatcaatcatctagctcaattttcatgtatattgatgtaaagacctaaaggatcagtaaaaagaaattacatcttctcaactaaaaatcattatgaacatttttgcattacattgttcctgtgtcaaatctgtaccaaactaaatgtgcactattgctagccctctcaaaaactaaattattcaaatcaaaacatcaataagtttgtagctgtcccaacaacaaaaggttccattaacaagcgagtcaagaagtaaaaaagaacacccaacgcaatcgatatcgggagagcgggcaaagctttacggtacacagacaacaatatgagagtgcagccaagtccacaaataatagcaaggtaacaagcataaacagtcataagatcatacattgctgctcttccaacaagaacactatagaaaataaaatcaccaagaccaagtttaatacctctacttgataactcaactccttctcttgtcacttctctttcatttcccaatcccattagctcaacaagaggagaaatttcctcctgaccgctattcggtggtggtggtggtggtggagaatcactactagtagaaga

SEQ ID NO: 267055 - DNA, 1615 bp, Cannabis indica
agagagagagagagaagaaacaaaaaatgaaaaaaaaaaaggagaaaaaagaaggagataacatgtaaaagagactaagaaaaatgggagaaagatgacataaacaataaaggtatttttgtaattaaagaactttttgaaaaataaaattgaaaaccagattttataaaaaagtttaaaaaatcaaacataaataaaaatgtaaaaaagatgtcaaatttgacatttagtgtaaaatttccattaatatttatatacaattattaaaatgagatttaattaacttacaagtcctccagtaatgtaatgtagaagaaagcaagctgaggtagaagccaacaattggacaatccaataaagaatggatctgacgacggtgatgttaccgccgatgagaaggccaagagtcacggcggggttaaggtggccgcccgaaatgtggccggcggagattgtcacagccactataagggtgtgagccactgccacagccaccaaccccactaaggcacctgcctctagcttatctgaattatgtccattaattaattaattaattaaatagtaattacaataattaattaattatttaataaaatttattatacccgcggccatggctgagccaacgccggcgaagacgaagagaaaggtggtgatgaactcgacgacgagagctctaatgcaatctggttgagcagcctcttggctgctgcccaaagcaattttggccattttttttcttgcaatttatttgataaatttagtgatgactaaaataagttttaatgtgacctatatttataaagtttttagatgcatatgtatgagattttttttttttgggtccatgatgtaggattaatattataatatgtggtattttttaaatgggagaacaataatgtccatttaattatgagcatgataataaaactatagttgactttaaattatgattaatgtaattaattttctatttgtatatgggggaattgttttatatagtatttttttaatttttttttttaaatttatgatttgggttgctttaataattttcatgtagattttaattgtgatttatgttgctttgttcgttgttatatgcatgtattttgtgtgtaaatttcagtaaaaaaatgacaaaaaaatattttaaagtgtaaaagtaaaaaaagttgtattttaaatcccaactatatataccattaattaataaatatatatattaaaatcaattttcttttcttttaagaatatggtgtttacttatttagttttgtaattttaataatatttatttggtatttatatttaaaatcatacatattttatatatatatatatttaataaataatggaattttagtaaaagcaaacgactaaagtaatacattgcaatctaattgggacatctcttcattagagacacgattaggattagagttagaaaaatgagtcaaataatcagctgcttaatttctaaatcatttaaaaataatttaaaatcagattaaaaaaattagtagcatcacaattaacctttaaaataacctatgttctgtttcatccaccgcctcggaacgacgacaacatgataaaaaactgttgc

SEQ ID NO: 267056 - DNA, 1768 bp, Cannabis indica
ttttttaaaaaaacaataatagaaatatattgttagacacaataaattaaattacaatgctaaaaaaatactttaaatttaaaattgtaaatatttaaaaaaaaaaaaaaatatcaatatataatcacatgtaaatataaaatatgtggaggtagagaaaagaaaaaaatatcaataacaatatagatttaaaatatgctcacaaaatcaattgtgtttacgatacaattgaaatgggttaaaccaaaacgctaaattaatgtagcttattttgtctcctcctccgctagaattgatgacattcataaaagacagctagctactccgaaaacttgcaaaaccatatattggtccacaagcaaacccaacacttcaaaagtttgaattatttgctatgatttagcttatcaacatccaacctaattttgatgatcaaaatacacaaataaaaattgtatattttagaaaatgaaaattacccatcacaccacgtgtcaacaacccaccaatccaaattggcccaacgttgcttcgagttcgagagatggttactagacatatagagaaaaaaaaaagtcccttatgcaaaactgttcaaaatttaacaaagaaaatacctaacagtataagccatgctcatagtctcatagagccaatgaggctagcttaagagggacggggaaagagatggattcgaacttaagacttaaattattagtaaactagcaaacaaatcattattcgcgtgcggttatatttttatttagcgataattatatcataaaataaattaaattttaatattttaatatttttgatatattttttacttagaaaaataaattcatatgctcgtacaaaataaaatcttgaaaaaaaaatattgataaatctatagaaaatttatgatataatttcaaaattgttattatcaccatatttcactagtttatattggctacaacatttaaattcgttgtcattaccgtatttcaattatagtcgtcaaattcacttttagttgcaaataaccttactaataagtttgctctgtacataaaacagataagttaattagttattaactactcactttttacaattaatcattttgttataaattcatcacttgtgtattcccaaatactttagcacatgaattaatcaatagattccggatctcaaagaaatttcaaagtatatacaactaaaatagaaaattaaataaataaattactttttttaattaaaattaaataccaaagcacaataaatatattaaaatttgaaaatgtaccaaattattggaatcgtgttttaaaaaaatatatgaaaaaactaagattgctaagataaacggtttatggttataaatatttaagtaatattttgttctttaattattaattaaataaaatttaaattgtgttggttgaagtatagaaatacttttaagaaaataattagtctttttttaggtgatatttggtaacacttttatttttaaattttttaatcagaaaaataaaagtaaaatttttatttttaaaaatttgattttaaaaaataaaaatgtgttttataaccacttttatttttcaattttaaaaataaaaacaaaagtgtgttttgtaaatttcattttcatttattgattttatctaagtcgggtccgggtcgggttggggtcccaaatacaagtttcaaggtctaggttggggtgggagtctaaatattgatatatatatatatatataaaaaaattagt

SEQ ID NO: 267057 - DNA, 1568 bp, Cannabis indica
cgattgttgagagaaattttgttttatgattttggagggggtttaattactctataaacagttaataaaagataaacagacttgaagaggatgtaattctaataggcataagaatggaataataaacttgttaaaaaaaagagaaaggaataatatacattaaacacctcttctataccaaaatgataaagaaagatagaaaaacaaacataactaatattatgatggtattgtttatttcagttggcgcctgatgtttcgtcatgtggagtcactctacatgtgatgtcggttagagcttacccatttaaagaaccaacaggatttcatgaactttagaaaaactattaaggtattttaactatatggtcttacgaagtttttcttttttattatttgagatgtgtgaaaatttaaattctaaagtaaacaaaaatacttttcccattggctatgaagatgaaattttaatttaaatataactattgtcttcaaatcattttcctcataaaattcctatctctctagaataattaatgagcatttagcctgagtatagagcctaaatcacatttcaaatcttgtcttgcaataataacattattggcatgatttaatgctattttgaaaaatttatgtgatgctaatagaatccaaaggtgtttattataaatgtattatgtttaggacactggcatgaaccaacaaaaaatcttcatgtttttttgtaagttgcttttggatatagaataattaattgtctcaccagattttgaatcttcttgccatatagagagcctcttacaacatgttgtagttttggatatatgatctatttcatgaatttattcatcaacaaggcattcttatgttgactttgaatgtttaatactcacgacagtcgcataaacaaaatacttataagagtagccacaatacaaataattcttagacacttatcagtatgatttttttctagtcatatatgcaaattatttatcttgccttatgtcatttttatttcttttatttacacatatatcaactgtctaattttataactataacacaggtttctacttaaagttgtcaaatgtaatgcatattgtggcattgaggaacaatcaaatctaccgattacaatttttcctccaaatcaattaagtctacttataagttttatgaatttactattttgttattgataatgttcctaattattttgtgaatcaaaactatgaaattaggttatattacatgtttttaaggagttttgaaggtaaagcttgtacattgatagtcctattatggccatattttttttttcttttgttcttaattaactatgttagtcatgttgtatttacataatcatagtactatattttattatatgaatattatattatttttgtatgtgatttgattaatagatttgattagttatcctgcatattgtatttatttttggtcgaaattatttggttccagaacttttttattattatttttttaaaatggttttgtctttcagttttcataactgtaaagcaaaaaacaattagcgt

SEQ ID NO: 267058 - DNA, 1447 bp, Cannabis indica
gtactatttagagataaaaatttattttataaaaattatatgcaatttgatacttaatttcattaagaacaatattacacttatttaattactgtctcaacatattttattccttattccttaaagcttaaataatttataaatgagtctttggccactaagtgacaatgatcattttagttaatttatttaagtgatttgagaaataataataataatttaccatcgtaacgaatcagagattctggtaatccatttggacgaacagttttctctttggacccttctgtatgcttactcacttcgacttgcatcctgcccaatcacatttaataaataaaaatcaaattatcaaattaatagacagacagaaacagatctcttgattgaatcaatctccttatccaattacataggcccactttgtatcaataactggcccagataatggaattttttcaaaaataataaataaatttgaaaaatgcttcattgctacattattgaagatgagatatatgagtgagtgagatgttctttggtcccacgtgtaacacatcacacacgtggtatgtgctttaggacatattctatattaactagtctttcatctatgaatattgaatatatatagtgttcatgaattattgtgttcatataaattaatagtagtaatacacacatatatagatatatatgttagtatcatcactcaaactcaaagatagttcctacacaattacgttcattcaaaaatgtctcattcaccatttgctaccatccacatataaagtaaccaacaagatgtgacaaaatatatattagaaaaataatataataaatccattccataccataacattaaaattaaaacttttatttaaaatatatatattaattaatactttataaattcacttaaaaaaaaaaaacttcataattctagaatgtgcaaaaaatttaaaatgatatgtattgagaccataaatttttattattatttttttttgtaaatgcatatttacgaacatttattaaaaaaaacatgtataatatttatatataagaaatgataaaaagatgaatctttattactataaggcgccttgtgtaatgcttgggccatccttcatcaacaaccatccaaattaatcaacacacgtgagtgaggtccacgacaaatatacatatatacattacattattatatatataggattatataattaaagtgttatttttatttttatttttgaacaataattgaagtgttattttgttctaactgtattactgaaaaatttataggagtttttttttttttgttatatatatttttaaaataattttttttttttacttatatttttacgtaaaattactatatagaaaccttaactaattgatagaacaacctaaatacacaataaaaattaaaaaaataaat

SEQ ID NO: 267059 - DNA, 678 bp, Cannabis indica
acatatagagtaagagaataatattaattaaacttgaaattattcaaataaaatgcatgtacaatggggaaaaaaatagaaaattataagtacaaagtgtaaaatgtcaataattcaaaaagattacttgctttgtactatatggactggatttgacacttaaagtgaagaaaaatgtcacatgggaacaaataataaacctacctccattttcacaaaatcaattaacattaggaattatataattcattcattcatctttaaaaaaaatatatatatatataatatatttatatatttattatataaatgaaacctggggaggacgacaagtggccgacatgtaaatgtagaaaagatcatatgaagagaagagaagaaaatgtgttactcataattaattattattattattattactatatataatttaattattaatggcttagattggatagtcataatcaataatcttgatcaatctcatgtgacattaattcttatatataagataaaaaagtagagtgtctgagatgatcataagcacaaatagtttgggataataagaaaatacatgaaaaagaaatataataatctcatataataattatgatagggaacttactatatatacatgacaacaaaacaaatgtcatctctttttctatctcttttggt

SEQ ID NO: 267060 - DNA, 1844 bp, Cannabis indica
aaacaaactttgaaagtaaaaaagtaggtataagcctgtatgagtaattttgtaataaattgtgtaaaatggatttttcatgtaaaaatttcattatattttataatttatctattatacccctttaattaatgtaaattatgtgctagacataataaagagtaattttgattaatagataaaaatagaaatatttgtccactcatcccttttaaatatgtggacatttattaaatcaatatttagtatggtttttatttttggaactttacaactttatacttattaaaaaaaaaaaatgacaattctgttagtaaaaatataatatgcccgaatcatgtgatttataattataaatgaccaattacaagtttctttatataaatttgctaattaattggacaatatcattacattataaataaagagatttttaatgaaaaaaaatcacaattatttaattaataattttcattaccaaataaggtaacaaatcagttagaatgtattttaaattaaataacaaccatgatataaaatagaagctctagtaaaattatgaatcatcatattagctgatcgtttaacaaaataaacagaaacattactcaaactagcaagaaattttttaaaattttgaatgacaaaacaaaacaaagaaatcatattgatatagctacgtaatgcttgcaccacccctaagcaatcagtttctccgtgaccttctaccacttatggttcatgatccaactaagagcctcatcgatacccattgcttcagcaaactccagatcaacaatgtcgaaagagaaaattgtataaccttcaatgaggaatccactagagttcctagccaccaaacccaaaccaaaactctgaccacaatcaaacaaaattgcatctacgttgaccttaagttgtggactcgtccaatgctcactaccattacccgcttaaaaaccagaccatgacaaatccatctcatattttgagcattttattattgatcaagatacccttttgcaaaaataactatgttctcaactctcattgggttacctttccaaactagatcattatgtgccgcttaaattgcctaacaaactacttccaagaggctttcttttcattatcacactgtaaaaatgtagtagcacaccagccaaagaaagttgcatcaagtgcaactgcagtaccaatacccaccctattccaacacaattcaaccattttgtaagtgacaaatggagcctcaacaggcaggacaaatgtgaattaatacacaataacatcaaattatcttaattatattactaaatatcaagtagtaagaacaattcactagttagtagctaattttattgaacacttgaaatattttttttagtattatattataaagttatcgcttaatagctaattatataggatattatactcaacaacatttctagataccatgacatgttgttacgtagataccaatttttttttatttaagcgttgatatattacatcagcataacttgggactcgaacccaagatctccaatacacacgcaccccctatggccacttgagctagcctcaagtagtttacgtagataccaattagtatgacatgtttttataccatgaaatgttactgttttaatactaatcaatatcaaattatatgataataaaacattttatggcaactagtagctaactgttagaaaatgttatagaattttttgttgtaaaagataccacttagtaattaattatgtaggatctcatgtaatataaaatagtattggtatataaaatatggtattttacaattttgtatacattatttt

SEQ ID NO: 267061 - DNA, 1753 bp, Cannabis indica
ttatatcaaaattttataattgtacaattttaaaatttaatgtaaatgtaccacaaaatttttatttgtacatgggagatggtctttaacattttactttgttgttgaagaaaaagaaaaagacaagacattttattctgcacttaaactcagtatttcagtaatgagagcgtaccatatatatggtatgtacttggacaataaatgtgaatgtgaatcaatcaccaaaccccggcacgtgatagtctcgtgataaaatatatctcacccaacaccacgggtgactatacaattataaaaatataattagaaaaattgaagaaggagtcatatttgaatgctcaagtaattatgaccaccttacacacatatttttttatttcattgacatgaaacttctttcgggatacattttcctatctcactcatgtataaagcctcaaagtttccctcataacacaattcctatcctactactcaacgcttctctctcttcaccaaactcagaagagaaagtgagagagaaaaaaatacaagaacttaaaaattaagttgttggagaagaaaaaactcacaatttcattctcaacttaactacccttttcatcgaagaaaaaaatcaactaaggtatgtggcttttccatttcattcactcaatcttgtttggtcaataagaaaatctctcaagaaacagagaccaacccaagacagagcgagaacagagcatattatttctctcccgatttacatgtttcttttcagttaatttgatattgaaattgattggaattattttgttaagggaattaaaggtgttttgaaaagataaaatagaatggagggtccagagagaagagggagtttgagtagaagcataagcaggagtatgagcagagcaaattggagcatggaagacgtgtttgcttcgggaaaccattcacgtagaaatttccatatggacgaagaagaagaggcactcaaatgggctgccattgaaaagcttcccacctataatcgcctgcggacaagcataatgcaatcgttcgtagacaatcaaggtggccacggtaacaaccgtgttcccatccacagagaagtcgatgttcgaaagcttgacttgaacgacaggcagacattcattgataggatttttaaggtcgctgaagaagataatgaaaaattcttgagaaagtttagggacagaattgaaaagtaagtcctacttcctctctctctttctcctttatttttattttttaatattcacgatcatcacacgtttatttaaaaaattaaagtaaatgattgaacttgtcatgagtataattttcatatatgtaatcaatatatctatacatagggtagtatagttttggatgcctaaattggaatctcagaacgaaacaaacaaaaccaagccattttcgtttttgtggtttgagtaaaatacatatataaaaaaaaaaattggaatttattcattttgtggttttgttgatgaaatgcgtgtacaaacttatgataagggtttggttgagtttgtatatttacaaatataaaatgataataatagtttaatctttgacactttccttttcttatttgtttacttgcaatcatttcataatttaagacaaacaaaaacattcaaacaaggtattttattgcagtttagagcataaaaaattaggcaaatgtaatattcattccttcaattacacttatgtcaatcttgaaaagttgactaataaa

SEQ ID NO: 267062 - DNA, 3372 bp, Cannabis indica
attgtgtcttcaaaagtgtaaatcgaaaacattttttttgtcattttaaaaaaatttagtggtattcagttcaggttttataaaatacttttaggaatttttttacttaattttttttttcaatatcctacaccatactatgacatgaacccatcctatctcaaaccaaaccttgtacccagacccggaccttgacccaaacccggaccctagaacccggtccgaacccagacctggattcgcacctgcaacctgcaacctgcactaggtctaaggttctgggtcgggtccaagtctggggtccgggatacgggtctgttgtttgggtctatattgtctagggtccgagtacatgtcgttgttcggggttcaagtttggggtccgagtcaaggtctggtttcggggttcgggtccaaaatttcgatatgtgaaatgtaaaatataattaatatgttacacgaaaaaatctttttgaaaatagaaaacaacattgtgatattttttgtcttttagaaaaattatttttaaaaaatttggccaaatgacctttattaattttaaaaaattattttctgtttttaaaaagtgagaactatttttaagttaaaacatcctttaaatttctcaactttttgggttcgtaatagtataataatactgctcaaaacaagtaaatgtatactcattcattaagttctcgagaaaataaaagtcatgcaatttatttgtaactatagataaacttattcgtgagtaggctgctacaattaataacgtttatgtagaattaagtgagcaccatattgtggctgaagtgtaagaatggctataggagcatgagcataggagggtgagagttcaaaagtgaagcgttgtagtatcaaggccatggccattttggcttcaaccatagcaaggttttggccgacgcaaatccgaggtccccaaccgaagggaaagaaggaaacttgccctttggtggccttggatactccttctgcaaatctctctggcttgaactccttggcatcctctccccacaactccgtatcacagtgaacaaggatggcaggtaatgacaattctacccctgctggtattgatatatttccaagctgtgttttctcgtgcacagtgcgattgataaagattgccggtgggtaaagccttagaacttcataaaaaatcattgtcacctgcatcagtcattcatatgaatatacattcacaaaattacactaaaaaatcaggtctggcattttttttgtttagtaactcactcaagataataaaattgacaaacaagtattttatgagcttaaaaattttgggacgctttatttcctttactattatttctttaaacgaaattctaaatttttaatgaataaccttatgcattttatattattatatatatgacaaaatatttttagatagtacttttttaatatactcatcacataacaattgtgaaataatgaattaatataaaagctgaaatacttgattgcaaaattaaacaatacaacaataaggtgatatatatatatacatatatatatatatatatatatacttacaactttaaggtgtgataagccttcaaagtccggagtcatgttatcgccaaagacttgcaaaacctcatctcttgcgcgagcttgccaatgaggaaacctacttaaaaggaccatagtccaaacaagtaagacagaggtggtctcttgaccagcaaagtaaaacaacttacattcctcaattacatctttaatactcattccaacgttcttgttgttcccatgttctttaatttctttgaaattggactccatcattatgcctaacaagtcatcgttgccagcttctccggctctcattgcattttctcttttattgatcaactctttcaaaagagtttgtacttgcttatctaattgtttcattctcttgttcaacgtagttggcacaaatctgtacacgtaaatatacaattaaagatatatagttatttatcttataataaatgaatgcaagtatagtaataatatatatgtatttgtatatagacctccatccgggaacataaacaatccttagagctttcatagcaagttcagcttgctctttttggagttggaaaatggtcttagcttcttcatagctactcccaaaagcagttcgagaaatgacatctccagtcatattttgaaggtaaggccacacatctatctcaccacattctttgtcacttccattctgcttcaccattaattgctcccatttcgttaacatttcattgcagcttacatagaatgctggaaccatatgctgcaattatacataaaaacatttatattataaataaattgtatgtctatagtacaccattaaaaaattgtttctctagattttttatctgttttttgatattcagaataattttttattctaattaataattgtttacattatagttatttaagattatttataaattttagaaaattattaaaataaaatttaaatattttactgcacctaattattttttctataagtctcctaagtaattattttaattttatttttgatatataataataattcaaaatttttaaaatttaaaagtaattttaaatacaaggtatacattgataaaaaaaaatggataattatttttttctctaaatgcgaaaaagacaagggtatagtatagcaatcaatctcttgaattttcaaaaagcaaattggtttgtgactaaatatatatacctttaacttctccatgtggaaagcttgattgatcaaccttcgatgtttgacccatttatcaccctcataatttgctagaccagtagctagcaaaagtacaagtggattgacacgtggttttggaaaatcatccaattttgtcaaaatatctttcaagagttgtgggtttgtgatgtttactcttggcgtcggtccaatccatataaatgaatccttacctgaattcatgttaatgttattattcaattcatcatcaacacacactatagtaatatagaatttaaataataaattatttatagagcgtttattaatatttttatttttaattacaaaaataaatgtaaaatttatattttgataatttgtgtttttaaaaaataaaaatatattctacaataatttttcatttttaatttaaaaaaacaaaaaataaaagtgtgttctataatttttatttttaattttattttagttaggtctaaagtcgggtctaaagccataattgtggtctgtgtttaggactagggctgaaggcgaaattcgggtcctaaagtccaaattgagattggaatctaaaatattagttaaaaaaa

SEQ ID NO: 267063 - DNA, 1330 bp, Cannabis indica
cttataaaaaaacacagtaaaaacgtaaaaaataccgacctcacagtatttttgtaaaaaaatggcaaaagttagtataccatgaaaatttcccaaatattatgagtttatttgtttgagtatttgtatttttaagtgagtgcacacactttttttattgttaccaaaatctttcaacaacataaattattttaaaagaaaaattgtgaaattgtaaatgataattggtgggaaaggaagtttaataagggtgatgttactgttgagatacaattttattatttgactcatttggcaaattaataaaaattctatatttactttttttttaaggagaattctatatttgctttcaaaaatagattagatttttctaatctaactgacattttgaacaagatttaaactgagaaattcctttaaaattgatttgagtctgtacatctcgatcttagatatttttaacacaccaaaaatgacaatagtgttgaacaacttgtcaatgaaaaaaaaaataatagaaaaacaaggaatttaggtgaaacaagtcgaaacttgtgaaattctttttaaagttatggagcaacacaagtgaggagtttgaatttggtccacttagattggggtgggacctaaagaaagtgtcattcaattctgatgttgaaggatgtaaattttgggctatgtggcctcaccaaaaccattatttgaatttttgagtacttttactcattattaatcattttttaattctcattgcaagaaaaaaatcatatcttaatttgcaattaccatatgatgaaagactagagtaaactcactttagtatgacacttttagctttggatgaaactttaaaattcataacatctattaatatatatatatatatatatatatatatatattaatagatatctatccttcccaaaaagcatcataccaatggagatatataaatatatatatatatgtctatccttatatactcacaacccttctcctttcaagccaatgtaggactttgtttgcattcccaataatcttttcctcaaacataggactacatagcctcccctcagacgatctttcattgcaccgccgctatcaccaaatggaacacatcgcctgaccttcattgtcaggaagactttcgacacaagacaccaaacaagatctccaatctgttcattctctaccaactagtgtactttcctccataacccttcccctttcaagcctatgtaggactttgtttgcattcccaataatcttctcctcaaacacaggactacatagcctcccctcaaacgatcttccatcttgcacc

SEQ ID NO: 267064 - DNA, 1302 bp, Cannabis indica
gttatagggttagaagtttagggttttgtagtttatgaaatttagatagatattttataattaataaacaaaaatttatttacgaaaattaaataaacaaaaattatatgacgtgtagagttatcaaatcaaattcttagttagggtcacttctattcagccctaaacataaaatcaattaggaaagaaattcaggaactgagttaaaaaaataaaatagagcaatcgaaattaaagtatagattaagcatacatacatatttgagaaggtacacaatcaaagcatacaaaagaataaatttaatccaagtgaatgcttggaatcacgattgaaaacattagccctagttggacttacatgaacattgttgaaagtttttcctctgctccccttctccaaaagatcatagttgaaaacaaactctcttccaatatgtcaatcgtaaggaaggataaataaagaaaaagcttgatgtaaatattttatttttactatatgctaacgtcaatagttagggtcaggtagtttttatatagaagggatatatatagatattatgtaaattttttaaaaaaaaaaattattaataatagaattaaaaaattagaacaaaaaaatatgagataaattaactaattaaaaaattaaaaaattgagagaattaaagagagaaaagaaagatgaatttaaagtatttcaagaccgtcacgtcactgcctcatacttctcctttatatctatttctattttatataaagtgtgtatatatgactgaattcttggtttatgagaaatttgtgggttagtttttttttaaaagtttctattcaaaaaaatagtttttttattaagatatattttaatattaatttttaaataaattaatataactctaacaggaacacaagctaagccaaatctatatattattggaatatcaattcactcagcgtgtatatagaaaaatatataacatcatacataaaccaaccgtgtatatattattggaatatattattggtgcaaattatcaatcaatcccttaattctattgtttgaaattttttatctctgttaccattccaattggcttctctagcctaaccacgtatcgggtatcttatgtcaattcctctccattctttaaatcccatcaaaatagaataaattctaatttagagtttatattttcgttacaaaaatttattcaattttgagttaaaaagtgcaacatgttgagtattaacaataaaaactttttgtttatggttatgacatagccaaggaaattttgtttttgc

SEQ ID NO: 267065 - DNA, 1608 bp, Cannabis indica
tattaatttaataatataataaatgcagattgtaaccgagatatggggccacgtgtcaaaagtgcgcagtcataacagcgcgaattccatactcgttgacataacaagtagccgttggaacacaaaacacaacatttcatttgtcttttttgtttttttaaatatatatttctcttcatcaacttttacttttatttttctgagaaagtaaagtattttcacacaaaagagttgccgacaattatatcataaatttctcaattaaaataaaaaactgttatttaatttttaatatatgaaaacaaaccagaaacggaagcgtcggttagtaagcaaacgagatgacacctcagttctcctctgtagttttatattatttattatcataaagttaataattctccatgcgttttcttttaatcttacttcaacggacagtgacagggcatgatcataaacgactatatttaattatacgtgtacaataatagtataatatattaatactaattaatgtatgtgtaaagtatatactataaagatctatatacatccctgttaatggttttgatatagctttttttagattctttgaggctcaaggaaaattgagtttcatcatctctttatgtagataaagtcttactttgagtttgactcagattggacttcacccacttagtgattacgagtgacagagcttcctctctgaatctgagagcttgagccaaaaaggtttgtaattttctcttttcgtttgggaaaattcgagggatctaatgtgggttatttatttggtttgttttctgatgcagtctttagatattttgtgtttattatagcttaaactattttgtaattctgggaaagcaatctggggatgtttttaatgggtctcgttctatgtttagtttgtcacttgaatttgattttcatttagaactgcatttacttttcttgcaaaatgtattttctttctacatgtccctgctaggaatttttggcttatcactcataaaagaacttagtaatacatataaaagaatctaccaaaccctctgccaaaatgtcaaaaaggagcactgtaagtcaacaattttatcatgattgatgagccatgtttcgtttacaatctatctgggtgattttctattttctttgtttatttgttggcagagatgactttggttcatgtatctacaagaacctttattataaaagtcaaaaagaagcaatatttaatcaaatttttcaatatgaccaatgtgtttttctatgtgcaaaaattggtgaagttttgagtctttgctgtttgtttcataattttcaagctcatttccatttccctctttctgtcttcagtttacagaagaaccattgaatttcaagtccttgaagtggaaaaatggcttctctaaatgatatagcagttggagcagctataaatatactcagtgcatttgttttcttcctgatatttgccatactccggattcaaccggttaatgatagggtctactttccaaagtggtatcttaaagggttaaggaacagtccgctgcgtgcaggtgcattcataagcaagtttgtcaatttggatttcagatc

SEQ ID NO: 267066 - DNA, 1225 bp, Cannabis indica
gtatatcatgtaaatttccctaagagtaaataatattatttgaacatttaaagtcacgtggcactaaacaacttacacaacatgagatgggttccaaagaatggaatatgtatggaacttagctgtgggatcaaaccatagatagaattgcatctctctatcaccttttccttgactataaacattagtgtgtactatgtaaggctcaccacttaggttccccaagaactcaaagtccaattcatcccatgttgacccttctgaccgtaactatatataaaacacaaatataaggaattatatttagtttcaaatttttaaattatactttatatcttgattaaatcatgtgttgtcaaatggctcggaatgtgaattcaagtgaaatgtaaagtattgctcgatgttagtaagattaattattacgtacataataagcagtgacgacacctgcagagttgccaggaacaagcttgagcttcatatcgaatttgccatataggaattgattcttggattgaagacctgagcctgaaatttggtcaagtgatagagtaacaactttgcctcggtttagtatctttgcacgcccatcaccccaagtaatgtctacatcttcataaaagttgttactagcaccaactacattaatattagtattcaatgaagaactaataatagtaataatcaagacaaataataacatttttgaaagagtgtaattttggtattgagaagaagaagaagatgatgatatgttattattaatgttgttaatttatggggttgtgggtgggtagtatttatatagtgtgattattatgaaagtggtcataagtaattaagtagtagagttgtgtggggaatctttctcagtggtggggagcatacatatatagctgtggagcactagagcagaaagtgaattaagaaaattggagttttgttcatgttattattattataattatatttatagttaaatcattttcaagcccataacgtgtaataagggatataataattcttattattaatttagtagtaaattagatagatagttggatttgcctaggttatgttcacctaccccatgctttttttggcaactatatctaatgcaaaatacatatggtaagccaatatatgctagctttttgtaggggatttttctaaaaatattagattttgactaaaaatttacaattttactgttacatagaat

SEQ ID NO: 267067 - DNA, 956 bp, Cannabis indica
aaaccaaaaaattcaccgcactatttttttgcggtggtttttgtaattttttagtttcgcatgcagtttgggaattagaaaatatcacatgtggcaaattgatttgaaaaatagttaaaaattgtatcacttgtaccgcaaatacttctaattgttattaggtactctatgatgatcaacactatactaatatagtgtattgcaattaattaactggttttcatattatttattatatttaattatgagatgtaatattaatttataacataacaatacatcacctcttactatcgttagcttcgtaaggtacgcatttctcgtaatactaatccaagtaatatgttaagtaaaatatgacttctctatttgtttattatcatttgaagaactatattttatcaactgcatatatttcgagaaactaatacattaacccgtacagtgacagatatgatgaataattttattaatttaattataatttttttctctcgaactttgacatgtaccaaatcatgttctttgaattttttttcgttaaaaattcttcctaaactattgagattgttagatttaaagagaatttttaacggccaaaaaaattcagtaacataatttggaacatgttaaagtttagacaaaaaaaaatcataattagctattttattaaactttatatccactggtgattcgacaatccatatcatgatggtcaataatctgctaatcatttcaagtgctccactaaaacataaaaagaaaaatagcaatgacgtaattataattttaagtaaatggggcatagtgctatatatattgtggtcggacttttcgacatagtacaaaatccgcaagagcttggaaggaacaggtataaaacggtaccaaaaaaaaaaaacaaatttaaatttggcatgctacaaaaaaaaaagtataagtttgagaaacaaaaa

SEQ ID NO: 267068 - DNA, 2031 bp, Cannabis indica
tttttaatttattttttattttaagaatattttgtgcattttattaaaaactaatattgtgataataaattagctaactatgcccagcaggcagcaaatcacttctttgcattaacattcatgcgagtaaacccaaataaattgagttatcatatgatatttgcacacaacatattatatagtatatacattaatggagatgatttttcaatgaagagaaaatgacagaatgtattaatttttagaaaaaaagaaaaactgtgacaaaatatactaatatggtataaagtcgtgttttattttgtgaatagaagagctagcttatgctaagagtaggcacatgcctcccaaatttttttgcaagataatttgttgtcaatttttttttttcatgtatgtccaaatatagtaaaatcccctcaatttaaaagcttacactaaagttatagaaaattgatgattacgtagtttaaataattctattatccacaaagtccaaaattttcagtaaaatcattcattcacagccattgatgaagaaaacattgaaactgaaaacccaaaatcaaaatctaaaatcacagtttctgagcttatagccttatagcttcattataccttttttatatttattttcaccataagtagaatatgtgatatattttggcatagtaacaactctttaaaaaaaaaattaaaacaaagcaataaagataatgaaaattagacttcacgattattacaaagaatagtaacaattctttaaaattagtctatactagatttgtcttttgaaataatatatattaaccagttgagttaattcaacaaaaactcaacatctttccctttatagtaaaccttagttagttttaactgatttgattcttctgtaacaagatactatatagttgtaataaccatataattagattatgaattattaaaagaaattaatattaattattgatatttaatgattatacatgagtttatatttattgtgggtctcatcttcagaattaggaattagagttataatttttcaattctgaaaattttattaaactataagtgtattatttatgttatatgtaaaatttatagtttttataatttttgctcggtaacgatggaaaatgcagcggatggccaatttagtcacatgagttagattagaacatttcatttatcggggtactcataaattgatatttagaatagcgggattaggcagggtatggttttggaccattttacccctaaaccattttattagtttagctttaatcaagggtaaaattggaatttcatattttggtgataggtgttccaatccttttagtggtgggagctggccattagctatagtagtggatttaatttaagactatcttgatttatctaagattaatcaaaaacaaagaagaaagacaaaagtagaaattcatgttcttgctctctctctcggctcaaccaaaaccagaggagaaccagttgattcttcttacttttctaagatttcaactaggaatttggtgtgactcaagttgaggtaaagccctaatactaccctttttcattgatttttggtagtttcactttggtttaagaatgcaaatattgtgtagaagttttgtctgaaccctaggagttagaggatattttctgatgttgaattaagttgttttaggtttattgagttagatttaagggctaattatgttgttgagcaagtttgagttcaagaacttcaacttggctcaactatggtggattgtgtatttttgtgttattttcgatgctgtcacttggaaatgattcatatggatgattacagatattatggagagttttgagttgttttggaggttctttgtttttctacagtgaaaaacggcataccgtttctgcagaaacggtctaccgtttttactcggaaagacccagaaaaatggcctaccgttttacagaaaaggcctgccattttttaggcaatttctctgtttagttgtttttctcatgtttcct

SEQ ID NO: 267069 - DNA, 2364 bp, Cannabis indica
aatattttaaaaaataaaaatatattaagtatgtatatgaaaaaaatatagcaacttcatttgatgatttgaacttctagcgagaattataacatcgtaacctaaatagagaattataaatgattttgattgaccaaacaactgacacaaaatttatttggtctggtttcaaatgatttggtgtgaatatgttgaggtttggaaccatgaattgaatgaacaaaatgactattagcagccatatggtatttgttacctataaaggtaaattgagattaaaataaatgtcttcattattattttatgagatagtttaaggcatgatgctaagagtagttacctggtataattttgcctaacaacactatcatcccatgcccaattctttctgctgaaaaatcaccaccagcacatgcaaataggttaaatttagcagtcaatctatagttatttgactattaagtctaaaaggttgggcgactacaaatagtaaatctagtatatatggaaatgtaatggagatcatatatatgtgtctataaacaatgtattgtatcctgcttatacagttacatatattcatttcacacgaagttaattaccacttcattccatttgttctatttctatatataagaaatcaccacattataatgaattcacattttggttttgtttaaataaattgttgtttgttatagatgttcgaaaataggaaatatgatcctttggtaacacaattgatgagtttcatcgttcttgatttcataattttataactagaagtgcaaagcttagaatacccctaacatgtacagcatttgacattttcattctcataatatataatgtaaagagtaaacacacgtgtacaataaaatttattgtgtgtttgttatacgtactctcctccattattgaaaaaaggaaaaaaattgttgaattgaatgatgtgaacttgtggttgactgataagcttaatgtatattttaaaatacaaaaatgaactgatttataacgtgtcttaaagggtaattggttgtgagccatcgaaccgatcttcttcgtagttaattgggagtaattatagtcaattcaatcaactctgcttcttgcactgtattcaattttgtcaagttcaaacaggtggggagtaaatcacaaaaagaagaattgttttgtctatattgaaaaaactacaacactacagctaatcaacaaagcaaataaaacaaacacataacagaaagagcatgaaaacaagcaaaggaaactattgagttgcaagggaaatgaaaatgtttgcctaggaccattgtgatgatcaatccaagaaggtatccatggcatcagtgtacatacccccttgctcagaattcctatactccacttgttggtggtgattaagatgatgatgatcgaccgaggtggatgaagacgatgcagccattcttacaggcaaagtaaagctcctcttgaacttattttccatgctattggtctttctgccatcctcagcttcgtggctatctaaactcaataactcgtttgaatttccatgacaagcattatctgaattggggtggttgttttggttctcttgtttgtttcccaagttgtcagtgttgaacagaagctttgcatcatcactttttccagtgagtgcattaaagaaggacaaaccattgggccatttgatgtcattttcatgctgatctctgcctctgactcctcctcctgctatacctcccatcatgtcttccattcgggttgtttcagatgatgaatgaggatgcaggaacatatgtgtctcatctttggcttggggaaagcctagttttgctggagagttatggtaattaggtgaaggaatcatagaagtaggggatgggagtggcctttgtgcccagttaaagagtggtggaggtgatcttattggtatgggggattgttttgaaggaatgggaatagaagaggatgagcttctacttgaagaaaacaattgggagagataaaaaccagattggtagcccagtgattcaaaggtatgcctcattcttagcacaaaatgaaggtcttcaggtacctatagataggtaaatatgcatgctcgtcattagtactaattgcttcataatttacaaatgtttaaaatccaaagggagtagagaagagaattgaaaaaagaaaaaaaacaactcacaatcttgcaggagcccaactgcagaagaccatgaccagcttgaatcacagctatagtctggtgaaaataaattattacttgagaatttcgaatcagtaataagtaaatcagataatgatagtacatgatctacagttaaatctgtagtaagtaacataatt

SEQ ID NO: 267070 - DNA, 847 bp, Cannabis indica
aaactttaaataaaactaacattttaagtggcttaatacgtaacattaacgtaattatatatatacttaaagaataattaggctacactaagttaatatgaataatatgattgttaattatatattgatgtattatatatgttgatttgaggtgcaggtgagtttaagttcaagagtcacaaagaaaagtacacaaaggtagataatgagaagagggtgaaggaagtagaggttattgaaggaggatacttggagttgggcttcacactttacagagttagatttgagataattgagaaagatgaaggttgctccattatcaagtccaccattgaatatgaccttaaggatgactctgttcacaatctccctgcagtcactcttgaccctcttgctgctatagctcttgctgttcaaaaccaagtcaccaaaaattaataatatatacttaaatatcatatcatattaataaataaattatatgaataaccattatatagttatatggtgttctgatcaattgtactctcatacaactaaatttcctttttcattttattgagggatgcaaagtttatcataattgtttttatggttttgtaatgtgtggaaggagttgttttctctctatgtttttatgaataaatagaatttgttcccccaaattataactattatagagttttgttcctctaaaattttttgttataaaaatttctttaaaaatataatgctaataaattgaattttaaataatttaaagttgttaactatattattttagtacaattatatatacatgttatgactacataatcaaattatttgttttgaacagtaagtaaaa

SEQ ID NO: 267071 - DNA, 1408 bp, Cannabis indica
caaatgcagtatttttgtaaaatgccctaaatattaaacagccaaaagtataaataaaagggaatcaagacagctaggcaggcgcattgctcatcacctatataaaaagagattttggtgatcatgttttataaataaataagattatattattattttttcccagcgaggagagttgactttcttattcttgttcgttgactttcttcttataatttcttaattttagttataaacttctcatcaccattcttacggaaaacaccatatgacagaccacactcacatatattatttctctcaatgaaagggaaaaagattaattattaacatatacaatctgttaatcatatatattatttgatagatacaaataattattcaagcaccaatcttcatagccaataaattcatcacccgtacgttgcagtaaagtttgattcattaattcatctactctgtacataactataatttcggttatatttatataatagaaacatgttcattttacttacagaagggttcaactaaaatggaagagatcagccttagcagtgatggaatcggccggtacaggttagtcggcggcggcggtgggagccagccgactgaacatcaaatcgagaagaagcttaaatcgtcctcatccttgtcccttaggatccagcaagtgtcggaggagcttaacagacttaaatccatgaaaagttcaggcgcagcccgcgcgcgcccagtcatgagtgggctcaaattcattaccaagaagaaccatgggaaagaaggctgggctggggtcgaaaaacgattcgatacatatgccaacgatggactccttgatagatccaactttggcaaatgcattggtacataatacatatttttggaaaattcttagttagactgtaccaatattttctattttggggcactcaaatactaatttagtttttttcagattaaagcttattatattaagtactacttaaataatttatatttgccggaaatgatattcatattgcatatatgtaacatgcatatttttttttatcatttataacttaggaataaataaatcttcatttttccttaaaaaaagtcttcattttcaaccctattttttttaaataaatcacactaaatataacatttatccaacaattagtcatatataaatattataactataatatacaacaattataactaacccttttatgtacctcaactaaaaaatacacaactatattgcagcaaaagtaaccatctccctaactaataagaatattcccatttgtagttgatttttaattccaagttaaatttcggttttgttatttttttttttctgttggaataaggaaaaggaatgtttatgtaaacatttttgcaaaaaaaaaaaaaa

SEQ ID NO: 267072 - DNA, 2576 bp, Cannabis indica
tcttaaattttaatatgtattaatttatgcccctaaatttatttggtcgttaaaaattctctttgaactattaagattgttagatttaagaacttttgtctaattttattcaattttactatttcagtgattgtttatgtactaaatcatgctccaatgtctaccaaattatatccctcgaactttgacatgtactaaatcatgtctcctaaactttcatccataaaagactttttttactaaaattaaacaaaagtccttaaattcaacaattttaatagttcagggagtatttttaacgaccttaaaaattcaaggagcctcatttggtacatgtcaaaatttagggggcagaaatcctaattagccttagcttaaactagacaatgtcgtttttacacccagattacaaaactgtatgtcgttttttgatagtagaaaatttaacgaaaactataaattataattttttttaagggagtaaattataaattgccacattaataatttgatattcttctgaaaaaaaaattattgaaaattggtgtaggctttttttttaacaaataacaggtaggcttaaatgaataatcttaaataagttttttttacaacataacggatctgtaactaaaagaaaataccacagaagtacaagttacagagatctaggattgaaacttgaatcacaaccaatccaggtaatctctaaatcagttcccaaagctcgttgggcaagattatgagctaattgatttagtattcttggaacaaagcgagtggagacattggaaaaatgagaaagagaaagaacaatctaaacaatgtctgatagatgagatctatccttccatttgtgcttgattttgttaatgagaacttgacagtcagagttgataatactgacaggaaactagactgccatgcaccaacctaaagccttgttgagagcttttgcttatgctaagagaggggagaggcaactagtaactagcaagtaacaaccagcaatcacttccctctttgtggttctgaataatagaaccaaaacaaactttgcaatctttatcccgaattgacgcatccacactaggagcctattccagggagagcagcaccttgagacgaaatgacagcagaagggctaagggacatattggcagcttgtgcattactgttatgagagagagaaatgatctttgcttgggccgcttgaaattcctaaagataagaatcaacccaaaaatctacatctacaatagaggatttatgatttgagaaaataaaattgttacgatgattctaaataccccaaatgataccataaaaaataggtagttcgtgtttgttaagacactcaaaacctcgcgaaaggaactcttttatatcacaatttttattagtggcaaaaaagtgagaaaatctagagtgagaccaaacttttgctactatggaacgccctaggagagaatgagaattggtattaatgtggttgaaccaaatggagcaataaggattgtcaatcactttttttaatgaagagattaagaccagaagggagtagatgattaaaagcattccaaacaaaatgcttaattttaggaggaatcttggtggaccagacagctttccaccaacctttaaagaaactcctatcaaaagaagaaggaagggaaggggtagagttggcaaggtgataggccgaattgacaggggtgatgtcccaaaatgagacaatcctctctagtaaggtcaacagggatttttaaaatagaagagaccacacttgtggggaaaaaggaactgagtttcttaacatcttaggaaccctccttcttaatgaaaaaagaaacagtatcctcagggggaaaatgatcagttgtaagagaaacaaccctcaaatctgggatccaattcggactattgatttgtattgatttaccattgcccaccttccatactaagcctttgtaaaggagttccttgccccaaagtagacttttacaagtgaaagaaggggagtggccaagggaagcacaaagttattgtttctaaaatatttagctttaagaagtgtggctaaaagagaatcagggttaataaggattctgttggaaatattttaccaagatctagatttactaacaagtatgttgaattaacaccctaaatatgaatatctctaaaataataaaataaaacacataagagtttagaaaaccttacattgattgtagcggaatattatgattcattctgcttagatttctaaccattattcttttcagtcacagagtattatcaaaatctgagcctggatctctttctctccttcgggtttggttaccaccatcttccgcactatgattgagtacttgacttgctatgcgtgggcatgacactctatcactataggctcgagtatgaagaataatgaaggagacttgaaaaatgtatagaaggtgtctctcatctactagttgtttgacagagaaaactaggtttgatttagttgaagtgaattgttgagttggatgagatgatagcatcatgttccttttatagtgtttcaacta

SEQ ID NO: 267073 - DNA, 3499 bp, Cannabis indica
gttacttttatgtagttttcttgttattttgatattatttttatgaaaaacggtataaatgtaaaaaataattctttaaatataaaaatgtaattttttataaaaaataatgtcttatctaattatccctatatttgctaatcaaccagagggtgagttgtaagttggatagaattgaatggtctattgtattatagtgggtacaaaatcacacaaaatttggcgttttcacatccacgatttttgtgcggcataagacaatataatagggacaacgtactgcataatttaaacatgtttgtaaataatcatgatatttttttataaatgtgcatggagtggttgggaatgagcatattaaacaaaacaaaacaatcacaacagccagataatactttacaatgacatcttctaataaataataatatccttgaaaaaaaaaacgaaaaaaaataagaatacaaattattttctttttatttttagaaaggtttaatagcggcataagtactcaaagttttgagtttgtaaacggcataaactcaataatttttttaagttggtcgataagtacccaactatttgtaaaactgtaatttttcttcgattttcgtcagtacaggctctgttttaaattttaaaaaaagtaaactgatacaacaaatttttttgtctagaccaaataatctaaaatttgagtcttatatgtatcttgtttaagacaataataaagtctgtacagatgaaactggaagaaattacagttttataaacatttggtacttatgccactacaaaaaatcattgagtttatgacacttacaaacctaaaattttgggtacttatgtcactatttaccatatagtatataaaagtatttattgtttaatattatataaactaaaattataattgaccttagcaaaaaatgtgctctaataatagtatgtcaaaagattatttatgtcatgaatatacaattttattatttatttttatgccatttttattattttgttaatataactagttataacattaattatgaattatttatacttttttattcattattattttatataataaaatcataataaaaatattgatagttattatttataaatatttaataagataattaaattttataattatgtattggagtacaatgtaaaaatttcaaatagagtgctaaaaatgtgatgtattttttgcataaaaatacgagtacagtctcatatataactgacacgtggacttggttcccaataagaaaggatgatgtgttgagaaacaggactaagataggatctagtcgtatactatccatcacatagtcaaagaataagcaagatcaggagtatttaatactagtcgatcatataccaattatatgcgatgatgaagtatgtctctcttgcgatcctctccttacaaaggtatggtccgaatgactaatgtgatcaatgactcatcagggactcacatgttccaagttgtcaatgcaaagaatgtttgattatgcgatcaagggtgaacatagatattcaacgaaatcggcgtaaaggcttatcctgcgagtgcaataccgtagagcttgcgagctcatgtgttggaatatgaaaggacacattgcggcttaccaagttgcatgcgttgctgtaattaagtcaagaacatacagaaatattcttcatttattcttttaacgtttattttgatttaatactgtcatttattataaaaattgttcaagctgaccacttatgtaatcctaaatgacacttgctttctatataaaggtgtgattcaaatcaaataaactaagttgaaattatttcaaaaagtggactaagcagaccaagctctaactgaaccactataattctcttatttttttctttatttctactttcgtttttgtatatttggtagcttatactttgagtactcattattcaaagtgactactcgcataattggtgtttaatattctaattttcttcgaatattaacaatatttaatgctgtcaaaagtcttctgattacaattcgcgttgatcgtgggaaacgttatatttttaagattttggaggagaattgaaaatggctacaaatcagaagacatgaacaacaacaatgaatctttcaacgttggcactctcaatgttcccatttcaggaggaggaacaaccctgttgatgctgtcataggaggagtagggtgtaccaatgtgactcccctcaacctatttcctcaattctcaaagcatactagagaaacctggacaccaacagctaccatgggacaatttctaccaatcacacctgtcatcgcctccgagggaatcatccaactaacaaccttgaaatacacggatattcaggaaaaaatgtgtgcgttacaagcagagatcacaggaaaagatcaagtttgtgcccgacgtccaccacgagtcccaaaccaatgtcgtagtgataatccagtaactaatgataataggcgtcataatgaacattctcgtaattttagggaatgtttagttgataaagaccccaatggactcgacctaaatccacaaatttatgactccgtacgtggtagaggtcccgctattcccaacacaaattgactgcctattcagaaggtgaagagactgtaagaagaggaagatcctgaacgttacaacccacgcagtcgtgcacaactgcaaactaaagtaaacaacgtagagtctcatttttattccttgagaactaatagcctttgccctagtgtttacaccaagtcaggatcggtgttcacaagactaggaggaaggtaccacgtgtagagaagcgatctgtaaaactgcctcaacaaagtgttttgtgcacgttttcaaacttcaaggaatcacaatatagaggagaaaccccgagatcccctttttaccgattaaggtatctccctgtaaatacaaaaaacgtagcaaatgatgtcaacccgccacttgtaccagatgcacccaatgatgtggtagtacccgcaaacataataggaatggctacactaacaatgagaaatcaaatcgtacttgctaacaaccccacactgccaaaagtttttgatcaagaaaatcttttgcaagcactgaggagatcgagtagcacagaaagcccatatacaagctgcatggaacgttgcacttcaccgaacaagtgcaacaagccaagctcccaaaagtttttagactttctgagttgcttaatataaagatacaactaatcctatagattatcttgataaatttaacaatattatgaaagttgaccaagtacctcaactggctaagtatcatatccttgttgcaactttggaggataacgcacacgattggttcagctagttaattgaagcctccaaacgttcgcaaaattgttcttgactcattttcaggtgaccttgagtcaacacatcaaaaaactttgttcaaaaaaaaaaacaaacaaaaca

SEQ ID NO: 267074 - DNA, 3444 bp, Cannabis indica
tttctgctaaagtttttgatcttattcattgtgatatttgggggccataccacataacatctcacacaaatcacaaatatttcctcaccttggtagatgatcactctaggtttacatggatttatttaatgcaacataaatctgatgtttcttttataattcctcaattcttatcatatgttcaaactcaatttaatgatatgtttaaagttttcaggtccgataatgctcccgagttggtttttagagatcttttctctaaatatggcataatgcatgaatttaattgtgtcgagacacctgaacaaaatgtcattgccgaaaggaaacaccaacacttgttaaatgttgcgcgagctttatatttccaagccaaattacctataaagttttggtctgattgcattcttgctgccacctatctaatcaatagaactcctactcctctcctaaagaataagacccctcatgaatgacttttcaagaaacaaccaacttatgatcaccttcgatcttttgggtgtctcgcttttgcatcaaccttaacggctcatagaaataaattttccccaagagcacgaacttgtgtgtttatgggatatccccaaggagttaaaggatataaactttttgatttgaatactaaccaaagttttatatcaagaaatgtagtgtttcatgaagggatttttcctttccataaattgaataccagcagtgatgatattgaccccttctctaatattgttatgcctcataatgtgttaagtgatgtttcagcttgtgaatatcctccagaaaattcaaataactcggatcctgccaccccaatacctgatgtatatgaaagaagtgaggaggagcaacctatccctcaaaatgatgtttctgcaacacttccagaagcaaatatacctgctacagcagcttctgatgcaaataacgaacagcaatcacaagttgtgccacgaagatctcaaagacagaccaggcctccttcttatttaagagattttgagtgctattcaactatccaagacacctcatctacccctcatcatcttgagaagttcatctcctattcaaatctatctgacacttacaaagcttttatatttgcagtgtcatctgtcaaggagccaagaacctatttggaggctatacaaatagttggatggttaaaagctatgcaatgtgaattaaaagccctaaccgacaacaaaacttggaccatcgtaccattaccacccaacaaacgagctataggatgtcgatgggtttataaaataaaatacaatagtgacgggagtgtcgaacgattaaaggcccgtctagttgcacaaggttatacgcaacaagagggactagatttctttgacaccttttccccggttgcaaagatggtgactttaaaattattacttgctgtctcaaccatcaagaactggcacattttacaactagacattaacaatgcttttcttaatggagacctcaatgaagaggtctacatgtcaataccacaaggtttaacacttcctccttctctcagtgcaggaaccaatctggtttgcaaactacataagttcctttacggcctcaaacaatcctccagacagtggtataagaagttgtctgaagccttactacaagaagggttcaaacaatctcaagccgactatactttgttcactagaggagctgaagacaatttcatcgctctcctagtatatgtcgacgacatcatcatcaccggccctaatatcgacattctacaccagctgcaagactcattgcatcacaagttcaagcttaaggctttaggaagccttaaatacttccttggttttgaagttgcccgtgctcaagatgggttatttctatcccaaaggaaatacaccattcaattacttgaagaatcaggatacatcaacagcaaaccaagtaaaactccgatggatcccaaacttagacttgacaacgaagatggagaagccttggaaaacccttctcactatcgccaacttgttggaaagctcctctacctaaccttatccagacccgacatcacttacgctgtcaattctctcagccaattcatggctaatcctcgcactactcatctccaagttgtgcatcatctgcttcgctacctgaaaaacagccccggacaaggccttctatacaccaaaacatcaacattacacctacggggtttctccgattctgattgggcatcatgccccaccacaagacgatccaccaccagcttctgcatctttctaggagattgtctcatctcctggaaaacgaagaaacagcccacaatctccaaaagttcagctgaagctgaatatcgagccttggctgccaccactagcgaaatcacttggcttcaatatttgctgcatgattttcacattccatagccacaccctgcctttatctactgcgataacaactcagctatacacattgctaacaatcccacttttcacgaaaggacaaaacacatagaacttgattgccatttcatccgagacaaaatcagcaactctaccattcggttgatacctataactagcaatctccaattagccgatgccttcacaaagcctctcacttcaccaattttgagtgctcatgtctccaagatgtccgttttgacatatacgctccatcttgagggaggggtattagaatacaactctacagagctattttactgctacttactgctacttattttctctgttttccactttaccctgttgttgtattcatctaattaatcttcctattaatgagggaagatgttaaatgttagttggagtattggtttaggtagttaggttcgttagtatttctcctattattggggatactgacttggtcaatggtcctttgcctatttaaagggctttgttttctttttccattttgtacagaatcccttttctttctcagataataaaagaatgtcttttacttttctcatcatattgtgatatataagatgaatgggctactcctcccattgccaattggttttgggatggaacctaattcatcttattccttaaattctaacatggtatcagagccacttgtgatccgttgtgagcccaaattgccaccagtctaaaaagcggtttgtgatccgttgtgagccaaagtgtcgcgggtccaaacagatacttccgttgtctcccctttaacctctatttgggacctttcggccaatgtgtgccaatttctagtgttggggtctttgacctgtttcaaaatccacaaatttcccgacgtgtacacctacaaatttcccgatatttggccttgtgggattctttcaaatgtcacgttcggccctgtggtcttaaaggtcgttcgttatacccacactttccaggcccaaacgtgaggagggtgtattagagttagtcc

SEQ ID NO: 267075 - DNA, 1213 bp, Cannabis indica
tgttactgttttctttaattgtcaacagttaatttttatagtaaatagtaaagattatcattttaatgtgtttgatattattcttaatgatattattatccatgtttagaaatcttttaatatgtctaattttaattctttagcaaaacgggctcttagtttagatttaatattatctaatttttgagacttttttgtatcttgaaactttttaagttctgtgtctcgagtaattattccgttttcttaaaaaataaaataaaataatgggattggatgcattaagcaaaagttaaaatcttaaccgctcacattgtaacacataataataatgaaaacttttgttacttagtgattagtttcaacaatatggaatttaattaattgatattattggtagaaagatcttcctactcaacattagaaacatttgttttttgataactaacattagaaacataagattagaattaggtgaaagttgaatttcaatgaattgcactctccacactcaaaaatctagagctggtgaaaaggacaaagctaattaaatcgttaaaatgtcaattatataatatattatcaatattggtatgtaaaatttacaagacaattatttttttttaatgggggcaagagcaaaataaaattagtaaaatggatgtatattaaaaataaaaatatgtacattatttttatggtgaaaaaaaaaaagaggtggaacctcttaagcaccaataatacaatttaatatttctcatatatataatataatatttaaaattataataaaaatattgttaatttgaagttcttgagatctctgaatacactattgatactgctatgggctattttgtaagtaattgctctactgctaaatagttatcaaaagtccatttctcatacaggggcttatgaaaggatgcaggcccggcccaataaggaaaaagtgaaggccaaggcccaataatattcttcaaaatgtttgttacaaaattatcgaacttcaacagtttagttttggaaacaattttgtgcatacttcataattcgtatatgatagtgttatttttaagaaaagataataatttgtaaaaatacaactttttttttaacaaaaagttaaaattaaaatataaagtatgaggaggtaattggttacctttaagtaactggttagcttttctcaatattttaatttttttttttt

SEQ ID NO: 267076 - DNA, 1692 bp, Cannabis indica
ccttgattactgatgcttcatggtttaccaacaatgaagatcactcttcggcttaattacatcactcaatgcatcgcaactgcttcagctttggaatccgaagtgcaggccatctaccttgctctctcttgagctcaaaggaattcttgggatgatgtttccattttctttaattgtcaagttgttgtgttggctttctcaaagctaaaatgtgctcctgatttgggggtgctaccgtatctctcttgttgtgttagacttagttaatttgttgaacatttgtaaattttattttattaagcgttgtttgatttctccagtagtggatgaactggcttgaagtgctaggttagctagcctagaggctggtagttttaggggagggaaatttcttctccaactgtcaaagctactcaacaaaattagtgttttgccttttatttttattatatatttgtcatattatttttttattttataagatcaaaaaacttgatgaagaaaccaattttgtaataaaaaaatcagtttcttaataaaaaatttttggtaattgattttgattgcatgagaaactaagcaatttgaatcgcacgagatagaaaaaaatttgtgtggctggagaaagcgtgatcctattttgaaaaattaattatcttttttaatatttttttatagcattttctatttaaatactcttatatttagttagtttgtttataaaatgtcatatttagtgacatcaactttatatcctatatatattataaaacttctatttattttttcatattttttgtaaaatcttttttttaaatatttttaatattttttaagtgtattaaatgtgatataaaaaaaatacaaaaacttaaaatatggtattcttaacttttattacaaaaatattgtataaaaaaatcatagaaataaaaaaaaaaaaaaaaaaaattcataaccccaaagcaataaaaaaattaacttttaaataatttctatttttctcaaaatcagtccaaatgaaaacttcactaaagttgagtagaccttagggaaagatgtactcatacctttctattgatgacatatattaatgacagctgctttataatgttcaacttgcacaataaataataaggttagcatgagaaaagtagttggcaatttccaaacaccaatctatattaataacagagacagaatattgaatattcatcacaagagccgctttttctactctaaaatcaatatacaacaaaagctatgattattggtttgtttcagagtttcactaacaaaggatcaccttgctattgacttggaataagaagaccttacttttccacccatatatttaataaaatacgtatacatatacactatacacatttcacttgtcatcattttgatgctcacaaaatgacttagtaataagctagttttttccaagcaaattaaaggcaaaaccaaattctttttgcttatgtccttctcagctatttccatgcagcctaggctacttataaggcataatgtaataatgtatcttcacaataaaatagtaattttgaagaattactattaaaaaattaaattgttacgtctcttttctcagaatttaaaccctcaaaattaaacttagtaaaaataaaaaacgaaagataaaaattaataagaagattatgttttttt

SEQ ID NO: 267077 - DNA, 1298 bp, Cannabis indica
cacttctatctttgtgtgattgcagatataccacttttgtcattactcactttttagctttataaatggagatgttcatataatattaacacttaacagaatatttatagatataaacttacattacatatgttaaaaaaagaactaactagaataatctactactccaataataaatttatttacaattttataattacactaatattatttttaatacattattaaataatattttaaatatagatatttaattttttcaaacaaaaaatttgtaatctttaaaaataaaatacattcaaaatcttaaaaagactaaaatcttaaatgaaactagcaatacgtggctcggcacgtatatagtatagcgtaaattgtatattgcgtaaccgatggcgcgcacatatgtattacgtgtagatccctctcgttgaatatataatattctgcgtattacgttgtcacgtagacattttgttcttttccctgccacacccaattttgcttaccggttgctggggcgcgaaatgtaacggccaagtagtcagggctaatgaagtaatttcaacagttaggattgagaactgaatagtaatcttatgtgtatatttttaacatatccaatatgttggaataaggtaagtgaatactgatgtaaaagaataagggtgtgatgaattcctatgcaactcattatacatgtaatacatattagttaacccagcaatctaagaacgattttgtgaatatgaaactctttgttaaggtctaagaaagcacaacatggcctatatctggatgctctcatggggtattcccgaaagtgctctataagagatattcggaagttaggacttatgtggagatatctccgatatggaatcccactaaattagggattcacattgcgccatatctttcaacatttattgtataaaatctcgtagtgcacaacaaatgtgtcactagtaaacactacaacaaataaaattttaaggggcgacaaaaaatcgtctctaataattagggtagggggcgacaattgaatgtcaccactaaaaaagaatttctttattctgggtttgtgtcaccctaaagtattaattagaaagcgacaaaaaattattctgggcttttaggcaggaattttctccctcacattattagggcgactaaagtcgaccctaatgccctgccaactgacaaaatcaaggcattaggggcgacaatgttaccccaattgtcgcctctaatagtgtacacattaaaagtcacactaccccttctcgagccattta

SEQ ID NO: 267078 - DNA, 824 bp, Cannabis indica
gctattttgatgaccatgttatagataacatcctagatgtccccatctctagtaataattgtacaaatgatttggtttggggaaaagatagctctaatatttttaatatcgaaatagcttatcatcttgctcttacctctagacatattccttcctcttctttgtttcagcatgaaaagcagttttggtctaaactttgaaactcttatgctccacctaaggttaagcatcttgtatggagagtgatctctaactccatccttgttgtttcctctctttttcaggcatattattccttcccctatttattctctctgtcatcttcaaccagagtctatcaaacatgttttgattgaatgttctagtgctaagaaagcctggaaacattctcccctctatgattactatactaaatataaacactataatattaacgattttctgtatttttcttttgacgagtataacttatttatattttttttttcagtttcctttgatttttatggaatcaaagaaatatcatcttttacaatgaacatctcatctcctttaactatatatgaacggtttgttagttttttttttcatgattatgagaaggcgcaacaagcttcatccaaccatcaaaaacaagttaagaaggatttcatttatgcatctaatgtttcttcaagaatgatgaatgtaaacacaaatgcagccattgatttgattataaactgaagaaacacaacttcgagatagtggttcgagatggatgtaataatatcaaagatattctcatcaaactaatagttggaagcacctctccagatgtaggc

SEQ ID NO: 267079 - DNA, 1410 bp, Cannabis indica
gatctcatcttctttcattctctattctatctcacctgccattgccgacacacacttcactttcttggtatgattctttattcttttcttctactaatttttactattttggggttttagttttctgggttttctttcaatcttcgattcttttgttggatctggttcatttttgcaatctgggttttgttgtgttgtatgaaattcatgggtctttgttagtatatgagctgaatcttggttgatttgtttctttttctagtggggagaattaaaatttgtttggatctctgtgttttcattttgcaacctgaatcaccaaaaatttgaatgttgcaggggcgtttgtcaaatctttgtgttttcatttagttcattgattgagtcggtttacattgtttcaattcaattagagttgattacagctgaatcttgttccattaccattatccatgtgtgtgtggggaattagtttcatattgtgggcaaattgattttttcagtattatcattagtgtgatattgtgggcttttgcaacactatttgagtggttgggtaccaaattcgattagattgtttaataatttagaacttggcggtaattagtctgactttaatcttttacaataattgtatgtttaaagtttatgattttattgaattgatttgagaatttcaagtagtgttcacatgcttacttgatttctaggatttttgttgataagtaacgccactgatgatgggcttaatgctctttaagttttgattatgtatgatgtttttgttgtactcttatagtagatatctttgagttttcccttgcttcattgattgagtcggtttacattgttccaattcaattagagttggttacagctgaatcttgttccatttctattatccatgtgtggaattagtttcattgaagttttaaaaacaaaataaataaatataaatgaaataataacttaacattgaagtattaaattttttatgctaatataaaataaaaatattaatatagcctaaaattataaaattcatgaccttcatcatcaaaatataagcattaatccaacatgtgctttctcattgtaagtaaagtgatgatgaaagaatactaatttagccatatatagacatcatcactaaaactcatcttcaacatggaaacacttatctaataaaatatttcttttctatcacaagcatatgagttttcttttttattattattattatagttaaagtacaaaaaaaattatattctaactcaaaacttattaataaaagctagtattgttttttgtagggtagtgttaattttctttttgttttccacttatgttactactgcaagtaaagaattttgttgttgtttttgcttttttatctttttgtattctctg

SEQ ID NO: 267080 - DNA, 1732 bp, Cannabis indica
ctctctctctctctctctctctctctatatatatatatatatgtagtataacaaccttagcaacctccttaagatggaaaatttaaattgatgggttttgcgaagcatcatatttttggatcaaagtccttattattaaagcgttcttattgttattttagataatgctgcttattgaagatgtaataaaagaactagcaagacataataatgagagttatcgttaggtggttggcttcaataggagagaaggggaatcatctagtgtctggctgctcccatcaacatcacacacttgaatgaaaaatttgacaccagaactaccaaagggaactgcatagtcaccgacataaaacgcttgaactcgcgccactccaaggacctcacttgctgattctgctttctttgcataaatattgtattttgggaatgttgaatcattcccatctttcaatttccaaataatctttacacttacagtcttagaatcctcagaggatggagtccatttgatgtgttcaccctcgacaacccatgaagaagagggtggaaaatttgatttttgttctgaacttttgactgttatgtggccaagcacagcatagtactcgactgaggctgtactttgatcggaagtgttatcgtcgtctaatttcacaatttgaggatcaggcctgtaacaacaagcagagatttctgttaatgtgtgtccactaagtgagatgctgctctcctgtattgtccattctgaagaagctccaagattttctagttgacttgttgtgaccacggtactaaatttgcctgagagatgatctacttttgttggtgcaagaagtacagactttttctcccatgccccagaagagaaattgagaattaggccaagcagagaatccgccttagatttcacctgcattagtcaaattagatcagtaaagaaattcttctgagaatttagaaattaaatatagttacaaattcaaattatcctggtatcagaatttggacaataaactaattcatagtgtttttctagatactctactaagtaataaagaattaatatgagaggacttttgtttgagaagcttacagagtatgtaaagtaaagaggtgagttccccaaaggaagctccccatgaaatagtcttgttgtgaaataagcattgcttttattaagtcttcctttgaaagtgatgttacttccaccaccgtaagatgctccattgaaactagttcacaaatgttgttattgcattagacatgctaacattgtggtaagacttcaatcttttcttttttagagtgaatagactagactagccactataaaatggcagcactactcaaatcttataaaggccaataattcctagttgtttgtaaacaggttttgattggctctttttgaattttgtttttagattttccagggcattaatcactagtacacttatgaataaaagagatttaataactgaaaaattcatgcatgcaaattaatcaaaatttaaccaatctctttacctatatgtactgttaattttataatctcaaaaacagcattaaacttacttaacaagcacttttatgtcatttaaggtagaattatccttgtactcgagaaatggctgcaacaaattcaggaattagatagcaaacttaattagcttacttgaattataaaattcaaatcccagcagagtgtgtggattaatatgcaagaaca

SEQ ID NO: 267081 - DNA, 1721 bp, Cannabis indica
taaataattaatatatttttttaaaacaaaataattaaatatataaaattataaatattaaatatgattggatgatattggattggatcggttcggttatccattggatcggatgtctcatccaacatccgatccgatccgattggatttttaaaatttgcatccgatccgatctaattatgattggatatccgattttattggatcggttgggattggatcggtcggttgggattggattggatgactttatgcacacccctaagaccagcattagtcggtagccaaaaatgagcaagtctccacgctaaatgtttaacttttggtggaattttaagtcctcacaaatatttccaccaagccaccacttgactgttatccgattgagccacttccttacgcaactcaagagccatccggtagccaccacttgactatttatgcaaactgaaggaaaaagagggcttggggttccgtgatttaaagttgcaagctctcttagctaaacaaacttagcgttgtatctactatctcaattctctttgcagtagggtattaagagcaagctacttccctaatagagatgtattgactgccaagtgtggatctaaggcatcttttgtgtggcacaatttggggggaaaacttcattcaaaagggatatcgttgaggggttggaacaggggaatcagtgagagttttggaggattcgtggttaccgaggcttgtcatcttcaaaatatatgataagcctaccgttccagagcaaatgcgtgtggtggatttgaaggatgttgatggagggtggaataataattttattcaagcattatttatcctcttgatgccaaattaattttaagttttactagtggaggatgggaggttaaagataaaatgttttggcactatagtcgaaataaagagtattcggtgaagagtggataccgtgtagcagtcgctttgagagaagagctaaggcaatctgacggtacacagatggaaaaatggtggactggtttgtggagacttaaaatcccctaaaaagttaaacattttctatggaaggtttgtcactcttggctcccaacaaattcaatgttcgttcatcgtaaagtgacaatgaatccaacctgtatgcgctgttctaaagaccaaaatgaagctacccaccatgttctatggggatgctaggtcaatgtagaagtatggaaaaaatgtggtcctatgggatgttattaagaaatattgggtgcctaatcttatttctttttttgattatgttgaataaaatgtggtctgttgagacaattcatattttcgttgtggtatcctggaatttatggtatgtgaggaatagtgtgaattatggtggatgtataccaaaaggagatatattgcagtggtgtgggaagttcttaactaagttttaggatcagcaagataaagggaaccatgatgttatcaatcaaggggggtggtcggtggcagctgataggctagttttaggtacattttataaagtgttttagagatgtgtttcaattaattatattcattttgtgtagaattatgcttgttttttatttgtttcaagttcataatgtaaattgaaaatgagaaaaaaacattttaaatgagaagaatatgatgaattatcatagaatttagagttctaggatataagtggtgaaaaaatctaagttttggatgctcaacac

SEQ ID NO: 267082 - DNA, 2090 bp, Cannabis indica
tttaaatgttgctcgtgctttatatttccaagccaacatgcctataaaattttggtctgaatgtatcatgacagctgtgtttcttattaatcgaacacctactcccaatctgaaaaataaaaccccttatgaaattttatttggtattccacctaattactctcacttaaggaactttggatgtttagtttttgcttctacattaactgctcaccgcactaaatttgcaccacgtgcacgcacttgtgtttttatgggttatcctcaaggcacaaaaggatacaaattgtatgacatcaatacacatcagttttttatttctcgtaatgtagtgtttcatgaacatatatccttttcaaaaattaaataatgctgaaacttgtgatcctttttctcatatggttctgccatcttctcacatatctcacactcatgttcatgacttccctacacacgttcccagcactgttatttctaatgattccttgcaggacaccattcctccctatattgcagatgcctctactccaactaccactgcagatctcagcacaccagttccatcaccttcatctcttactgatattccacctacaaatcaagacaatgatcctgctcatataagaagatccgagagagtcactaaagctcccagttatcttcgagattatgaatgctattctgccattcatgatcaatcctctaccccttaccccttacacaaatttatggcttatacaaacttatccgcagctcacaaagcatttatttgtgctgtgcaggcacactatgaaccacaaaactttaatcaagctgttcaaatcgaagcttggaacaatgccatgaacacagaattacatgcccttctcaccaacaagacatggtcttatgtcaagctccctcccaacaaacgtgccataggctgtcgctgggtgtataaaataaaatacaacagcgatggttctgtcgaacgtttcaaggcacggcttgtagctcagggatacacacagcaagaaggcctagactttttttgacacattttctcctgtagccaaaatggttacatttaagatgttgcttgctatatctgccatcaaaaactggcacatgtttcagctagatataaatagcgcattcctcaatggagatctccatgaggaagtctacatgactctccctaaaggacttactcttcccacttctttatctgcagaaacaggtctcgtttgcaaacttcacaaatccatatacggcctcaagcagtcctcaagacaatggtacaaaaagctttcaaatgctctcatactcgaaggcttcacccaatcccaagccgactataccttattcaccaaaggagctggtgatacctttattgctcttctagtttacgttgacgacatcatcatcaccggccccaatgcctctcttctgcatcaattacaagactccctccacagtcaattcaagcttaaagctcttggacaattaaagtatttcttggctttgaaattgcccgcgccaaagaaggattatttctttcccaacgaaaatacacagtccaactattagatgacacaggctacacaaacagcaagccagccaagacaccaatagaccccaaactcaagctcgatgaccaacacggtgaaccactcgagaatccatctctctatcgacaactcattggccgactcttgtatctcactttgtcaagaccggacatcacttttgccgtcaacaaccttagtcaattcatgtccattcctcgcaccactcatatgcaagctgttcaccatctccttcgatatctcaaaggcaaaccagggcaaggattactatactctgccacatcttctctccaccttcgaggcttttctgactctgattgggcttcttgccctactaccagacgctccacaaccggtttttgcatctttttgggtgactgtctcatctcatggcgaacaaagaagcaacaaaccgtctcaaaaagctctgctgaagcagagtacagagctttagcagccaccagcagtgaaatcacctcgctccagttccttcttaaatacttccacatccctcaagataca

SEQ ID NO: 267083 - DNA, 2184 bp, Cannabis indica
aaaacaaaagaaattatctgaggctctggggttttgacacgtggaccacctgatctttcccacgtcctcgtgactatttgatctcttgtggtaccgactctagctagtgtttttttctgtctttttgatgtcacatttgtgtgtttgttttggtttggcttaacctcgtattgttgttctcaatctcaaacccctcttactactttgtttgaccattttagtgtaagtaaagacaaaacaaaacaaaacacagttctcttactttctacttttttccttattctagttaatattggaaatatttaatctcaattacagctaataatgcctcattacatacttattgtcatagatagaactagaagttgtaaacttgtaattacagctactaaaatttgtgtttatttaactaaaagattgaaatgaaagacccttcttcttcttgatagtctcttgtcttactttagtgtctagtcacatcacaattattgaccgacactaatttggaaccataactgttttaaagaaaattttgattaacaaaaagtcttctattttttgatatatttgttcatttattaatttttaagaaaattattaggacaagtctgaaattagaaatggcaaaggatgactgctacttttaaattaccatccccatcctgtagttaattatataaccatatccgctttaataattgttggtcatggtacagatattaactagtagacaattaagaaagtagctattttttatgaaagtaattacaataatttaatttaattttaataaaatctacttaaactttaaacaatgaatgttttttaaactcacaatccaaccacacatatatttattaaaaatattaggtacacccctttttctatatatatatatattttaatattttgagccctttatataaaaaaaattatattttggcctccttaattactttttttttcttcttaattatcactggtataagaacaaaaaaaaaaaaaaaaatagtcacctgcgattttatttttaacactttaaattatttattatctgaatatttacgtgtaattctaaataattgtaacagacactataaaaaaaggaaagttagttttaccgaaatatctcttacaccacctaaaagttagatttggtgcaaaaattgggtccaacatatcattatatctcacactattataccatgtgtactacagtgcacgatatatatactgtatatcatattgtagccatgatatcttttttatttttattttatacatatgtataaatatattatatatatatatttattgtaaattctacagtgtaattcctaaaatgagaagtgctaccgtcaacctcctattacaatcttttagtcaacctccacgcccgaaaacacatgtcagaattattttttttttcataggggtattcgttaagcttacatcatcatccttgtaaatttttgaaaaattagtttacagtgctgaaaatatatttgaaggtttttgaacgcgcgtggtaaactggaatattaagaactctatttttggtactgtaaactatttgaaatatttcaaaaatttacaaggatgatactgtaactataacgaataccgctatgaaaagaaatatttcggcatgtgatttgagacgtggaggttgactaagaggttataataagacgttgtaattagcatttctcttcctaaaataggtgtactgatacctatatctgattcaaaatttaaaagagaattttttaactaatttttctttcatggttgtatatgttgtagttgtttaaaatattttataaaattttaagatatttagaaaaatttaacattccgaatatatacagagttcaaacaatttctttggaaatgtttcacacattgtttgaatagtactttaatttatgttactacatgcaatatggtatattgatttatgttttaataatttatagtattattgtgatcatttaattgattggtagttttatttagattattaattagatataataattgtgatgattttagtatattaatataataacaaaaagaatattttattttatttaaaaaaatttaagattaaaaaatattgtttagtaaaatttttagtgttggtggttggaggcttggagcacactacaaaaaatcttactt

SEQ ID NO: 267084 - DNA, 1405 bp, Cannabis indica
caataataatacaacgaaataagtagataaataaccgtaagatttgaaattacagttgaataaaatagacataaaaaataaaaaaaaaataacaaagggacccgtttctttcctataactcagtaggacatcctcattcctgcatattctaactcaaatcaaaattaggggtcctaaaaagaataccacctgtaaaatatcactaagctacaacaattaatcatgtactttaaccaaccctgacgctctccaagcctaattaaaaaccaaaaaacaaaatagttgggcatggcaggcaacatgactttaaagaacagttgcccagtagaggggggagaaacacgaaacgatggtacatatgcagttttgtgttttaaccctggtctccagtttccacgttctacatccaacttcacttgctaaattggtttccaatggttcgtcaaaagacgccaatgagtcaacggggtagttgccaaatgccaagactctatcgcagtacacttctagtatttggtttggtcactgcctcgattaacctaaacatccaacgatctagcaatcctgcaaaataaaagtttaagctaaatgttcagaattttgataaataaattcacaggctgcaaacttcacaaaacattgaaggcaccttcaatccaaaattcatcaacagtaaggaaatgcaagtgcctgaaattgtacattattatgtaaaaaggtagagtagacagacctgttaaagcaaaagtaccaccaagaactgcacaaagacgagtaataaaatggagaaaactacgccgttcttctttaatggtgacagtaatgggtgatagatcatacaagaagtacacagctggaaataaaacaaacaaagctgatgttagtgccaagaaaccaacccatggacaaagtcggctgaactctcatatgcaaatataccaacctggccatgacctatcgaagtctttcattggtgaaaaatactccgtaacagagaactgattagttggtaaaacttctttccagatataacgatactcagttggaacgatctgcaaattgtaaaatacgtacttatatattactatttattcatggctatcaaaaaatatatagggaagtttagagaaaaaaatcatgcgaagaagaaaaagtttgcatcagacaatccaaaacaatcccacaagtttttttttattttttctttttagggaatctataggttaaaaagaaaaataaaatttcaatgtaaaatccacttccttcaaaacaagaagaaatttaaatttttgaacaaagagaaagtaaagacaactatatttaaggtatagaagaacatgaagagaaaaaaaaacatgaacaagttacacatagtattgcaaactcaggaagaaaaaaaaaataa

SEQ ID NO: 267085 - DNA, 800 bp, Cannabis indica
aataaaaattgtaattttttttttaaaaaatatattaatatgacatggaacaataaaaagatgttacgtgtatacttgtctatctataacaaaacgaatagtagtttgaagagttttaccactaaaaatcgatttgtgaagttaagtgtcaccaatcatgtagttcaggtagttttgccaataatatctttaatataaatactagtatatttcttattgtgaatgtattccttgtatagcatattgttagtatattttgtgtactatattatacaattttttaaaaaagaaaaaacaaaaaacaaaaactgctcttagttatatataaatgacacatgttaaataaagcaaagaagaaaaataagaagattaaaaagaaaaaggaaaaaatgatagatacaccattatatataaatttgaatcttgtagacttattagcaatatgatttcatgcaaaggaggggccagtcaaagggttggttctaaggtaaaagaagtgccttagagcattattagcttaaaagagttatttgtagtcactcactatttcttaaagtctctcattgcattagagtcaactataagaagtgatgttatgacaatgtagagtctactaaaagtgatcttatggcaatgtagagtctactaaaagtaatgtttgatgacactacttgcatttaaacttttaaaagtatacaaaattagcaaagagtttacataaatatcagtctctcgaatatattctgttcatcttacatatgtcagatatattaagagtaattatgtaactattaactatt

SEQ ID NO: 267086 - DNA, 1911 bp, Cannabis indica
aaaaatcaaacctctactagagaacgtaggtccaacattttgcttcattttttttattattattattatttttccctctacgaatttaacttaatattattaaatttttcttgaccgcaaacttcgccgaaatttcacagcagaattaaaaaagaaaaaaataaaaaagaactcaacaataataataaataaataattctgagaataatgctgacatggcacaatcacaatctttgaaggtgccacttgtcaacgacaggttagtgacatatgggcctttaatgggccgtggtatccgtcaatcagctgaccaaatgaaaagtacgtctcctgcgattttattcttttccctcacgatgtgcctttctttacatatcaaatctagaccgttaaatatggatttatcgataaatctgtaccgttggatcagtagctagtgtatacagtttactattttttatggagaaaaaaaaattaagtttgtgagaagacaaaagataaccaacgtgaaggtctttgttaatcggttagggtagggctccaataaaaaggcacagccatgttagctggttttttatttgtttattattattatttatattaatttttttttttggtattaagggtttatggaaattagctggcaaatgaaaacaactggacaacctctttcatctacttacacgtggcattcacgtgaattgacacgtggatagtaactagtggtttttctatagctgcacatgcaagatgttcgagcaaagaaatttcacatcaaatcatagattttgttaattttcttgtctagtatatttatgcagtttaattttctcaattagttgcttatttggagggttatttataatttattgaaataatggaaactatttatggactctagtatggtaatgtaggatctaatctaactagctagctaattaattaatagcaaaaagggtatttgctctttttactttttagagattattttttagaggaatatatatgcatgctaccgacaattttatttttgcatgaataatattgtaacacattatttttaatacataaaaagggtcatgatcaatcatcaatgtgcatttagatttagagaaaatttcatttattagctacagatccgattgtgggacttttttttcaacacatacacttacatatatctcacacacacacatatatattatatatgatccacacccactaattacaaccacatgattaaaagtgggggcaatgcatatatatatataaatagtcctatattaatttccttttattgtaccctcaatgtacttatttttacagaagcttcataggccacaccatttaaaataatggtacttaatcatcaagtaaatatattacaaatttgaaccctacatttttgggattttttttcaataattagaataggggttttctgcaacacattcatgaaccctagccaaacaaaaataatgcataaaaaagtacttttattaaattattataatgtttgtagttgatgctgagctatatatattttcttttattttttttaataaaaaaattcttttttgaagtgatttgcctgaattaataagataagttatagctagggtatggttttttttggtggtagggctgaacctgttttgattaagctaagaagatgtgtcatttcaggaaaaagtagagtttaaaagcaatatcattaataataataaacatacctataagacaaagttaggtttatgttattagaaattaattcaaattaatgatttcagttaatcaaaataattatattttcaactaattctggttatgtgaattgaaaatttgtaccacactatactcatcaggagacatattttcatttttgtcttcctattttttattttttatttt

SEQ ID NO: 267087 - DNA, 1557 bp, Cannabis indica
acactacttcattagcatatcatttacgatttcgcttagatttatcgcccggcaatagaaacaccttgagcgtttttaaaatcgtatctgtcatacttctctaagcctcaaagagagttactttagctatgatcttatacaaacatgaagtgaaaccattggatcaaaaatctggcactttgcaaaaaatgagttttctttttaattatgataaaaatatgcctcatttacaactctgattctgttactctttcattactttcataacaactttcttcaccacttcccctttccaattctatagagagtattagctttaagttcatcgtttctaaatattcctccaccctcttccaattacttaaagtgccatccttactttgatctttactacttcaccagtttctgctctctccaacttatcatcaatcatctttcaaaaatttatctcagaaattgggactccaatatctacttcaaattctataatcatcaagtgtgttcctacacttaacatctatattcaaactctgactctcaacttcaaatgcaaaagaaattgataactaatcaaagcacatatgtctaaacatggtattaagttatttcaatatgttactaaaagaggcaaaaagaaatgctcacatactcaagataaggaggaaatggataatccacacctagtctaggtgcaatgggttcaagagcaggcacagaccccgatttcgaaacttgctcagaagcattttctttagagtaacaagtgttcagaactgatgattgagcttcatgagaacctggctgagctttattatcatcatcattctggggttgcttagatgccttttcagctttcaaaactttaccaagaaacctcaacctattcaaaaaaaaaaagaaacctcataatttttcaaaactgaaagtgggtttattctaggggtgaaaattcgtgttggcgtgtcgtgttcgaggcctgttgaagtcttaaattatcgaaacacgacccgtggcatgaaaagttcataaaacaagctaaattattgtttatagtgtcatcttggagttcttaaatttattttagatggttgacacgaaaatgaaaagattataaaacatgaacacagcccgcataattttcgtgtagtgtagaccagtaaaatctcgagtcgtgttcgtgtgcaggtcatgacctgaattgccacccctagtttattcaaaatatgagctttaagtcatacccattcaattgacgatgagcttgaaaggccaatgcttcattttgaaaatctaaaaaagcacagttcctcaatctgcagagaaaagccgtttaaaagttcaaattggtggaattaacaaaaaaggggagtttttattattatataagaataaatagagtacctgccattggaggagcatgggcgaacagaggaagcaccgtagtgggagaagagtcgagaaagagtgtcttggggaatggcttcgggaaggtgacgaataagagagtggctgcaatggatgatgatggtggtggtggtggtggtgttggttgcattt

SEQ ID NO: 267088 - DNA, 1324 bp, Cannabis indica
tttaattaggtcattatgttgtgatattactaaaaatttccaccaaaaagtaattaataattataagagtaatatgatcacattcacaaccaaatttaacaaaaatatcaaaaaagaaatggacaatgaatcatcgatgacaaggagtcataggtataagcaccatcctttccattttgtcaagaataaaattcataaagtgtcatgtctccaaataaagttgaaattgatgttttccatgctcaattcgatgaattatgtcactaaaattattgggatttcttttcatataaataatatatctttgtatctcatgagtactgaaaatgagcttttgttgtaattattttttcttatacaaaaataataataaaaaggatatatagaaggtatatataggtttccgactacaattttcagattaattgatctaatataatagacaaaagtcttaaaatctaatggtcaagaatagaataaattaatatttattagtaaaaattaaattttaaataacttccaaaaaaaaaaaagataataatagtacaaaaagtattaattattaaatctaatatggcaaaaatcaaaataaaaatacctataaatttaaaagtttgtctataataaaagtatatagaaatatcccaagagaacaatacaataaaatctgaaaaattttaaactaaaagttataacttctaatccactaataaaacacctacaaaataaatataaataaatatcaaatatttaataaaatatgaaatttatatttagttgaactatttgtcttttgattgatataactagttgaactttgttgctttttttttcaatttctatttgctctattatttgttttgagaatgatacaataactacaaataataataataaaaaaatacttctattaaagttttctacttttatttgcagtgagatgttaaataatttgatgaacaaactaatttaaaattattaatgataataaactaaactacttaattttggagtattgttattataggcatcagtggtgttaagcaccttttagacgtgtcatcttgcaattggtgagcaatacttcttaaaaattattttattataaattatatgagactcgatacttaattagaccaatagcaatattaacatgtaagaggttgctcataattttgtataagtgtatactagtttcaaacaataaatagtacaaacattaacacgaactgagttatattatacgatttttcttaaattggtcgacaaagtataaagtttgataattgtggaaaattaatgtaatgagatgggtgtgtgtgtg

SEQ ID NO: 267089 - DNA, 1785 bp, Cannabis indica
atcaaatattacatggacaaaaatagtatcaaataatgtaaaccttaagagattttagataatataaaatcataaaccaagcatattgtacttagctctcaaggtttctagtaatgtggtttcacaggcaaactttgctgaaggcagcaacttcaatttccaaaaatttcttgccagagcttatgataatgattttgaacaagtggttggagtcaggtaagactttcatcaatgcaactcaaatttgttgaaagaagaaagaccaagctagccaaacatgtgtacaattgtttttagatatataattcttttctatatacatatacaactacagataacaagacttttgacactcactcttgcagattgtggatctggattttcagcattcttttcatattcttcagcgcccatggtaagactgcagcttactctaatctaaatttcttaggcaaaaatgttctagagtaagtactacatatttataattatatataattaaattggtaatatgtgtgacttcttgacttgtttgcagtgttttacaatcattactggttacctttcattcctctaggggtaagatttaaacttcaccaaactctgtttatactttgttttataacatacttataattgtcttattcaccttactcaccataaagtataaatattttatattgaagattgctctgatggtgggagcaaagctgcaagtcataataaccaaaatgtgtgtggagactcacaaggaaaatcctgtcattcgtggaagtttcattgtgaaaccaaacgatgatcttttctggtttggtcgaccccattggcttcttcatctcatccaattcatcttaatccaggtacttaataacatgtatttacatatttttgcttgattgtgcagagttcaatgatttaactcatgaaactactgaaccaagccaatattatttactgtgatgttggtcagatcacagagtgagcaaatatagttgacatgctttacttgcttgtttctcttcatacatcaaacaacaatggggtaaacacgaatgtcatagccgtggtagtcacctttttctcttctttgattcattttgatgaaatagtataatgctagtagtagctctgcaaagctttattattcatggttttaaaacagaatataatggtgcttgaagttgaaatatccatgtatgtctagtatgatgtttagtatgaatgatcatagtcatagattgtagaagaagagaaaaatcattaacttattatctaggaggaatataatctaacaagtgccgccaaaaatcattgcagaactcgtttcagctagcattcttcacttggacatgggtaggtatatattttaagtttggtcatgaaatattttgaaatcctaaaataactgatgatcccccattggcaacaacaacagttcgagtatgggcaaaaatcatgttttcatcgtgaaacagaagacttgacaatcacaatttccatgggagttattgtgcagttactttgtggttatgtcaccttacctctctatgcactgttactcaggtaagtcttaatctatattgttcctcacttgagttgaaaaacatgcatttctaaatcaaatgaccaaaaccccaccttactatttctatcctagttatttaaagatcttaattagaagtactacataagatcataagaggctctgatcacctcacaacctttcatgtagctgtgtccctgaaaaatgatgtgttttgaacagatgggttcaggcatgaagag

SEQ ID NO: 267090 - DNA, 3235 bp, Cannabis indica
cacaaagtcaatataaaaaactaattattttcatctcaaaacgaaaccaattcttatattaagctttccccttcaatgatttactatcccgctactaccggagcttgaataactaggttttggattgaaaattgaagaaaattagatggtgaaagtgacggttcgtcgcacacgaagatgagcaagggaggagggtttcattcttcgttttgttcttcttaacttaatatatatatatatatattaaactgataagttttaataaataataataataataatatatggtggcgtttggtaacactttttaattatttttctgtttttaaaattgaaaaagtaaaaatatttttcaaaaacatattctataaaataattttcatttttcaatttcttaattgagaatcaaaattttaaaaaataaaaaatcactttcaatatttttttgaaatagttttttttttttaatcgatattttggactccgactagacctagacccaaatcctccccacgaccttagcactaaacctgacttctgacccgaacccaaatctgaccccggacctagatctaatttaaataaaataaaaaaataaaaataaactttacagaacatacttttgttttttgtttttaaaattgaaaaataaaagtggttacagaacacatttttatttttcaaaaataaaatttttataaacaaaaattttactttcattttgtgattaaaaaattaaaaaataaaagtgttaccaaacgacacctataataataatatatattaataaaatattaatatattaatataaactttattattaatggttatcttattattccttaaccattaagaaatctctactgctattttaattatctcaatacttacactatcaacttatcataatattcctataaaatccattaattaaacctgttatgatatttttgatcccagatcgagttttcaaagtcgccaaacctgaaaaatattattattccacaaataggtcatgttatattcataatgctatataaacttctgtaattaataaattatgcttatttatccatttggaacaaaattaaaatttatgctgaagtagatgatagtagtatcataatcacacttattactcgattagcctacaatatatacaatctttaattatttattattagtcttatcgagatattatagtaggtcattactcgctatctaaggggccgaagttctataaaatattgtctcgttttatttacttgttcttattgtgtacacatgatgatatcagtcataaatacaactctactctcgcttgactaaatcttaagttaacaatttaaaaaaaaaatgctacaaagaagtttcaaaaagaatattaaaagtaattttgaaaaataatttaattaagttaattatttggtgcaaataaattttctattatggagaagcaaaattttaaagaaggtatatttaagcggtcggtagaagtgtccaattattctaaaaaaaaattataagatgtctgtctgtactctgtactctgtagtctgtgaaagtgggacttctaaaaatacagcctgagttcttcaaggaaaaaagtaatgttattaaatggtaagagtacgggggagtgagagatccaacggcaaaagatcaataaagaaagatgatcgaacggccaatgataagattacggggctggagcgaacaagcgagtcgcggaaacacggagccgctctcgcccagagtttggaagatattcctcctgagacagccccatcatgggacccacatttctcaccacaaacaaaaggtccaccgtagaaaccatttccttctctctttctttttcttatatttaaataaaataaaccaaaaataaaaagtataaagcaaactcaaccatggtttggcctttttatgtttttttttgttagttctaaaactcattactctcatcttaacttaaccccaattcccatggcttcctttactcaaatgcctttctatatttgaagtttccaaacccacacaaacaagtgagctgaactgttagctttcttgagaaactaacaacacctcactcacccacctctccagtctccctctctcacacacactttcccagatcatacctttgctttcgtttcaagaaatcaatcgatcaaagatttaatattttcatcaccaccatcatatcattattatcttctttcttattttctttcttaatagcatattgatttataagcatgagctgcaatggttgccgagtcctccggaaggggtgcggtgagtcgtgtgtactgaggtcttgcctacactggatcgaatcccccgaagcccaaggcaacgccaccttgttccttgccaagtttttcggccgtagtgacctcatgtccttcatctccgccgttcccgaccaccaccgtcctggtatataagctttcccttttttttgtttaaaaaatatttacttttatagttttatacttattgtttgtatcgacctatatatatatatatttatagcgttgttccaatcgttgctgttcgaggcgtgtgggcgcacggtgaatccggtgaacggagcagtggggcttctatcgagcgggaactggcacgtgtgtcaagcggcggtggagacggttctgtgcggaggcgttttgcgacctatgcaaggggttttgatgcagaaactcgaagaatcttccgatatgctggcggtggcagcggacacatcatcctggccgtcgagttcctaccattactttccatcgctgccgtcaatttacgatccgaggcaggagctgtactactccggagccagaggaagtagtggtatcttcccgatgtcgacggagaagcttattcggcgagactcaatttcacgtagctcggaagaatcggtaatgaccaagagcttcggaattcgtgatcgcaaggaacagaagctcttaaatctctttgtatgaatatttatatttatatagagaattttggttgagatattagaatatgataattagaagtgctcagttgaagaagaacttcattacgcctaagtgaataaggaattaatgtatggcttaacttaacagataaccagagaagaagaaccttctcttgccgggatttttaatcctccagcgacatttcccttttcccttttttctgtggggtgccagggtggcagctcagcctgagcagtgtctgttgttgctaa

SEQ ID NO: 267091 - DNA, 2676 bp, Cannabis indica
ttacacttactctgtcagttacagttagagtaggtgttatgtcccttgtttttttttcttcctgaaacaaggttttatgtcctttcatatctgtattttagtacctgttagcagatacagaactggaattgattgtattgagaaaaaggtttttcgtcggttacaggttactgaaatcggttatgattgagaaaagagttactttcattgatactaagcttatcttgaaaaaatgtggaaaacaagagaattataatgataggaggtttcctttttcattcctaataagtaaaataaataaatatgagtgtttatatttaggccctgacctgcaataagttggagtttgttttgtttagctgtgttatttatttatttactatttttacatttcctctttgcacttgctatgttaatctttgcgacattgcatgttctttctcaattgcttttgtgctaattactactcataccactttctctaattttcagtagaatttcttctgcatttgaatgactacttcacacgaattttactcatttcagtagaatttatttcttcatctactgattatcttcttatattctttattggcctcgatagactttgcagttcctcggtgacaacaacttgggccttgtacatcaccagttggcttgaatgtcagtggtgtttctattccattcatgttgctttgtcatttcttctttgtattttcttccaggttctgactattggtctgtgttaacttcaattggggtaggatattactttctcaatagtacacatcaatgttactttgtcctctcttaccccttatgtattctagtgttaggttatgtagcttttgtttgtcaattaactgtttgtgttagagtgagagagagagagattcagggaaattagctagaagcagagggctaatggtgagattttttttttgaaggtatccaagtaacataggagatgcagccgccttctattaatatgaagtttatcgtattgtctggctttgaagcttatttgagttttttgtcaacttgtgtacgacccctcttggcactttaaatcaagttttcagcaggcagcttgtcaatgaatctccccatgagattagttaggttaggcttctgtgtacaagtgttgaatatggtttgagtgatttagttattttttccatttatgaatttggacggagagtgtctaattagattagatagaagaaatcatctgacttcattccgtgccttgttttttttctcatgaatatcaaaatatgtattttctcaaaaaaactgaagctaattttgcatgctttttagaaaataaacctaaagagtattacccagtattacttaagtctatgggattaattcatcaatttattgttcaaattcatcgtagagatttgcatcagttcttgagtttatattataaacaagtcacagttggaactgtcgatttgtaatgttgtgcaaatggtcgtgttattaatagctgttgtaagtgaacgtgagattcggaaatgggtgttttgattataattcagatgctaatctacttagtttgatttgtatttaaaagcttcgagctttagcctaattacaaattaattatgcttggttaggacttctaggactcgacaccagctgaacaagtgaaaaagaacccaaaagcccactatgaccaagcttcgatcaagttttgcaggctgtaacaaacttgtattttgctattgaatgcttcaagattgctatattgctattgaatccatcaagtttgctatttctttttaaagcttattttgatcacggtatcctgccctgctgctcggaaattaaagcttttatattgaagtttatttagcagaataattttttaaattttaattatgtaaatagtatttattttattagatcacatcacacgaacaacaaaccatattaaattgatcatacttaacaatttttctaaaataattaatcttaatttaaatatttaataaaatcttttttaccaattaatatttataaataattttatttttatatttaagttcttattataatatttttaacattttaaccatttaactataatatctacaataattttttctttacaaaatttagactttcatcccttctaaaataaatttttgaatacttaattaatttttaaaaattacatctaattattattttacaacaaccgcttgacccatcttcctcctttataaaaaaatttaaaaattaaggttttagtttgtcccaacctaacattatgtgaatttttcacttcaatacaatctcttatatttttgtcacaaatccatttctctattcaaccagctatatttagatttctccttagttttaataatttgcttgctattttcttactataatgtttttattataaaaaagaagcaacaatttcaattaattggtaatctattttggtaaatttttttacaatctttagatgaacatgatttcaacaaggagcgaaaatagttaacaatcattaattttatagttgctcttacatttcttttgacataatttttcattttgaaaagaaaaaaagctaaataaattgaactaatcttggactgacacactaatttgacacttaaaggtgttagaaaaaaagattgagcgtaaatttaccta

SEQ ID NO: 267092 - DNA, 3603 bp, Cannabis indica
atcccattcgagcaacatgctctaaaaatatacatatgggtaagcctttcgttagtgggttcaccaacatgccagtggtaggtgtgtactcattggaaatgaaagactcgacaactttctctttaacaaaatagtactttatgtcaatgtgtttggagcgggaagtacttctagcattcttagagaaagctactgttgcagaattgtcacaatacaatttcaacggcctctagatagagtctttaacacccaatgctgaaatgaagtttcgcaaccatatagctttacatgtagcctcataacacgtcatatacaaattttgaagatagataaattgtgatttataatatttaataaattttctttaccatattaagcatccttagcaagctattattatcgataggataattaattatttgtatggatcttaataatgcaaattttgaaaaagatacaaaatttaaataaattaatatttaaatatttctcattaccaaacaattttccatacttaatcttacgacaagtaaaaaatataagcactaattgttgaaataaattcacaaataaacatgaaattatgccacaataaaattagtttaccaaaattatgaataaaattcataaaattaatattgtgcataagagaaaatacatagaaatggtagaaaattaaaaatgaaataaaatggtgaaaaatggcctaaaaaagagccatgaatgcgcccccacgtgccttaatctttttctcagattttttttttgtgtttgtacgacatgtcgtttttgggaattgacatgttcggggagaacgacgcgtagcaagggtttgaaaatgacatgtcgtttggtgttgctaaggagctggccttggagcatagacgacatgttgtttttgtcgtccctgtcacccaaaattcaccccgcaggtttgcaactcgaatcggcgcgacccgcttcgggacccggtcggataggccatctccgaccaccaaatctgacaccatttggggggttttgttcatttttcaattttctatcaatttccaatatccatttaatttaactcaaaaatacaaaataatagccaaaatattatgaacccaaaatgggttttcctccgttgatgaacttcaagaaaactcagtgtttaacaataacaatcatcccaaaacagagataaacccatccaaaaaactataaatctcatattatcctttataaacacattaattcgaaaattacaaaaaaaaaaaaaagaatcagatttgaaaaatgggtttagttcaaagaaattaagctctaaaattaataactttagctctaaatactaattgttaaatacaaaacatatataagtattataatcacaacagtcaaacaatcgaacaataacaacaataatgatcataaaaaacaatccaagatccaagcatttatttttccttatcaaaaaaaaaaaagatccaagcatttatttagagcattaatgattgagaaaacatacctcctaaagaaatattgtccatgttagccatttgacactaagaatctctaatgtgaacaacacaaacacaagattagtggtaaatctaagagagaagcaaatgtggagctatccccttatactacctacattactattaattaaaccctcttgcactttatatatatcacaccttgataaaccctgaggggttatgggccgattgggttaatgtggtttagttaatggtagactataatttaatgggtaattatagttatatgggtgctcttatgttcctctaatatatttagtagttattaaccatcccattatggatattcacgttattaatgattgtgtttatggaattatgtctatgattttattagtctacaataataattttaacattaacgtgataatcttatattacttgtataggagttttatataattttccagtggttatggctatgtctataattattttagtctacaataataattctaacatcaacatgataatcttgtgataatcttatattacttgtataggagttacttagtttatataattttccagtggttgtggtcaggacatggctattgctgcttgacaaggaatttatacttgtggtgttctgttttaatagtcattttgtattaaaaataaatcacatgttcttttgttctacctttgccagacagatttcaacaattcattggacaatcaccttccattggactatcagccagtagacttgacatgcgaagaagttgataaatttagagggagatatatccgaagattaactgctgtacttattcatcatataccagccttctggaaaatagcactttctgttttcagtggaaaatttgctaaggtattttgagttattcatattgaagctttcacattaattatatactttagtcaacacagttcctagacaggctacaagtaatcaaatttgaggggcaatggtatggacaataatgagaggaacaggggtattagcaattaaggccaaatagcatcaaagagaaagagtttagttgtctctcagaccatgtgaacagaaacagttgatggatttaattgaaatttaggttacaaattttgtgcagtaaattgtagacattcaaaggacagaaataaatctctatatttgtttccattactaaattaaaaattgagtattttgcataaacagaaaagaatgtaactaaaaaaaaaagaactgtgctaaatctattcatataatcacttaaatgggcatgttaatgaaatctttcaacaatcgtctttatattgttccttccaacttgtaggtgaatctttttaatagttggtttttccttcatttttttgttctttttttttttatctcattatgtcagttgtctcaggtttccttggaatcaattgctaatacttctgcaaataaaatcgaggataaatttggggatggaaagtactcatcgcattctctcgatgaagttgctggaatgattcgcagtactatatctgcttatgaggcgaaagtaagtatgctggctgtgtcattctgtcgtccattaaataaacaaagtactctggttgtcgttattggtttctaactcaatctattaatgccattttgatctttatagtcaaatctacttccaatctactatttgtgtgcaagtaatcaaagtgaccatctaatttcttatcttgttaatatattactattgctttttttttccttttcctttttctgtgtgttttttttttttctttgaaagaatgtgtgttttctattattatattttatccagcatataacgctgtttacttcaaaattagagaaaattataaggtacgtgtaagttttcacatttatttatttggcttgagttggcatttaagggaactttaagttgatcttaaatacttatgtataagatttgtgtagccagacaagacagtcaagatattggttcactgataaggttccatttcttgatgtgttattgttatgaaatctgacgcatttttattcttgcataagagaatatagtatagaactgattttattttatttatttattttagaaaaaaaaaa

SEQ ID NO: 267093 - DNA, 2645 bp, Cannabis indica
gttgtaataaggatggacttgatgtgatgattatgcagtgtagtttgcttagctttatatcaagtctacataattgtaaaaaaaaaaaaagataagggttgaactactctatgctgattttttttgttttgttttgagaataactgaataagtaacttcattaaaaaaatagaactgttcagtacaagttacatcattaaaacacttgaaatattacctttacaagacaagtgccttctttgcaatggtattgccttcccttcttacaagagttgaagaaacactgggggttatagataaagagttctttataaaaactataacatcatccataggggataagtctttaagattattattgattttatctactatctcttttgaatttgtctctatatatgacactggtacaccttgagctatactccagcttattgctcgttttagtgccacaagctctgccattgttggggagtaatctcctggaaagtttgcatttcctactcttaacttctcctttcgaattcctaactattgcccaaacaactaccttctctctttttgagtctatggcagcgccaacatttagcttcaatttgccttgaggtggtggtttccatctgcagctcttgctagtttctttctttttgctcttcctctgcctgtcaattgtcggagcctccttatgttcttggaatatcttgttaccctactgtaaatctcctgcacagtgtaagcattcttgccaaaaagcttgttatttaaattccagatcatccacattattcctaacatctcacaaggagttttttccaacaattcataagcatctaataaaaaatcgtttatatttaaggtggcgtttggttgagaggaatgaaaatataagaataggaatggaaatagaaataggaatggaatggaataagatttaaaatgcataaaaaaaatcattgaatttttttttcttgttatattggaatggtctttccttcttcttttttttttaaatggaatagtcattccaccaaaatggtgaaaagaacattccattggaatgtcattctaatactttaaaatgcaaaaaaacaaaggaatggaatgaaaattgttttctttccattccattctatttcattacctctaaaataatttttttacgatctaaattattttttttaagatttactaaacaaaatttaatctttcatttttattttgagggaatacgatttgatagttttcaaagtttatgaagcaaaattactaatttacaaagacacattagcatttaaacggaataatgagacgaaacatagtagaatgactaaacttttgtaaatgtaaaagttcaggggattcttaactagctgtatattttagggggcataattagtattatcgaaaaattcagggggcaaaattattaattatcatgaattttttaaatgctcccataagaactccacaagaattttgccataattttttcagttttactgcaaatttttatggggattttaaaacaagacatggcatagtagaagagagcttgaatgacagctttaaggacttcttttcgagcttctaagagtttaagtagcttttagcactatctatcaagaaataaaatgaggaacttttagttctttcaaaacattgtgggagactaacatattctttaaaaaaagacttgttgtgaagattttgaaggacaaactctcgctcttgcattggtgtattaagggtaaagagtggagatgatttgttaaaattgaccatctcaagagcctttttgatgactctattagaagtagcattaacaattataaataggaagctaccatcagcaaataagtgatgaaagataagaggagctaacctggaaattctaatgcctctaagatcattgctagcttccttaatatagtctttcagaacagagcaataatagggaatctccctaccttatacttttggttggaaacattaatactgaaacttattttgacagaagaaagacactttataattaaattaataaacttaagagggaaattaaaatgtcttatgatgtaatccaatcaaggaattgacactcaaccttaatcaaaagtttctccatatctaatttgatcccaactcaatatctttcttgccttcctatgtctaatggcatgaagactcacattagcaatcaaaacattatcaaaactaattatgtcaatgagaaaatcacttagaacattcgagataacgtcggttaaaatctttctaagtctattaacatgcgctttagatataaacttgtaaagagttgtgaacagactcataagtttgaattctctaaatttattgacattctatatttttgggacaagaacaatcaagagttttgctcatagaagctaaatcctcttcatggtttagaacaacaagaactttacaaagatctttgcctagaatatcctagtttcatgataaaaatgggcattaaggtcatctattctaggggctttgtcactatggagttggaagagagcaaacttaacttcattctcaatgtaagagagagttggaagaaagtatattgattatcagtgatcctcttatctattccacataaatcagtattaatagcatcc

SEQ ID NO: 267094 - DNA, 1379 bp, Cannabis indica
aaataaaaataaaaagaaagaaggaaagaaggaacaacaatatgcaaagcggaaacctctctgtgacgctctctcactgctgtcgtcgattagcctgttcttgaatcagtgtgaaattacttgattaccccccaacttattctctcaactgcaaatacccattttccatagtgtaaagggtacaatattttggttttattgtggtacggccaaaatatttcaaattgggtcaagagatacctataactccactccaccatgacatcatcacaatctcttgttacattgtaaaatataatatagtaaaaaaatgataccaaatgagtaaaaattaaagatatcaccataaataattttcttaccatattaggatggattgggttgggtaacaaacgctattcaattttcaatttcacgaccttatacatatttttgagccattattattgcatatccaattaaaagaacttttgttagaagggtcccccaactcacaatttcatctcaggtgtacatttatgtagaaaaaatttatagtcgttgggggcatttggtgacacattaaatctgccattaattcttttatatatatgtggaataatgaaataaaaagattacaggagaagaagggaatatcaaattataaggtagggtcctagtagtaaaatcagtggatttgatagtgaaaaaagtcaaaggaccaaccaagtatggaaaaattggaagtatgggttgcacgtgccatgcacagaggttaagctttcggctaaatctataatatttttttttatttttttatttttttattttttaaaaaaatgatattcctcccatctccattccattctccacgactgtgacattctcccacaaaaaacgattccatgggaaatggattaccccaataacccaaaactcactctacccatttttcaaatccttttgaaaactctcattttcaagataagaatctcacgctcacttttttcgttttccttttggtttttccagcctcaaaattaggaggaggcttcaccccttttgattttttcaacagtatggatcatttcgctctcttttcacaaaataaatagtgaaacaaattaactttgtaaataatatcactcctattgctcaacatttttttagtagtctttttttttgaaagaccacttatagagttatagagacagtgatagctgtatcagtgtttatttacatcatttatatattgtggttgatgagtatcaattagagaaggcacttgtgaagtttcaacatgtgggacccctcaatatttttttttagtgtcatgagaatcatcgtccacttgggctttgcttgttttcttttattggtctcatctttttgttaaatgt

SEQ ID NO: 267095 - DNA, 2433 bp, Cannabis indica
tcaccctgttgaggaggaacccatctacactgctgagctcgcccctgctgaccatgactacccttctctaaacctagctgccgatactccacaatatactgggcacaccagtccacaacctcagccggctggggaagccgtccgccgtgttttgtgctattcctaatataccaaacttgccaacacagcaccagaaaaaattcataagtatcttgggtcatacctctcgccaatctcatgagaaaagtgagtacgtcttcgcctcccgcctcccttccgctgaatttcagatttaaagccacttaatttccatatccctttgttagccgaacaaccccacaaagcatgaaaactgtacttccattaattattaaagcatatgtccttccattaattattaaattatattcattaacgtaaataagtaatatacattgaaatactttgatttgtatcaattaaagcaaataatacataaaatgttataatttatatgggtaaatgagtcaatacctagccaaataggacataacataatattctttaatttcagaatcttctgggtgttattccattattacaaattaacaacactacttacataattaacaacactacatacataattatatcataatgagttttatattttaattaaaattatattattaatatatataatatttcttaataataatcttcttttttggaccaccgaatacttaaaatataaaataaggttaattaagaggagcaccaatcaaatgaagatcttagcaacgtgaacacaaatttcaataacaaaacagattggactacttatataaatataatatagatattttaattaaatagtattatttagcattaattttagataatgctgatgtagattaattaaaatataataccttttaatatagtaacatacttgattacggaactcatgatgtttgtcttgtcttattctaatattataattaagtaatattattatataaattaagaattttctcacttttatactttaaaacaaattttttatatatataattttttacgaaattttatataaaattttttattgttgcagcaacttaaattgtaatcaaaattttatataacaatctaaataaaaattaccaaaaaaaaactaatagaataactcaacccgtaaaatttaaaaaaaaaaaaataaattaaaaaataatatataaaatagaatttaagggtttatgcattatagtttttaatttcttaaaaatatatagtctattccatttccatgttgccttacatatccactaacaatccttattttacttataatattattatattcccttacaaatattattatattcccttaaaaagaaacattattatattaaaggtggggaaggaaaaaggaagtctttaattatttatctgaaatacaattgtttaagcaattaataaagctttgaaatcaatttgtggaaggacaaggaaaatttgtaattaatgggtgtctctctaatcatatgataatgctttaactaataccaatctagaatatataagcttttattggctcttcattactcctttcagttttttactccgaaaggaaactatgcatgtactactcaattcctaaattgatttatgtgatattgttttggtctaattttactctctttctttttaatatttaattagagaaaattatttgggacgacactttacccagaaaccagtttactcattggtatcctgcccgtataagtagagtattacttattgaattagtgtttagagtagggtaagaatatgaaaatatgtaccttattcgggtataggatagggtacgggtataggtatatgtgtaccctgccccatggacaatttacaacctatcaagcacttgtataacaaaacaagcatgcttctctatttatagagattcaaaccattctctatctatttgacttattttcttaggcaaaaataatcttaacctattctttacatcctctttaattttgtgtacaagagtcattactgttggacttttttcatttcataaactatcgtttctattttgccacaatctatataccatagcagccataacaattgcatatacttatttgcaaaatctacttaatcttggctgagttatccacttgatcaactgagggattgtaatgagctttgtgtgccattgcagccaacttttaacctccaaaagaaacttggaactacactgacagtcaaagaataaatcctcagtagtttctattaaaaatttatatgaataatataaaacgtatatgactgtgtataaaatgcagaattaaatcacatatatgcgatataactaaaagaatcgaaatacctccaaccattaattctttgagcttcaattccacacgatctttggatctgcaa

SEQ ID NO: 267096 - DNA, 1500 bp, Cannabis indica
ataattacccttgttttttgtatttatgattgggtgttaatttttaggcattgatagacaaaactaatttgaacccaagtgaagttggagatattgttgtgggttcagtcttggcaccgggttcccaacgggcaagtgaatgtagaatggctgcattctatgctggtttccctggtatgctttgtttgcaagtttgagctttattgagaatcacagatgagtttgttatttatggatatgtaatgtataatatgcagagactgtcccggttagaactgtgaacaggcagtgttcatctggacttcaggcagttgctgatgtagctgctgctataaaggcgggattttatgatattggtaatggttctttcgagtatcttgtagtagatcactttgccatggttaaatacatttacttaccgattttaattattttgataggtattggtgctggattggaatcaatgacggtgaatccaatggcgtgggaaggctcggtgaacccaaaagtaagctgatctttttctaattatcatcaacttagctgaactcctgctgttaggatcttacaatcttatactttgatggtgatggtaggtcaaaatctttgaacaagcccagaactgccttcttccaatggggattacctcagaaaatgttgcaagtcgctttggtgtgtcaagaaaggaacaagatcaggctgcagtaagttgaataaacatgtttggttttaaagttgcgatccaactgttaacacgtgttttattaatttcatatggtttatgttgttaggttgagtctcatagacgggctgctgcagctactgcttctggtaaatttaaggatgaaattatccccgtggctaccaaggtgtgttttccttactctttttcttaatattattgtattttgcggatatgattatcaatattattatcgtatgtggtccatttctcatttatgtgggctttgtagattgttgatcccaaaactggtcaggaggcaccagtcacaatatctgttgatgatggtattcgacccaatgcatcattggcagatttgggaaagctgagacctgtgtttaagaaagatggaaccacaacagcaggtttttccctctcttgaattgatattttttactatctgaatattatcacttggtagaatccaataagtaacatctctgtttttactgttctaggcaattctagccaggtcagtgatggagctggagctgtcctcttaatgaagagaagtgtcgcagataaaaagggcatgccaattctcggtgtattcaggtatttatccctggaagccattttattaatcggtgttacattgaagtgtttgaaaaacaccaccaaatcccttctatatatgagagagctaatcaatattttctcttttccctcgaacttttcgatacctgattctatacgaagattcgaaactcttcaacttagattcgtagaaattacttgtgtaatggagagtttgatcg

SEQ ID NO: 267097 - DNA, 2327 bp, Cannabis indica
aatttgtaattattttcaaagtttcgtgagaattttttacaataatcagtgtataaaattgtatcaaatttagagtaaaaatccttatttgaactagaaatatatatatatatatatggaaaagttttttagacaagaaaaaaaaaaaagttaaagtttgaattaaatatttttgtaatgaacatattttgatatggtgtaaaaagtgatattttttttaattaagtagttaaattaagcatagaaatttaaatttgtgatttcatcattcgttattagatcaaaattcgttattagatcaaaattcgatgatttaatatttttaaaattaatatttatagttaaatttatttagtaactatttatttatgggtaacttatatatatatatattattttattattatagttcacaattagttacatatctatatacggtctgtagtaaaatcgatcagagtcatgttgtaaatcactaacaacaatgcctccatatttattgtcaccactaggactagctagggcctacttttgtcactatcaaatatgaacgtgtaaaatgagccattcatgaaaacatgacagaattatctataaatagaagatggtttagattcacctctacacactaccaaaaaaagaaaaaacaatcactccacatataattattattgttatttaatcttttagctagctagctacacaaaaatggccggaaacatcggaaaaaggtggagagctcttagcggtgagggagagtgggagggtcttcttgaccctctcgactctgacctccgccgctacataattcattacggagaaagggtcgaggctgtggtggattccttcattacagagtccaaatcggataactacggcctttgtaggtactccatgagaaacctcttctcaaaggttgggttagagagtgggaataatcctttcaagtatgaggtgaagaagtacttctactcctccactgcattcatgggtacatcttggcctccagccaataatctgcccgtctctcccatcgcggtggcgggcaaatcaaagtggctggggtttgtggccgtgacgactgatgaaggaaaggaggtgttggggagaagggatattttggtgtcgcttaggggaacgatgccagagattgagtatggtattgatgccaaatgtaatttagtttctgcttcgcagatacttggaagcaagaatgatcctaaggtgcatgaaggtttttacttgtattacacttcttctgaacctggttctacttacaattccaacagctgcagagaccaggtataatatgtattatacatatctctctctatatgtatatatatataaatattagttaccttattagtctatcataattaattataccttatcaatccctcatataattttgttattatcaaattaagtacttagataatcctaagttttgaataattaattaatctcattgaaagtaataatagtttttaaggaatatatctaaggcgtcactttaaggggagctataaacaccactcatattttatagcaatgttctatatacatatacttttatctatcaaatattaattattctagtttttaattactatttttcatccaacctatttctttttttttttaatttattccgtggcaaatgatcaacttacttataattttatttagggttatttgcagcaaaatcccttaaagtagggaagtttttacaactaaccaccaattctaaattttttgcggtaaaactccctaaactcaagttctgttagcacttagtcctttctgtccatttttctctgttaaatgccatagtggaatgtccacgtgtacactggcacaattttattagttcacgcaataaatatttaaaattaaaataaaaaaattaattattttataataaaaaataaaaaaaataaaaatatctttaaaaattaaaaaaaaaaattaatattcttttcttttctttctcttttctttctttctttcttcttcttcttcttcttcttcttctatcctccgcctttttccttctaaccctagccgactcctaaaatcagccccatcattttcattcatggctccttcttccctctcatctctccttcagtttcactctcactctcttttctcttcccacactcctaaccctaaattcactcacaatcacaccctcagtcacaccctcaccctcccttctcacacctccccacgtaccctgacattctgctctatttccaaccccaacccattcccaaccctcggcagtcatcgccttcaccgtcaccattgcctccgccgcg

SEQ ID NO: 267098 - DNA, 1996 bp, Cannabis indica
gtggggtgtaaaaagaactcccctaaaaaaatataaatcgtatcgtgtcgtgtcaacatttttaaaggatagacccgacacggttataagactgatatttttgtactatgatcggatttgtttcgtactgctcgtgccaaccaaatgttttgaacaggtctaccgcttttcattgaattcgtgttttactttgctatatttttttccaattaataaattaattactaaattatacgtatactttgaataatattttacacaaaactgtatcaaagataattaaaattattagaatttaaataattacttataaatactaaaatttttactcatactctaaataaatcaatatataatttttgttttacatattttaataattttaattataaaattataataataaatgttatatttaaattttattattattttatctaatttataattgacaaatacatatatattattataattattgaattatagggttttttaatgtttcatgccatacttttcgaatttatcgcgtgtcgtgctttttggacttgtctattcaggcttatatgctgtgtctttcgtgcttcttgtgtcatgccaatttatagtactatcatatcatatcgtgctgaagcccatattttttttgttaatatcgtgtcaaaaaattcaacccgtatttacaacacgatctctatcttttatggaaaataaaattttcaacatatttttttaacaaaaaattatttttgaagacttatagactaatgtaataaaaaaacaaaagatattaggaggcctcttaacctgaggggctttaggcaaccgtcctatcctaaagacactctgttctaaataagaattgagattattaatattattaattgacaaaaattagaattaagaattttctatttattgactttaaaatgcccttaatggagtggagtataaatgaaattagagtacataatgcattgttgtaatgcttgatctcttaagtaatggcgccaatacaactaattttttatctttattaataactcatgcttatgcagtcatggttatgcacttatcgaatcaatttggtttattttattgatatcaattctcatttaaatatgtaatgataaagaatattgataatacattagtactagctaataaatatattatgtaggtacatatataaacatgatactacttgtagagtatcatattgggctttctttatatagtatataatagtacggtactgttttccatataagatgacttttttatgtatatttgtctaaacaatggatgggaaacatataaaatatagtttgtttgacatcattcattgcatcatcttattgatactttctatttctaatccttattattttatttcacttaacttatatttgttggtctatctagcaaaatctttcactttttaattaaataactaaatatttgtactatatgttgcaaaaactaatgattttaatacccttagtacaatgatatgttcatataatattaaatgtcaaaccctaaaccaaagagagggagatgaaaattgacgaagattcatatgatagttttcattattttacaatttttttcctccactacgtacctctctttgatttcaacttagaaataaagaaagtagttaattatgaagacaattgtaacagtgctcttctaccgagaacttccttgacatgaatagcagggtattaccagtaatttttactaactataaatgtttacttatcaccatttttaggttaccatcgggaacaacatctgttattataattattttcgtatattatataatatatatattaaggcaactgttttgtatatttttatgaatgtatatatctattgatgatggacttggacaggttccttttatgtttctgattagaaaggtaactatctttatttggttttttggtacggaatactgagtacatgtcgcatatatatatatata

SEQ ID NO: 267099 - DNA, 1816 bp, Cannabis indica
ccatttggttttgaatcttgatttggttcatggtacattctcagtttagtttgatgctattgatcagtatgatttgtcttaaaattacaacataaactatgttgctctgttgatggttattaacagttaattcatttttggaacgtttttttttgttttgtttttaggggaataccaaattggtttagacataaatccattagatcctacaagggtatccagtattgttcattatgggcaactaagatatccaatgtcatatgaagcagaaggctattctcttgtttatagtcagctatactccttttcaaggcctagcaaaattacacttctgggatcatccatcacgttcgcctaacaggttttagcctgtttttagaatatgaatcttgtttttgagaaagaaaaagaaacccctttattgaagagtttctcattactctgaatctgcacatatataggattgaaaccaagtacacgatattattatcgatgtggagatccttctataccagccatgagtcaaatatacaatttcaagactatgccaatgtctggtccccggagctatccaaaaaggatagctattgtgggagatcttggtcttacttacaatacatctacaactatcagtcacctgattagtagtaaacccgatcttgttcttttggtcggggatgtaacttatgcaaatttgtaccttacaaatggaactggttcggattgctattcttgttctttctcagatactccaattcatgagacctatcaacctcgctgggattactggggaaggtgaaaatatgtttttcattctatttctattacttgccttttgaactcatgcttattggaaatctgttttggatttgttgccatgatgtttcttttcaggtttatgcagaaattagtttctaaaattcccataatggttatagaaggtaaccatgaaatagaagaccaggctgaaaaccagagttttgtggcttacagttctcggtttgcattcccatctgaagaaagtggttcttcatctacattctactactcctttaatgcagggggaatccattttatcatgctcggggcttacatcgcctatgatagggccggtaagcccagtttttatttatcctcgttttgcttgcacattatttgcatatgattcttgagtctacattttctgtttaaagtttgaaaggcatatgcatagctactgttggtatttatacttttcatttatgttgcagcaaaccagtacaagtggctggaacaagatctggctaatgtggaccgatctgtaactccatggttggtagctacttggcatcctccttggtactctagctataaagctcattacagagaagcagagtgcatgagagtggaaatggaagaactactttactcctatggtgttgacatagtgttcaatggacatgtaagtcatcataatctatgtactacacacagagaagagaataggaactttagtagatatcatttgtggataaaagaattgaaacatatgaattcaaaatctaataattttgataaacagaaaaattaatgcaagcacactgcttcaagggatgttttttctaattttcatttaatgacaatgcatgcatgcatgcatgaattcatcattaatgttttttttccttttacatttattgcttttggagtaatactgagctctgctatatcaccaaaaccattaatttttgacaggtttcatgcttatgagcggtcgaaaatcgcgttttttaaacttatacctttagatccttgtggtcctgtgtatataactgtt

SEQ ID NO: 267100 - DNA, 2257 bp, Cannabis indica
gcccatatattttcagggccggctctggttatcttagttactatctaacagaagttaacaagcacaaactaacttatttacagtttagtaacttttagccggttttccattataaaaaaatcattaatatgtttacagttactacaagtgataaaatattagtttttatcacaaaataattttttgttgtgatttatgaagataatattaattagttaaaaattgatctactaatagcatgtagaaattaagaccaaaattaatgtaggtgaggctatttttaccgatcactcgagttctcttattaaagccttctaagcttgcaaagagttgtcaatcctgaaatctgctcatggatggtcgaatgttgttgttgaaaaggattgtgtcgtgcatgctctcaaaaataatatctgaatgctttctcttatcggttctttaattaacgtgatattgaatatcattcatttgtttagtaaatgagaagctagtaggtcatacttaaggaaaaaagaaagagaaattaaattttttcccaaaattataattatattaatttatgtaaataaaattctatgcaaactatttttttccaccactaatcaatccgcaacttatctttatcaaatttaattaataaatctaataattaacttgtttaagttatttggaagtgtgaggatgaaatcattttataacagaggagaaagagaatttttttctttgtaaataatatgggacaattaaaattaagattctttagagagacatttatgtccttcaaaagggtcatgacacatgtattatatcacatctcccttagaacgacttaaaatgtatgtttgattaacatgaaattctctccattttaaaaatatacattttatattttaaaattatgtacagtatattcttacattttatgtcccacaatatattccatgcttttaattgggttattacacaaaaaaaatttacactattttggtcaaataacatctaattcgagcagaatttcaagctattcaacttgggttgcgaactggtatacagaggcgttttaaccggtttagtattgagttcaattgtcgggaggctatccagctaatccataataaggaggaggcatgtagggacatcgatagaatactaaacaatattagggacttgatgttagatacttcagttgttgggatttcctttgtatatcgaaaggcaaatgaggttgcaaatgtattaaccaattacgctttggttaacaaagtgagagctatgagggttggggttgatccccctttgcaaggattgctctgttgcaagacttgccaaatcctttgtaatgttgctactatgaatgaagttaaattttaaaaaaaaaaacatctaattcgagcataatttatatttggatccaatcaaatccacataatgttttaaatctaatccaatccacaattagttatatattttgaatcggctacttttttaatattaaattatttacactaaacatgcacaagcaaaatttaacaaacattaaaatgacaacctttaaaaaaaaatgatgatattaaattagtcacaaattttatagttaacttgacaacttgtaccaaaataagagtatacaccaaaacaaacctcttgtcactcaaagaacttactaaccaagtttagaagataaaggataaagctcaaagagtaagaaaaaaaatgaagttcaagagacaaatgaataaaggaaatttttgtactagctaggggcaatgcctgaagtcctaccctgagaagtgtaatgggacaacaagtttgcaagaaaatgcaataaaaagggacaagtttgcaagataaattcatacaaaaagattgtcttgtttacttgaaactaaaatttattctagataattacacctaagaggactcctcttatgaaaatcaagtccattgcaaaatccctatgttgaacatgcatcaagattctccagtctctcaacaggtttctagacatctcagatgcatacaaaatcaattcttattactagctccatgtgttttcgcctgaccaaaatttcgatgttcgacatttcaagatcttgtagactcttggtaacctcagtttgagttagcatatgaaaagtgactccgttgggaattgggtacttagaaaaaatgtcgttataagttgatttatactcatggagaaagttcgggtcggtaaagggagaagttttcttagtaaccaatttggatttaccct

SEQ ID NO: 267101 - DNA, 1631 bp, Cannabis indica
acctcatggtcgttacataaaagattatccagtaagacagagactgtgatagatccaaacatttaatgagcaaacgcccatctaaccacattgtgagcggcaaaattacaagtttgactaataaaagaaaaattacagctaataaaagagggagaagacttcgtacaaaaagagacataattttcaagtgcccaacgagactccatcccattgatagcattgatcaccaccttcgagtcattctccactataacaaacttgcaccggatatccaaggcaaccgacacagccaagcaacaagccgcagcttctccgcaaagaacatcaaagaacctggagtttcattttacttaggaattaccttatgaaagtttcattgaaatacaaattacagtgaacctggagttcatgaattgagttgttttattttacattaccttatgaaagtttcattgaaatacaaattacagtgaacctggagttcatgaattgagttattttattttacattaccttatgaaagtttcattgaaatacaaattacagtgtacctagagttcatgaattgagttgttttaacatgatcaatcatatgcaataaattgtcaaaggatttgactaaattttgcgtcagagaggtggtcgtcgaacaaagggtatgtttcccttggtggtatgcgaactccttcggtttgacttagggggacaaggccctgatcttgcgagatttaatatcagaggatcgccacgtcaataggggcttccagagcgcctcttgggttacccttttggatgtatcccttccgctcattcggaaggctttcaaggaaccttcttcgtcttagacgagatgcccttccagatccgaagaggttcggatcaagatatgattgatttttcacccggacatataagagtctagttctcttgatggattcaacttgtggacttgattagacccgagcatgggcctcagtgggctgtttctttggagaacccttccagatgtatcccagacgctcatatagaggatcttgaccgtttccttttaagtgggacaaggtgcccttcggaaccagtgacatccagttctgggcacaaatttctagtactgggatggttgtgagatccatcatacctataatctttggacttctgagggagccttaatctattaattttgttttcgcaataacttgtgtcttccttccagaaataacaataactttttaccatatccaatctactttcatcatgtaactcaataatatgaaggaaaagtaaaatgacaactttgcatctcaactttttgtttttttccttctaatttggcaaaacaatcaattcagtcattcttatatgttttcctctaataatttttctaatccaatcttattttcaaaacgtgaccaatatgtattatatgattatgtgaccaaaaagaaaatcattttataataataaactaaacaaaaccatattatttctattaaaccatataagtttacaagtagaacaacaaacttaatctattctcactccttactactagaaagaaaatactctctctcactctcactctctctctctctctctttatctttatatatatgtatatatattatatatat

SEQ ID NO: 267102 - DNA, 1140 bp, Cannabis indica
atataacatagtgaaatcgaataaaaacaaactccacccaacacaaatgatacccaataatcatgccaagaacattaagagcagagcaaaaataaggaccccaatctttcatgtcaactaagcaatctccgaacaaattattttttgcattaataaattttacctgtcttaaatagatattgaaaactcaattaaaagaaaattaaattcaaaaaggaaaaagaaaataagacaaaaaaaaatcataaacttactgttaagaatgtctaaggttgttggccaagaagcatgattgctctattgcaattatcaatgccattgaaccttcaattgctcacatcaatactattctcatacattcatccatacataaaataggatttttttcataaatgaaaaaaacaataataaataaataatcagcatagcaatgacttgatggaggtgcctaaacaaaaaataaagtcaaagaaaagtcattcttgttatattcggtaccattaatgcaagtacacctgcaaatactataatacttaatacaaagatatggaggatattagtactgataggcaacccattacctatgagtaataaaattagtaacagagtcaagtaatagaaatactaatgtacacaacctaactcgttaagtagtaagatccaagcctgccaatcaagcacgaagctgaatttgaattccgtccaaatcgaggtccacattagcacagattccttcagtttgaccttgccgtcggttccgaaagtcggggtctcgatcaacgaacaaaacaccttaatgggaagatgaatcggagattctaccgaagagggagttaggtccggcgagagcaaggatttgctttgttgtctaaaagagatggccacccacataaatggtgactatgttagactctgaaatgtacggaggagatgctaaaccctcaaaaggaggcattttaagaaggatggatgagatctaggtgtgtgggcgatggattttacatattctaaaactgaaaaggaggtttcgattcattcatggttatgccacacccaaaatatcggtttcaactttcagaatttgaaacagacaaagcttcactctctcttgctcttgctcctggatttcgagaattgttc

SEQ ID NO: 267103 - DNA, 1715 bp, Cannabis indica
aaaaaaaaaaattaacattatggctccgaagaagaagaagacggtatcagttaagaaagtggtacgagaagtagaaactattcaagttgctattgaagaaactcaaaacgacactgttttagacagtaaagctttcaacactacttcttctactacaacaactacaactagtagcactgttatccctatacaacaagaacaggtcctaaacgacaccgttttgaacaaaaaacaatctgatgctgatcaacagcccgtggcagacccaattaaggacaaggtgaggcttttgcttatgctattttttttttcttttattaagtataaaaaaattaaaaattaaaattaatcaggtagaataaaataggtgactgtctctcttaaataaatacatggggtttttttaattttatattttaaagcattttttttttacatttttcaaaaatcaacatagcaatccagatggatactcaagtaaaaattactagagcaatcacagggacaatctagatgtaaaaatgaaaaaaataaataattatattattttaatgttttattcattttgaatgaaattttgagtttggtttttgttgaggctcattttatactaaaaaaaataaaataaaaaattaattatttagaaaaaaataaataagtatagttacatttgtatattatattgttttaatattttattccatcaacagcaagaacaaaacgacagcgttttggcaagtaagaagaggaagaagaatagaaaacaacaagatcaggtgaaaaacgacaccgttttgaaaaataaaaggcaacaaaaacaaaacgacagcgttttggagacgaggagtaagaagaagattaagaagagaaggaaaaatagtaatagtagggaagagtacaagaggtatgtatttctggttttgaaggaagttcatcctggtatgagaatctcaacgaaagccatgagtgtaatgaatagtatgatgaatgatgtgtttgagaggttagcacaagaatcagccaaattggttacttataatcgtaagatgacactctcttctagggagattcaagctgctgttggacttgttttccctggtcaacttggtcaacatgccatggctgagggtgctaaggcccttgcctcttatttctcttcaaacactacttaattttattatatatatatgtgttgtttggtttccactgtcgacttttatcgaacactttggctccgtactgtaattgttgtctttttactagataatgtcgttttgttgaaatgatgtcgttttgtcgaacagtttggtttcatattgtaattgttgtcgtttttactagataatatcgttttttcgaaatgatgtagttttgtcgaacagtttggcttcatattgaaattgttgtcttttttactagataatgtcgtttttttggaaatgatgtcgttttatcgaacagtttggcttcatgttgtaattattgtcgttttactagataatgtcgttttatcgagggtgctatggccctttgcttaatgcatatatctaacatcttgtttagtgatatattttcgtctttatatttcagagtggacttttatcgaacagtttggctttgtattgtaattgttgtcgtttttcaagctaatgtcgttttgttaaaacattgtcgttttaccgaacaatttgggtttactaactatgttgggcgat

SEQ ID NO: 267104 - DNA, 838 bp, Cannabis indica
ttttgtgatgggtttttcttgtttggcttttgtgctgattcagtacgtatttgattttgtttaataggaactcaagcagcacccaggagcaagggagcagccgctgcaaccgcataaggtgcttatagaaggtcattttgatcagatttgagcaaacttgttatagctttacaaagctttttttttcttttatgttgggcaagttttataagtacattgtttgttggagagtttaagacctatttcattagtagttatttgaatgtagttctaaattttggacaaggatggtaagactactgtcatttgctcaagtttcaatgaagttttgattcttattatattgtttagtatttatttttcttgggcggtttgatctctttcctctctacaattcaaccgtatatttttctaaaatgttcctcatttggaaactagggttcacttgtcttgattattgtcattataatttttagggctcacattattatagatatttccattttggaaattttaggtcagttgtgttcatagctctctgatcatttagctagttcctccctttgatatctaagtgcaattttgttatgacttcgaaaggattattttgctatatttttacagcaatgtacgccgacaataacactacattttttaaaaaccaatcttagtagttgtgctcgctgggtaatgatttgttgcatgtatacatttttttttctttagctactagaatatttggccaaataccaatacgatcattgttgaggctacatttagaacttactgtgcatcatgatgtattttaaatacattgtatttttaccccaaaatgatc

SEQ ID NO: 267105 - DNA, 1105 bp, Cannabis indica
aacacatgccctcaaaaaatatcactaataaatgaaatgtgttatagctgtgcatgtctcattagaggttggcatagtccggaatatgaggtcttttttatacttgatgaagtaatttggctttcttcttaaagattctctttttaacattgaattgatgtgagagaaattggtctcaacgctcttgacggagattctcaaaccaaacacaaaacaaagcaatgcttatactaggtcacggtcatcttaccctatgtcctatactatctaggaaccatcaccaagctatagaaacaaataagagtttgcttattacaaaaactgaagtggaccaaactctactcaaactcaacattcacggactctttgcacaaccctaataggttttcctaagccgttttaaatgcaactagtttacaagattatttatcctataaatattgctgtacctaattatagttatcttctggtaaagacctaaggtcattctttattaagttatagtcatagtagttcttgctgctttttttttcttttgtcctagaaattgacgcggtctactttgattatgatgttattactagaaaattatagagtatattgcacacattgtagaaattgaatattttaataagaatttgttagaattaccaaaactataattctcattttattcgaggtcaacatttaaaagatcattttggtatttaaggtgagtttagaaataattgtgtaattgtaattaggatattttttttataaattaattattccaacaaaccattatattaaataaagtttattaacaacaaatagtgcatattaattatttttaaattctaattcaaactattataaattaaatatagtgatgaacccataaaagaaatgaaaatctttcaaaatagagaataaaaaaaaaattgaaaaaaaaaagaataaaaaacttagaaaaatagaataaaaaatttaaaaataaagacttaagaagataatgtgtatgcaaatttgaagcaattttagtccgtaaaagagagactgcaaattttaaaaatagccataatacatcaagcaaacaatatcgagtaaaaaaaattagattaac

SEQ ID NO: 267106 - DNA, 2035 bp, Cannabis indica
agagagagagagaaaaagaagaagaactggtgtatgttgtattgagccacgcgcggaagagtactgtttttattgggaggattcagattcccaaattaaagagacttatagggcctggcctgtaaactgtatacttcagtccaatctcatctgctgttccacaacattatgagaatctaaaaggacttcgctccccaccactcctttttaacagtgccactaaccatccccctatatatgtacatgcttgtagtactctatcactgtgtacaatgtacatcaatactgttgtgaccatttacttagcattatgtcttattaatccatgaataagattaattgactaatttgcaactactctctcaaggtgggttgtgtattaattaggcctggtgtgaatgtggaatattggcatatatagtatggtgtctagtctagtctaagtgacactctagttttctttgctatatactgttttgctttactttaattctttttttactttgttttgagattttaaaagggtgtccatgaatgaaacaggcaaagtttgtctttgacaggattggtctgaattttggtgacagaaaaccatagaaaaagaaggtaggaaagggaagacacccaattaccacttagaaaactgcagtgtttgtttacacgtaggtgggttgtgtagttattgttaccttattaatgtgaatttttgtgcttggtcctatgtatgtccagagaagatatctattacaactgtagcttcagattcagaatgaagtgaaatcacactgatacactttagtagtagcatgctcaattctcatcaaatatctatatatatctatgtataaataataggtatatattttctcttcctcaatccaaaacaaaaaagaagagtcacccttatttcaatagattctattatttatgtttcattatcaaatgatatcggatatgataaaaataaaagaaaaaaaattgaataaattttttgatggtttgtattgtgccacctaacctaaggatgcatcagttcctaaacctttaaaagattctttctctttccaaatgggccacaaaggcttcttcacttattagttattatagatactatacaataatacaataaaaagggaaagtgtttaatttattgggtatacaagaaaatgaggttgtatttatacacagacatggtaatacaatttgctggagcaatgattttaactttggtaatacttttcagtagttttcacccactttcaattcattatccttatgtgttatttatttttatttttacatatgattatttgttatgttgtaaggatattttgtcattaagatattgtcagtagttgcaagatgatatgattcagaaaagtaaagggacaaaacaaagagaaaaagttgaaacaggacgaacaagagaagagaatagggttgttgtactacatctacaagagcactaaaaattagagcaaaatttattatatcatcaacatgtttttctttcactatatcactctcaacggtttttctacactattttttaaaatattttattaaaacttttttttttattttacattaaatttttacctttcaccatacaatagctgacaatacacattcacagcttcataaacacagttaggaattagttacttctttagctaattctattatttgttgcaacttgtgtgtttagctttcttgaattgtattgcctataaatactttgaattttacgatagcttttctacatttttcttctctattaaaatattatatttttaaacgtttttatttatttaataatacaacacaaataataaaaccaaaaaaaaacaaataatcaaatatatatttgaacagagagaaataaataaatgattaaatatgtttaaagcacttacaacactttctttacaatataaaagttttaaaaaatttaaaacaaatcgtactaaaaataaagctacaacaaatgctttaaattcttttattttaaagtttctttataatttattattca

SEQ ID NO: 267107 - DNA, 2907 bp, Cannabis indica
cgagcgatttcaaggcctaagaagaatcgaaggggaccaagatcttttaatttgaattggttgtttagagaagagatgaagtgttgaagatcggtggtgttgtggttgccacgataatgtcgttgacatatatcattaagccaaggaatgtgtcatgcgattgttttatgaaaagggagttgtcattttcggattgagtgaagcgttggttaagtaaggcagtactgagcttggcataccattgtcgagacgattgtttgagcccatatatgcttttctgcaacttgcagactgcatttggagggattgggccttttggtttgtaaccttgtggtaacttcatatagatttcttcatggagatcaccatgaagaaatgcgttgttatgtccatatggtgaaggtgccagtgttttatggcagcaagtgagagaagtaatttgaaggtgttaaatttggctacgggagcataagtttcaaaatagtcaacaccttgttgttgagtgtagcttttggttacgagtcgtgctttacatcattcaaccgacccatcaggattaagtgtaattccataaacccatttgttactaattgtgtgttgtccagggggaagaggaaccactatccgtgtttcattttctttaagggcatcgatttctgtgtccatagccgcattccaaactttttctttacaggcttgtgcaaaggaagtaggttcagtaatgcaagagatggcaagagtagcaactctgaactgaggggagaattttttgtatgacagatagtttgtgaaagggtgtgctgtgctagatggggtacagttgtaatcctgtagataagcaggggttttgattgttctccctgattttgttgttggcgattggtgaaagactgtggaggagtgatggaggttggttgggatgccacattggaagattgttggtcattgttgctagtatgagatgagaagaaattatcaatgtgaggattatgagtggtttcttgtaagggatatatagactcgtaaaaaattacatcttgtgagtagaagatgtgtttggtctcaatatcaaggagagtatatgctttcatatggtcgggatagcctatgaatatgcaagctttggcccgaggggccaatttgtgtggaatttggatgttggaggcatatgcgaggcatccaaagtttcttaagtgtgcatattcgggtggctttttgtgaagcaattcaaaggaagttttatccttgagaagaactgatggtgttctattgagtaagtagacagctgttttgaccatatagctccaattgggtaggggtaaattggattggaaagctaaagctcgtgcaacatttaaaatgtgctgatgctttctttccactgcagcattctgttgtggtctgtctacataggagtggaagtttgttgttccttgttgtgcataaaaggtgttgagagttaattctttggcattgtctgttcgaacagacttgatttttcttttgtaattgacatgtacaaaggtgaaaaaaaaattaatgacaattggagcatcaaatttttctcaaagtaagtatagtcatagaatggtcatccacaatggttaagacgtatttgtatccttcaatagaaggtatatgatagggtccccatatgtctaggtgaatcaagtcaaatatatcttgtgaaaaattattgtttgagacaaaaggtaatttcttttgtttcgataaatggcaagttggacagtcatatgattactgttgaaatcagtaggaaaattcaattgtttattaattttatttgtaatgagtacagatgggtggccaaggcgtgtatgccattggtcattttgtgattttacattacaggaaactgaattagaaatttgactgtagagtgtctcttgctgtatgtagtagagcttgccaattttatcagctgtcccaatccacaatgtccaagaaggtcctgtatttgacaatggttagaagtgaaagaaagatgaaaaaagctgtcatgtattaagctactaacagaaagtaagtttagtttgaacttaggtacatataagacattatagagagttatagctgaatttatttttactgtgcctattagttcaatgttaacagttgtagcattaggtaatgtgacagatctgtgtgtaatagatttgtttattgatgaaaaacaattgatgttgcaacaaacgtggtgaatagcaccactatctataatccaagaagtgggagataaaggatcgtgtttaccagtgaagttattgatggttggaccatctgaagtggaagcatcattggtaggttgtagttgttgagtaagcattgatattagttgttgacattgagcatgagttaaaggggcttgctcatttgtgttggcaaagacttgtgaagtttgagggatacttcgagatgtggaagctccatcagttttttgcgattatgaggagtggtgttatcattgtttcttggctttccataaccaggtgggaagccaagaaagtaacacttgtctttgtaatgacccagattttggcaatgagtacaatggggcctaggtcgtttgttcttggagactggttagccatgggatttgtatcaagtgcaggagttgtattgctggtgtgatttgcagctacagtaatgggtggtgggggtcgatgtcctaaggttctttgcctttcttgatgaataaccatagagaaaaccttgttgagagaaggacatggatcaagaagaagaatttgatctcggattgcatgatatgattcattcaaacctttaagaaatcgtaaaacttgatcatgattgatatgatcttgagattgggcagcagctgcacaagtgcaattgattcgaggccttaactgatttatttcatcc

SEQ ID NO: 267108 - DNA, 1275 bp, Cannabis indica
tgtataagagccattattctgtgagtgtaaggatccaaagtcgacttgaagcgatgatgttacattgggtatatgctggttttgtttttataaataccttgaatgattgaattgagttagttttctaaagctttgcttatgagaattgtaagattgtaaaaatgattgtcttagtgtatttgagcatgttgctattgttgtatttttagttgaaaacattgtgattatgttgaaatcaatttaaggattggtgtaaaattgagttgattaggtaatttttcaaagttgtggaaattttggatttatgggtttttcaagcccagtcatcatgaccagatgtatggtcatcgtggcaagacttgatcccaaaatagggtatagctcttgttcaatttcactgtggcgaccctatggtctggtcgcgatggtcgcgacgaccctgcagtgacagtttaattttacctattttattttggcataactttggactctaaactctgatttggacattctttatatcgttaaaaaaaattattttgagctctattaattggttcactgttggagtcataaatgtgaatttttatgaaatgtgattttgcgactaactctattatgtgaaattcgtgaattgtaactatgaataccaacacttggttaggatcacctataaattggaattctcctcatacattggaaatcatgtatgatagtgaactcagcacataaagtatagcgcggtggcacgattatatattatgtgattgtctaaattaaattataagttagggttattgccctaagtatgtatattgtgaatatatatgtaaataagatattatgtgataaatgagaagagttctgcgaataagggataactaggatatactaggtaactaaaatcgagataaaccctattaaggccttatatgtaaaagagatgtgtgagcgtaacgcataggtctatatcatatagaccttagatgtggtggcatcaatgtacatgagataatgtaatatacagtgcggtggcacaattatatacgcggaggagtagcgtatcaaatgtgattattacaaatattcatactatttaattgttctgtcttgttgggtcttagctcacgggtgctttaatgtgcaagaaaatataagatgattttcgatctgccataaatttaagggctttagcggtgcgttgtacatattctagccaagctagaccacgagggttgggtccaatagggaagtgtatagaaatcctattttaacgct

SEQ ID NO: 267109 - DNA, 3795 bp, Cannabis indica
accatagatgatgatataatggtcaaaattaaattttgaggttgatagtcaattttttgagcccaggtcaaggcggcgggacctactatgtgtaagttggagcttatttttgtaactcccttaagagtaagatttgaggtcaataacttaagaattgtgattgaagtgtgagacatttcttgataaagcattgaattagcttcaaaacgcaagttgaatcgcatcaatcagatcaatattgagtgagttatggttgttttactgaaggcaattcataactcagtgcccaagtgaacatccagtgcccaagttgacattcaagcgcccagattgacatatgacgtcaacctggacggtgggtaagtaaaaaaatatcaaggggatgtactttatgatgcctaagtgatattttgacatcacttggtctgttaatcgtgttttgtcaaagctggacaccagttcttagagatattgctattttttgagtagttttcccatgttggaaatgagaaatgtgaagttgtaaatttcacttctctgacttcatggctctcagttattgtgaaaaattagacagaagattgaaacgaaatcagaatcagataaggaaaatccaacgcaccaggccattggtcaagctgggtgttgggtgcccggccaccgagtgctccgagtgctcaaaaaagaactttctccgaatctgattctaatgcctcaaatatgtctatggtatgtctagttcatgtctcaatgcaaagtttgacatatatgcattaagatggtcccaaaaactaaacccttggttgagaatgtaaaccttggtgctaggtgaaacccttaggtacccaggttgactatcggtgtgtaggttcatgtattttcagcttccaaggcttggatttagttgttccatgtcttcatggtactgaatactgaaacatagtgagttagatagttatcgaagtctccagagttctcgaagtcaacttgggcataggactatggactcctcccaggttgacttgctatgactcgggactactcagctccaagatttcatctttcttgccacgtgtcaaatattgatgtccacatcatcaggaatacttttggtgtaaacaatttcttttctaaagctctgagatttactttaaagttcttggtatttatcttcattttgttatattttatattgaatcttgattttttgactgttttctagttgacgagtttccactgtcaacaattatttatttgtttaatttgtaaaatgatggtattgataaatcaaaattcattttagaagaatatgggataatttagtcaaaataataaaaatccattccattccatataatcctaaatatagtaattcttattctcttattaatttcatagtctttatgaaacaaaacaataaatattccattagattctattcctaattttattactattcttattttatttttatttgtaagcaaatatgaccttaaagtattgaaatgttagtccaataaaataatttttccatcattttggtataattagaatgactattttattttgaaatagaaagaaaaactattttgatgcagcatgagaaaaaaatttaatatgtttttatttttttatgtaatttaaatttaataatattttatttttatttttattcatatatatattttttttattttcaactaaacgatcaaaaaatttggatggtgtggtatcaaatctcattattgttattttttttaataagaacgagtgtcattgttgatgagacaagactactttgaggtcgacatacatatcaagctacatttttcattacaatcattcccaaatttaaattataatactactttataagtttatatataatttgtttaataaaatatcatactctcgaaataaacaaaaaaatgcaaatttcctattttgaaaattattacaagaaggaaaaaaaaaatgaagtgagatgagaagttcatatgtcggcaaacattgccatttgttttattcctttttataatacacttcaaattgaattattgtcttgtgtatttacaaatatgaaattttttttaaaaaaaaaatatatcttatatattcctatgaatttcctatattataattaaaactaactattttttttcagtatttgaaataaataaaaaaataaaattcaagttgccaatatagaaacaatgtcggccttgcagaagaagacagaataagattggactatagtgatctttattatgacttttaattttaattaatattttttttcctaaaagctgtctacttctaaaatatcttggctcttatattttatatttacaagtacgtaccacaacactcttgtaaattaatataatgttttttttttttttgggtaagattaatatatgtcataatactaataatgagattattaatgctgatttcttatgcttttgtaccacaacatatccattatctttaatctaaacttatatatttttacaaaacgtatttttattttatctatgacaaattataatatatatagaataaaagctatatatattattgaataaaaaatattatttttttcattatttgcaaataattttcaactttttgagtgataaaaatatatctttttattaattatggttctctctctttttttttttttgggccaaaatcataattttacgaattcaataattaaaaaacaattatttggggggaaaataaaaaataaatattagaaatttgatggtacgatttacgattgtgtaccgtacactgaggaggattgccttggcttttgactactatattaactagagtagattattctctatggaaatccccatacttaaccgtgagtcctcataatcactcttagtctttgactcttgatttttgatcactcgagatctacttaactatgagtttacgattagttagcgatattttattatgcttactaaggactcgtttagaaaattgtataattaaggatcgtattttattaaataataaataatactatgactgaataaaatattatattgtattaattattacaactataaattttaatacaatgttagtcgtattatttaatatataacaaatgaccccaatcccagcaccgaaccttagactcggacccatacctttaaccatgaacctggtccccgaccctaacactagactggactcgcacctcaaacccaagacatgagacctaaacctgaactcggactcaaatccaggccccggtcccgagacccaaacctagactcggtccccacccccagacctgagatccaaacccaaacctggattcagacctcgatttggacccgacacccagaaccagacctgaatctaaaccctgaacccaaattgcaacccaaactccgaacccaaacataacccccactccggaccctgaaccaaactagaaccatggaccccaaccccaaacttggaccgggatccgggtccgaaaggtctgagttctggatttcggacctaggtttgggtttaggtgtggggtttgggtcagggtcctgtcggtaagggtgtgcattggatcacatccaatggatttggacccatccgatccgatccaatctaattatttattggatattgaattttgccatccaattcaattgagtcatccgatccgatccgatccaatggatgtattggattggatcggttccatccattggatgctttaactggtttttaattggattggattggatccatccaatggat

SEQ ID NO: 267110 - DNA, 2254 bp, Cannabis indica
gatgttaatgaaacatacatggtagtaaatctagatacctgttggccccattgtccctacgagaggcttaaggcaaggtgatccgttatcaccttatcttctcctgttgtgtgctgaaggcttttctgctctcttacacaactttgagagaagaggcaagatacggggttgtaaagtggctaggggaactcctttggtatctcacatgctttttgcagatgacagttacatctattgtcaggcctcagaggagggagctagaaatgtgattaatttgttggagtgttttcaggaagcttcgggtcaacaagttaaccgtcagaaatcttctctcttttttagtccgaacatagcctatgatgagaaggtcaggatttgtgcaatgatggggatcaatgaagcaggtgacaatagtctctatttgggtttaccgaatacattgggccgaaacaagactggacttttggggtttttaaaggatagaatgaggaagaaaattcaaagctgggaacggaggcttttctctaaggcggggaaagaactgctaatcaagacagttgcccagtcccttccaagctacgcaatgaatgtctttttgttgcctgtggagacttgtgaggagatggaacattaatgtgcaaattttggtggcaatcctctactaagaacaaaaaggcatacattggaagagttgggacagattaacagtccataagtccaaagggggtatgggagattcagaaatctgagagacttcaaccttagtttattatgtgagcaaggttggcgtcttttatgttatacgaagtctctggtgaatagaatttttagagctcgttactataggaatggtaactttctctcggcggggttaggtggtaatccgagctttgtttggcgtagtatctatgaagctcaagaagtggttcgcgaaggagtaagatgtcgagttggcaatgggtctgtggtgagtattcttcgggatccttggttgccagattctgaaaatcctaaagctacatctactcatccgaccttgttgaatcaaaatgttagtgtgttgatggttcctggagagttagcctgggatgttgacttggtacgagatttgtttaataatagggattctagtttagtacttagtattcccttatcttcaagtcgggtttgtgactcatggttttggcatttggaaaatactggcattttacagtcaaatcaacatacaaatttctacagttgcgtaaagaggcaggggttaacatgtacaattcgagggtctggaagtcaatttggcagctgcgtgttcctcctaaagctaaggatttgttatggcgcgcgacctcggattgtctccccacgaaaacaaggctgcaatctcgacatgtgcagatcgagaatcattgtcctaggtgtgtatctcaacttgagacaccatttcattgtttggttgcttgcccatttgcttcacactgctgggattgtagtggtataaggacaaacattcaggggttatttcctttgctggttggttggaagcagtgtttaatcatgctgattcagctacaaggaagataatcgctgtgacttgctgggagatttggaaaaccaggaatgatctggtttggtctgagaaaagctccactgtagtgagtgtctcggttcttgctcagagtactctttcaaattggtctcaagctcgagacagaaatttagttcccacaccagcttatcttaccggagctgatggtttggttaagtggaagaaaccagctactgccatgataaaaatcaatgttgatgctgcaacttttgacaacaatggaacatatattatgtgtgtgttgcaagggatgctaatgggagtttggttgaggctcttacatgttgttgggccggtatcgtgcaaccggagatagccgaagccatgggggttcgggatgctttaagttgggtgaagaagaaggcttggcacggagcagtggtggagtcggattgtctctcggtgattcaagcaattcgtagtaatcttccattattatcctattttggaagtgttatatctgattgcaaattgttattagaataattgggtgatgtttctattaatttcattagacggtctgctaatagtgttgttcactcctttgcgagggcatcctattttgttgctgatcgtactctcacaagcaatgacgtttctactgaattgcttcatgtaatcatgaatgattgcaattaataaagttgatta

SEQ ID NO: 267111 - DNA, 2264 bp, Cannabis indica
atctcaattatataagcaaaaactgtctttttcctttttctaattcaaaatgatttttttaaagaatatatcaatggtaagatgaagagaatggatcacacaatatttaagaaatataactaaattatttgttgaatgttcctttacgttgcatcgaaaaagccttgtaattactttctttacttaatcatatcatatataattttgatgaaaaagactgatttgtttactgtttcaaagtcaatattatgataaattgatgattttagtcataattaattaagaaagactttgtttaattaacttgttataattaagcatttatgtattcaaccacgtcatgatgcatgctacctctcttggcaagtagctttctacgaagatatattatacgccggtttaaatttattatatttatttcttatttttaaaaaaattatattgagtttatatatttttttaataaataatggaattttattaataacaattagttataaaacaatattttgtaatctaatcaagatatcttttccattcactacacaaattttttagccataatataaattattcgtgactaattaaatgtgacttttagtgacaacaaaaaatactgtgactaaaatatagtatttaaatacaagttgtcaccaatttaccgatattgtgaaatgatcaaaatatatttatgcacatacaatatccaacgtgtatattaactacatattctcatttaagaaaatttcaagtcaaatatatattaaattttagatactttattatttcgaaagtttagagaaattcaagccatggatattattaacaattaggtgtgttgacagtatatgtgacatggggttataaatttaactatagtatatcacaatgattactcattcaaaaaaaatttaggagataacttatatagagctttccaaacattttaattactagctgaaattaatagtactttagcgtatagataattaatagcctagttttcatataaagagaactaagaagattaaggaagttagaacacaatgtcatcgcggtcaagcttgacatcatcaggctcagccttttcggtggcacaaataagcgattgtagtgtcgctaaggcaagtgcacgccctttatcaaaccgaccgaccattcaggcaacttttgtcatgagtaattatagtactcatcaattacaacaaccgttatcatggccatcttcacgattatcatgttcagagtactactacctctcacaagtaagtggtagtactccttataattattactattctcaaggaaatagtagtaatccttattattattactactattttcaggaaaataacagtaataattcttataattatcagtataataatttatatggaaattgtggtccacaacgacaagatctttgggctgatgaacaactagcactgtcagcgcaaagagtatcatcacatggtccggggtcatggttggcgagcatagagaggtcggccgtggctcatggccgtcgttggtgatgatcgaccaattgggatagtggtggttgatgttttaataagttaaattttatgggagatacaaattaaaataataaggttatgagtttattaatttggtgtttttgatgattctatatatattgtaaatatttgaaattacaagtttcagattttaattttgatttgtttgtgatttggaatatctaataagtatagaaataataatatataaactaaataacataatttttaataagttgtaataaatttgatttgattattgtttgtaaatccaatgctttattattatatatacgatacaacagatatgagttagtgccaaattgtaatatgtagtcttatatatatttggataacttctactttctttttcatttcattggttatttttatttatgatacattacataatttatactcaagtactaatgatattactttcatgtaataacactatatatatgagcttaaatattggagtacttttatttataattgaaattaactataatatatatactagatataattaatcaatatatataaattaataaaatgaaataagatcaggtttatatacgttgttccattactttatgaattatgattaggttatatagtgattaattccagggacggaacaaaatttggaatttacgggacaaaaagaaattgaaaagaaaatttaaaagaggctaaattctaaattaattttgaaattttttt

SEQ ID NO: 267112 - DNA, 872 bp, Cannabis indica
ttcctaaagccacctgccacaccgtccaacgtataatctcccaattttggtgggggtctacaactaacagtaaaaaatccattggaagaagtggtctgcactcactgtatctaagttctttgggggttggggcttagaactttgactagccataatcaagcgcttcttgccaagcaggcttggaggatttagaccaaccctacttccctcctccactctcttctcaaagccagatactttaaagtaatgacttccttactgccccaaaaggtcacaactcatctcttacctagagaagccccctttggggaagagaccttctgaaaaaggccttatatggaaagtgggtaatggtagatccattcccctgtctgcttctaattgggttccttccctgtactcacttactttcctccatgatatcaacccatttgatcacaatgtatgttttttcctaaaccttgataacacttggaataaggataaacttttgcactacctacctgaataccaagcccatgccatactccaaattcccattgatcagactctccacgatagcctcatttgacggcatcaccactccggtaccctaactgttaactcggcataccatctcaccaatactgccaataacactgcttctccttccacttcaagccttgatagcctaaaatattggtggaaatctgtttggaacttgcaaatccctccaaaaataaaacatttttcatagaaagccttccatcactcacgaatccctttttccattattgtagaaggaaggttgaaatcgtctctcatgctcttcttgattgttttagagtaaagactgtttggaagcactcctctctcaaaacgtttcataacat

SEQ ID NO: 267113 - DNA, 1272 bp, Cannabis indica
gtatatatatatatatatatatatgcagagtattaacaacttaaaatatgttattctttcttactcaaggaagcttacttgtctcccgaatctctctcaagcaaatctttacacgcttcgtctaaatggttgtacaagtttagttaaccttcccccgttaaaatttcacaacactttctacaatccaaatgaagaaatcaatgattttgtattaagcaatttcctagggaatttacatggaacgttaaactacggcgttgcttgctcgcttgatctcgaatggtgctccaatctcacaactctttcagagatgtctggtaatataaaattcatacgtttaagttatacggcaattaaagagctgcacccttcgattggttctctcaaaaatcttcgtgcacttaatctttatatgtgtaaacatctaagggaacttcctaataatatctgtgatttagaatcattagaactcttagatatatatggatgtgtatccattgacaagtttccgaggcttccaaaaagtataaaaatattatatttgagtggaacatcaatacaacaagttgattcgtcatccttcgactgtctaccttctctcagcatcttatgcatgaatgattgcaaaaatcttgaatttctcccaactagcatttgtaagttgaagtctcttatgagacttgatcttggaaattgctcacgattgaaaagctttcctcaactattggagcctatggagaaactagagataattattttaaatggaactgggattgaagagatgtcatcatcatcaatagagaatcttattgtgcttgaaacgctaagcttaaacgagtgcaaaaatctcatgtgtattccaactaccatttgtaaattgaagtctcttggagaacttgatcttggaggttgctcagaattgaaaagcattccagaaatcttagagcctatggcgaagctaaagaaactttatttaaaaggatcagggattgaagagatgtcatcatcaatagagaatcttgttgttctagaagagctaaacttgagtgagtgcaaaaatctcaagtctattccaactaccatttgtaagttgaagtctcttatgagtctaaatcttgataattgctcaaaattgaaaagctttccagaaatcttagagcctatgaaggaactatggtatcttcctttaaatggaagtgggattgaagagataccatcatcaatagagaatcttgttatgcttaataatctaaacttgagagagtgtaaaaa

SEQ ID NO: 267114 - DNA, 1501 bp, Cannabis indica
atatgtccaagaatgttgaacccagtcaatcaaacggttgtagccgacctgaccgtcaaatttttttcatgttgggggtgaagtacagttagatttaggggttcaacatttggaaaacaaaatgaggaagattatggaagtactgagtaaggttgtttaatgcctcttacattcgccattaatggaggcaacgtaataagaagtgcttgaaaaataaaagctctggttcaaaaaacttagaggagggattatgaagagtaagggtgatggaaagaggaaaaatgagttcttggaaactatttataatccaactacaatcttgggaaatcaaaacaaacaacccaaatttttcctcccaaaaaagcatcctttgatccgacagatggggaaccaaaatgactgcatttaatgtacgaccagaatatttaaacaagtcttttatcttgtacgcattaattgaggggtcacctcaattgtcatgtcatcattactaaaggaatgttatcccaacgatcatgcagcgtcagcagataaatcagaagcgctgcatgtggaccacacaaatgacacatgtggttatcatgccgatgcatgttggcaaatcatgggatatatctacgaatttagccagcgccacgtgtctgagattccccactagaagcaaaagagtgttgcaagcttttagaccacaaagtgtcctaaaagcttgagggtaaatattatctacatttttatagagcgagacacatggcattaaaggaagaaacgcatgtccatctccatgtaattagaatcctaagatacggttgggaggtcttcctgaactaagagtcgtccagagtaaggggatggacgagaggttacttgcgtcagcatgtgcttcccaagagcaggatgagaaatgtccctcctggactcggaagggtctgggagagagactcttgtggttaacatccgcatacactaggtcaccaagtgtcagttatacttttcctgacagaatcagatcttgtcccctgcactcgagcatggtagtgcacgcatcaccaccctcttatttaccaagcggacataattgatttctacccataatggagcaagttttgagtgtcatgtgtccttcacttttaaaggttaaacttttgtgtgacatgtgtccaaatagtacaaaattgtcctcattatccagccgcaacacgcaagggcataatgctacccactagatcgatcaatcaactttacattgcatgtaatttaccccaatagtgagatttaagcagaatttttagatgggtggggcgatctatacccatacccaaaagtataaattccccttcatttctatgaaaagagggcaagctaaaaatacatagcaaaaactctgctaaattatccttgatcttcttcttcttttataaattaagaggaaagagttagggtttttttacataatactgtaaattcatcaatattgtccctcaaaactaataaactgactcgt

SEQ ID NO: 267115 - DNA, 1079 bp, Cannabis indica
attaaacttagttattaatttgcaaccagagtatttatgcagcaaatttattttagacattatactatttttgtgtttttttttgttttaaaaaaaaaacactaaattccacatttatccctagtgattaagagagaggtggccaagggtagaaaaactcccaaagggcagtttggtcatttaaggcataaatgccttcaacggagacgagccaagcacaacgagtctcacatcgactccggtctcttccgaaagaataagcatcaaactcataactcctcactctttcccatcccaaaacgcagaaatataatgtcgtttcccaaacattgggcgagaactcccacttaaacgactcgtcgtttgatatgctatgctctcccaaatcatcatcttttgattggcaatgcacacttaaattcttaccaatccccaatttattatctatgcttgcctccacttttttggctgagactacccaataataagttgggctccataacatcatcatcatcaacaacaatttttttaccatttttttttatttatataccataaatgaatgatatagtagaagtagtgcttgtaaatagtaatatatgtagtatttaaagaagacaactcattattgttgtgattaaattaatgtttcggaataatcttacattttgtacatttgttacaattaaacatagtaatatattccatgtatatgctatttgcattgtattaatctacaattagtccaatgtccattgagttgttttggcattttttcttgtcatggtcttctttcctatttattattattaattcaattatatagactagatcatatcgataaatcaagagcataaattagtattttttttttagatacagaaaacataagggaaatttcattatttgcccttaataatataacctatatcaaaatttatacccttttataatttgtacaaatttattcctctaattttaaaagattcctaaaataccccctaaattaaactttccctctctcagacgttccctctctctttctgacgctccctctctctctctctcttcacgatcac

SEQ ID NO: 267116 - DNA, 736 bp, Cannabis indica
ttttatttgggctcacttaaatattttattgcacttttttattgatgtttattgggctttctttttaaagtttttaagtcttttaagttgggcagcagaaaactaaatttaaaatagcaatttggaccttttttttagggctcaaatagcctattttactttcaaaatttgaggtgcacgcttctaacgcctcacgcctcattttagcacctcaccacttaaggggtacgcctctcttcttttcagcaaggcgcacgccttgatgcactttttaaacgccaacttgaggcgtgaggtgcgccttaaaaatgcctttttaaacattgactaatatattagccgtttagtgaaaaatcaggttttactctcggattggattggatggatccaatcaatctaattaattttggattaaaaatattggatgaatccaatccagtctaaaaaatattagatcaaaagtattggatagatacgctccaatacagggattcatccattggatggaatcgatccaatccaatgatttattggattggatcggttggagaaatccaacattcaatatataattgaattggatttggatgggtctaaaaacgttggattgaatttggatggatctaaaaacattgaatgtgattcaatgaacaacctttaactattgaagatgctcttatagtattctccaactcaccattggagatgctcttataatattctccaacttcttctt

SEQ ID NO: 267117 - DNA, 668 bp, Cannabis indica
atggtgtgtatagttatcttttcaaacttctttgcccatgttttcttcgatttcttgactgcttatcgactgtttctcgatgattgactgtttattatttcaacggttaacgattgctttttgacaggttctcgattggttcttgactgtttgttgacactatttttaattattataattttagttatttgtcattctaatttagttgttttttatttgtatgaattgcatgattacttgggtttttggttgtgttgtatgatggtatttagagtgttgagggatttaattggacgtataaaagcgaatgaagtatgatattgatggttgaaactgacacaattttacagaaaatgcacaacattttatatgaaaacttggaggttgaatcattagagtatgatttgaaattagtgataaataagtggtaacacagtctcaaaattagacaactatggtagtttgggccacaataaagctacatgcaaagcctgtgtttgagacatagtttaatgttatttggggtccctaaaactgcatttgttatatttaatactaattgaaactgttatttagttgaaatgattttttttgaggatttcttaatgggaaattgatgagttctcgatgagtaatttaataaatatgttctatgatgatttatcgat

SEQ ID NO: 267118 - DNA, 662 bp, Cannabis indica
caaaaatgtaggaatatattatctttccatttgaatgattaagccaacggtgcctttggaaggacacaactttaatttaattaacataagagtaggaagaagagtaagacttttgggttgtcgaatgacggtaaggtaaccctccccttatccctttatcttatctatatcatactcatactactcatactcggaccaacaaattcaaatgcaaccacttcttttcttttcttttctttttcaacaacttctaatatcaaagttatattataaataccattattgggaccccttacaaccaaagcctagcattctttttaaattatataatattaaacttgtgaacattaaacaacttctctttaccaatcttttaatggcttagtattattattattcttattttcctttttctttggaaaaagtttgtgaagaaatagttacaactctcgaatcattgtacaaagtggtcaattggtcagtgaattgtcatgtccccacaagatcatgtagttatattagttgcagatacgctcatttttgacaataaatactaattttttaagtgaataatgtacttgtaattaaaattagctagctaggttagggaaggtttataaattaggggtcaattaaacaaatgggtgcacttgtgtgtgatt

SEQ ID NO: 267119 - DNA, 1131 bp, Cannabis indica
cttccacaattttctctaaaaaaaatatcatgatattttttatctttttcccatctttttctctgatatttttctaatcttcttctattttaaatctgtaaaaataaaagataacaagcgtaaaaatgctccaaacacgattaaaacttaattaaaaatatactaaacttaatctaaaattaatactaaaaataacctaacacaactctaattttttttttttttgacaaaaataatgatctttaattaaataaaataggataaaaagttaattaattaatgatctctaattaaataaaatagaataaaaaacagaaaaaagatagaataaatgagagaatttaaagtagattaaattttattataagaatgacaaaattaatgagagaataaacgtaaccacatatatagataataaataatttaaatattatttattctaaaaattaattacttaatatttattttttttatgaataaattaattaatatcaaactataaatattttgaattaattaatctaaggaaaaattgactttccatgcacacattagggaaaaattattcccttaatctctattgattctaatctccataataccctacagtcaaaaaaataacattttcctctccttctttctttcttttcacgcatcacttctcccttctctcttctctcttctctcatcactcagtcttacccactcataatgggaaatttgaatttctatgcatgcattaggagataatttttttcctaaactaatacttttctatattgaaaatatatgaccattttttcaaaaccccaaaaatacccctctaaaaaactcaaaccccttctctctccttccctaaaactctctctgcctctttgcctcttcgccaaaaatcccatcgcaggaaactgctcccaaccctcaaccatcatcaacaacccaccgaccgaccgccccaaccctccacgcaaccccgaccgacttaccgaccgaccgcccccaaccctccacgcatcgggtccacatcaggcccgacctttaaaacccaaaaaacccaaataaaacataaaattgggcacaccatcggacgggcatcgggcccacatcggactcgattttcaaaacccagaa

SEQ ID NO: 267120 - DNA, 2495 bp, Cannabis indica
tgagattcaagtggcagggcacaacaaattggtatcagagcacgtgatccgagcaagagatgaccaataccagaagttctaagaaggtgatagaggcggttcaatcagaggaagaggaatctcaaacttccgttcatggtgattggaattcgatgaaggagaaaatcgattcgcatgaacgaggcattgctgtaattagtgagaagcttgatttgcttctccatgggcaggcaagaatggcgacggagcttaccgatggtccgcgaagtccaattggaaggactgctcatcctccgattgggtcaagcggttcgggaactcagaatcatgaggaagctggtggctatggaggacgaagatcggagttccgtccaaggaatattgagcttcctctgttcgcgggatcggaccccgatgactggacataccgggcggagaggtatttcgggttgcaaagactcacggcggaggagcagttggaggccgcggtgttgtgtttggaagggccagcacttcgctggttcaggtgggagaatcaaaggcgagaaattcgcagctggaatgaactgaaagatctcctcctcctgcggtttctacctgtgcatgaaggttcagcgtatgaccggttcctcgcgttgcagcagacgtcgatggtgcaggagtacaggcagcagttcgaggcgttgacggcggcgttgggtcaggtggctgagccgctgctggagtcggctttcttgaaaggcctaagtgctgagattcaaggtactctccgccttcttgaacccgtgggattggagaagacaatggagttggctgaggtggtggaagccaatcccaaagtggttcgggccttctatagtgggccgagtaaagggataagcccaatcaagggaattcaaattaattcagctggacccactcacaagaactttaatgggctgattgggtcaactaactttaaaacatcccattactcaaataatggctcacgtgtgtcaactcccaacaaccagagacgggactttgagctgggcaagggcttccgaagactcacagagacagaagtgcaggagaagagagctaggggagtatgttttaagtgtgatggtccttggacaaggggacatcaatgtaagtctccagagttgcagattattttggtgcaagatgaaagtgaagaaatagaggagttgacagccatggaggaattaggagataatgagcaagaggggttaacagaggcacaagtggtggaggtgtcactcaattctgtggttgggttgacttctccaaaaactatgaagttggtgggtaatgttcatggtcaagaggtgacagtattgattgatagtggagctacccacaatttcatcgccacatctttggttaccaagctcaaccttccaatttcaactacggagtcgtacggagtgcaaatgggaacgggacaagccgtaagggagcgggaatttgtttgggcgtgcccgtctctttgcaaacgatagaaatcattgatgatttcctaccattggctttgggaagcaccgatgtaatattgggtgtccaatggttggagacgttgggtgacactcatcacaattggaaagaaggaatcatgaggtttaagagaggtggccaaaccgtagagctacgtagtaacccagctctccacaaaactcgggtttcactaaagaccatgattaagacgattaaggaggaacatgaaggattatgggtggagcttggtcatacaactactgtgaaagatgaagaggttattccagccgctgtatcggtgttgttgcagcgatttacgagtatttttgacatgccaaacaagctgccccctccccggcatcgcgaccatgctatttgccttcgccccggagttgctccgatcagtattcggccctaccgttaccctcatgtgcagaaagatgaaattgagagattggttgtgaaatgttgcaaggggggatttgccagcctagtacaagcccgttttccagccccgtgttgcttgtgaagaagaaggatgggagttggcgtttttgtgtggattaccgggctcttaacaaagaaactattgctgataagtttccaataccggtcattgatgaacttcttgatgagttgaatggagccaaagtcttttcaaagctagatttgaagtcggggtaccaccagattcgggtgcgaccggaggatgtgccaaagaccgctttccgaactcacgagggacattatgagttcttggtcatgccgttcggactcaccaacgccccagcaacttttcaagccaacatgaatgagatctttaaaccatacctacgtcggtttgtgcttgttttctttgacgatatactggtttacagcccgaccatggaggcccatctctcacatttacaggtagtcctggaaaccttggctaaataccaattttatgctaacaagaagaaatgttgtttttcccaacagcaattggaatacttggg

SEQ ID NO: 267121 - DNA, 1660 bp, Cannabis indica
tcaactaaccacatttcctccaactgtaaacatataaccagttaaagatcttctcttgtaaagatctccaccaaaattcgaatcacaatttccgtgctcttgtcttttgtagctaataaacaggtttgtagatcccttcatgtaccttagctgccaattgacaatttgccaatgctcaagtccaaccataggcaaaatttggccttgttcaaatcatggcatacatgatgttgtctacaacattagagtaggggagcaccaatcattttcttctcttctagtttagctttttctttagtcaatgatctcagcttgaagtgtgcaccaatgggagcattcacatctttggcttatttcttctcaaataactccaccacctttttgacgtatgaagcttgtgtaatttcagagtgaaattctttttgtctcttttgatttccatgccataaatctttaatgcttcctcaagatacttcatatcaaattcaatactcaacatttcccttagtttgtctacctcatgtttgtgcttgcaagaaattaacatatcatttaaattagcaagcatatgaaattattatcttctaaaacattatagtggacacaatgtcatgttttgaccttgtaaacctctgtttcaacataatttatcaaacttgaactatcactttctaggagactacttcaagccatagagagactttttactaagattttttttttcttctcctttctgttagttggtgcatcataatctatttatctaggtttccatgtaaaaatatagtgttacatccaaccggtccagttccagatcaatatggcctatatagtcacttatatatggtttggtactttagaaatagcggggcaatatagttatacagttgaaatgttaggagtatccaaggttattgattaagaccattttacccctaagtgtgttgattacatcatggtgaagaaagaggttaaattaataattttaccttaattttgtcttttagtgaaattatttgggattacctttagataattatatctgattttaatgatattagttaattactttaagtttattttcctttaagctcaaaatgaaaatttggagaaaaacctaagtctttctctttctctttccttgtacggccaccacctacaaccacagaagtcaactttcttcatcatttctatcagcaatatagaggggttttagatgagaattcttagaatttggaagattagagatcaaatgtaagcttgttcttcttctttctcattgactttccaagttctaaagctaggtttgcatgcaagtttgagtttttgctgctattagttttgaattgagttataacttgattttgtggtcacttttggattattttagctgattctaaggtggttgtgtggttgttgatgagcttagactttttgagcctttaagctcaaattttgctctttaatggtagatttcatttttatgtgcttttattactgatgttggttggaatatatctatggatgttgaattagctgttttggagaacttggtacgatttggggaagtcttgagctagattcgagattctttgggtttacgagaaatggttaactggtttcccaagtagaacctacaaaaatggtttaccattttggg

SEQ ID NO: 267122 - DNA, 1448 bp, Cannabis indica
taaagaattttatttagggcataaaacccaacattttccttggcaaacatcgggtgcacgtattctaaaggcagcaaaagcaggagaaaaaggaaaagacaaaaagagagggggacataagtttgaaaaccgtgtcacactcttaacagcccctaagcaaaaaagtgtttgcaaaataaaaaataaaagaagtagcataacacggatgaaaagatacgccatccgacgaccttcacaaaaatcattctaccgtagaaatcaaatacggctctaccaaaaactctgccctaacatgcaaatgaataaaaaaaacaaaatgtacccagaaaacttacataaaggtaaggaattggaagttgatgatgatcaacggtggaatgcggactggcaacgatgaagaaataatagtaagaaatctatggtttctgaaattttctcagagtttcttgggttgaaatggcgagatagtgaaaataacccaatgaagagaaaatgctggcttttatagaccagaaggggtgcaaggcagctaagtttcagacaccatcgtacggtgggaatcgtaatcgattcgcattctacgaatccaacgggtgagattaatgggtgccaggggcggttgaaaacgtttgagtactcttctgatacacgggttaaatgcgccggtttctcaatggacgggaagcgaatcgttgcctgtaaaaagaaataaatattaatgatgaccatcataaatacagctcacgcgcttaaagcatgggccattagatcatcaagcaaattggaggcatcaaacaagcgtcattcacccttagctatacgaggcttgaagagtaaatgttgcctttgatttttcccaaaatacgtgaacgcggatgaagatgacatgcggatctgaaagaaccatcgctcacgaaaataaattaagtcttgaataagaggaacaccacaaggaaggtgcctcctagagaagggcataagacacatctttaccctctgggaggctagggccatgataaggcatgtctgggaggtaaagagattacttgaacaatcacttcgcatttaatagcgcatgggggaagacgtattggaacttccataaaatacgtgacagatggcgtaaaccccttttttttatgtcgattacacaacaatcgatgagtctagtgacagctactttatgaggaatcacatcagtcaagaggggataaaaaattatattcacctaactcctaagatacctgcggtgtaggtcatgtatttcctattttgtatctgatgggaatatgtgcccctatgaagctaacacaaaaagacaagtgatccattcctagggatccccccagaaaaacaccataaataccccacaaacagatgaaaaaggggtcgatcgattttatttaaggaatcgaagagagaaaataggagagaaatccaccaagaac

SEQ ID NO: 267123 - DNA, 1311 bp, Cannabis indica
gttatattacctactattgaatgttatggtttaacattttataataatgaaatgtataattagttatttaatgtatcattctttattacttttcttgctgagtctgtgtgactcacgggtgctctgtgatgctagtaaaggcaaggaaaaggtagagcaactatgagatgacagtcttctccagcaatgtacatattaacctcaccggcctacgtgccgggttgccatgagttgttatgggatgtatctattgtgttatagttttatgttttgaggtgtcattgtatatagttcttttataaaactttttataacagggatcctcggaacacgtttttttatgtcgtcacgatgcccatatgggtagggtattacaacttgatatcagagcagccatcgttttaaaggtcctaaagactggtcgaatatgtacatttgctacgaagacaagtcgactcatggtatagtaagtatttatgttatttgatatttccttacatgcttagataattatagtgtatgatgggaaaaagcaatgtgtgaatagtttatgcatattgatattgatatcgtttgaattcaaaatggttgaaattttttgggttacaagacattagatcatgcagtggcggtctggctgtctaaactgcgagttaggactaccatgcaagagcatcctccaccccctcagaattaggaacaaatgtttgctaccatgcaagagacaattaggtagcaaggggagtagattcgagacctgagagaacaacaagatcgttttgcacctatattggccccttaggtagtgccacagaatatggggatcgtatggaaccaatttatgagcggttcaagaaacaaaacccgcttgtgtttgaaggtggcctagatccactgaatgtagaatagtggatgagtatgattacttctatctttaactttatgtgggtcgaagataatgaccgggtatgatgtgctatttatatgttacgggatgatgccgagatatggtgggagattgtttcccaaggtcataatctgaatactatgacttgggatgcattcagggtaatattttatgagaaatactataatgaatccattcgtgtcgctcaggctaaagagtttgcacgattagttcagggtagcatgactgtgactgaatatgctaccaagtttaacaggttggccaagttttcttctgatgaagtagccaatgaagctgcaagaaaggctaagtttatcagaggccttgaagaatatattgctgttggaaatattttaccaggatttagatttactaccaagtat

SEQ ID NO: 267124 - DNA, 1557 bp, Cannabis indica
agttgcccaagctggtgaggcctcaagttctactaaagaacctaaaaggcctaaaaccacgacacacaagaagaagtcctcaagccagcttaccatcgagctagccaagtcgtcaagagaaagagaatgaggtctcttctgcggagaatgcggacaagtatcccactgggtctgtgcactaggtgaaattctctagttctcttctagagatggttctcctcgagccctcctgtcccctacccctcgaggctaggtctaaaggctcgcaactctgcttgtagtatgataccaacggttggcgtaacatcttaactcttagcttcgacgactaggatcttcttacacgaggtagctctgaggatcttgccaaaaagagttacaaacttttgcatcaggttaatttccctttctccttgttctcacttttcttcattttatcatttttactaactttgatttgccttctcttcgcaggcctctctcctctcctatgttacttatcatcgatcatctaagcgggctgaaatggttgagacaaagcttcgccaaaccagggagcatagggataccttagccaaaaagttgtgtgactttgaggctgaggtttctcgtgcaatggaagagcagaaaagcagcgtctgaccgaccaaaagaagatcaaagaatttgaggtttctctcaagtccctccaggctgatcatcacaaaaaacataaggaaatggaggttgaaaccgaagatagggtcaatagcatcggtaggaggaccacctaccaaatctggtcggctaacccttatttggcctttagctttttgggtgataatgccgatgtcatgcttgccttttacaagaagactaggagagaagaactgggcgaggaagaagaggttgaagtggaacaagaagatgcatccatgtctcttacaatgtaggcttggtttttaagttgcattttttttttatttagaaaaatggccatatggccgagacaatggttttcctcttgtggcacttttgtaaagataaatttgcattgtggggatggccaacttttcttttttattttatcttttatttagtacctcatattttcacatttgaacttaatatatttgcttacttgcgtttcactcacaatttaaacaattatactttgatcaaatttaaagtactttaagcatttccactgatcttgttttcctttcgtattgcataagtagttaatgatctactatgtacgcgggaagttgttatctgctatgctttctatttgcgaacaattgatcagttcttttacacgtaaagagttatcatctgatttaagcaaacttaaacatacttttaataattcatcttatgaattacttcatatatttttgattacctctatatgaatagttaagccttctattcacaccttaggttaagtattttttcaagggtatcttggtgcctcattttaatacattcctataaaatgcgagtcgttggatgttcagcttcgcatgtagcttggtgttgtttttatgagttaaatctcatttacaactactactt

SEQ ID NO: 267125 - DNA, 868 bp, Cannabis indica
ggatagcgttagatcaagctctcgttttgaagcaaccaaaaacattatcaatgcacagaagaaacctcatcaaaacatgcgtgatcacttaaattaatttaaaagctcaaattaaaaatataaaaattatgtctttacagtttacaaaggattgaacttataagactctagttgatgtaagagaattttacacttacaccataattatattaaattaaatagcttgattattttgtactctattagctatgcttattgttgagtagagaattaaattaatatataactttaaaattataaaatatttaattaaaattataaaatattataagataaataagtaagaaaaattataaatttagagttagctttatttgtatattattaatgggatctagctaattattaatatttaaaattaattataaaaaatgattaattatgttatagtttttaggaattaatttaagccacttaactataaatcattatacttaagtaagttcatcatcattatttacgtgtttagaaaattttaaaatagcacatcgatctggatctaaatagcatacaagtgcttaaataataattttaataaacacacatacattatacatatattatatataataatgtgtttattattattattattttattttttttgaataatatgttcatttataaatcaatattatagatcgtacatatgcccaattcaatgagtgtttaggtaatggagaaactcatcaacatacttgttttgcactcccatgtctccaaatatgggactcatttccttcgccttctctctataaacctttccttcttcttcaaccatcaccgccttcaacgatttggccattga

SEQ ID NO: 267126 - DNA, 659 bp, Cannabis indica
ttctttttaaatatattacatttttatgaggacgtgtttctacaagagacacttaaatgttatgatcattccaacttttaggctatgttgaaaagaaaaaaaaaaaaagaaaaagtggaacaattgtgcattaaaaaaaatactgattcaataaataaaaattatatctaacataaaaaatttatttttctttttacattttttttccttaaattttccttatatttttctttactatcaaaatttaacttacaaacatagtcctaaataaaagaattcttatgtgatgtgattattcacattaaatttattacgtgaataaaaggaacatatatctgtagctatcaaagatctatacatatattatatatatatatattaattaatattgtatgtatgtggacagaaacctcatgtactaaagtgattactattgagaatgacactgttcttcccatcatttataatgttttcttttattaaaataaagaaataaagagataagaaaataaagcttaataagtattgaattgggtcaagctagcattgcagaaaattatatgtgatggtttgttgcttccccatcacttttgttctttatttaattttattaattaatatttggtgggcttattgcttcatctcttctcttctcttct

SEQ ID NO: 267127 - DNA, 1044 bp, Cannabis indica
aaaaaaaacaacaacaacaattaaataattggcataaagtgatgtaacattaacaagatttattattatatacccaagacaattttagaatcaaaatataagtgtggtgatgataattagtttctagatattaagattttttttttgaaacataaatatcaagattttttttttgaaagaaagatacatataaagtaagactatcttagaatcaaaatacatacacatttgtaatctttatggattcttagttgtaacaataatataactgcactcagaaaaaatccattaaatattatagatctcaatttttttttttaatttggaaatattaatatctatttttttttttcagaattatatatattgaatggaaatttaagttttattaaatctcaagttcagccacagtaaagtagcaaatcagttgaaaaagattttaaatcaaaatgacaattagaatataatttagtagctttagcaaaagtattcactacattagttgatcatttaacaaaagaaataacgacataattatgcactattaaccatacaaattaaactcattaattaggcttaagagtagtttttcacattactataagtacttataaacaaattatataacacctcacacacaagaactaaattaaagatattttaagtagaaactatatataaatcacattaatactctataattaaatgtacacgactgggttttgtggtatgattaattataagatgatgggatattgtaataaaataaaaatattaaagttttaaggagaaaatttatcatgggatattgtaacctaggagaagatattaaagatatttgtataattaaaataaaatttataagattttccaaatataattaatttgaattagattgggttttcaagttaatttggtattttttaaatttagatatattagcaaaatataaaaactaactatttattattgggtaacacctttagctagttatttttaagtctttcatagctaatttatattttaaattaagtggtaaaattt

SEQ ID NO: 267128 - DNA, 1018 bp, Cannabis indica
tttaaccaaagttgaaggatatatggccatacatttctctttggtgaagtttcccctttaggttatgggatgttccatttgatgtgacctcatgagggaaggtcaacttaggctattttaactgacccgtatggcacctgtctagtgacaggtgtttcctatgctaatctagtgacaggtctttcctaagctaatcttgaggtgtataactagtagactgcatatgtagttttttttttcgttcgaagctaatctttgtcgtgtcctttttacagttggagagagagagaggtatgagcttttcctttgagtataccatttagtaccttttgcatgtcagccactgttgtctccaaccttcggttcttccaacaaaggaattttatcccctcttcatagcagtgaggtcgggatcttaaactcactgagtgaacactttcttttccatgtctatgcatcgaggtgcttgagtcttgtgtaactagtggaggcaggtactttattgaagattttcatctaggatgttgggtattgccatcaatggggttattcagtggtcgaaagtggtatatttcttcttatgttatggttgtccatgtagacctcaatgtcatggagactttgaaaatacctcaacatactggaatgattgtcaatcacttgggaaaaatgaaattttgaactctcgtttttgcagatggagccaaactgtcgatggtaagaactcatcaaggaaggtcaaaaaccttgtatagtgaatgatagagatgaagaaaagagataaacgcttagaagaaattgagcttgtttgtagtgcaacaactgtactgataattcatgtgctattacacaaagtttccaacccatttgaatgaggggtgggaacctttttatagatgagctataatggctcgtattacatagagtcccaaggggacaacgtagtactaggtacacctgcaagtcatgtgctgtaaagtagtagttgttgtgatattttgcacacgcaagtgtacgt

SEQ ID NO: 267129 - DNA, 665 bp, Cannabis indica
cgactccttgatgtattgcccttgatgtgtttttttcgattatggtctctcacaacatcaattcctatccaagaacaattcttaagatacttgtcttgtaacactaacattatcatatatggtagaatatggttgttgaaaagtaaagattttcacaaatatactacatctaaatataattgaataatgttgttttctagtctcatatcattatcatatatggtagaatattgttgttagataataatctcttagaagaggaagttggtcgatcgatagatctagcaagttgacatagacttctctacaaaagtcgtcttcacaaaattatgatcagtacttgatttttttaatcaaactattttattattattagtggactactcacttgaactccctaatggtttctgattttctttttttttcattatataacaatttaaagtgtttgtgaaatgtaatcgtggaagtcactaatcaataacttaattttatttgacactcaaacttaagttaatgctactaccaataactcaattaaaatttcatcaaaccttatcagaattgaaaacataactaattttcaacttcaatatttcacacttatcatgatagaataaccttttgttttttatttcttctttttgtttttaacaaagcttaat

SEQ ID NO: 267130 - DNA, 1099 bp, Cannabis indica
agaaactttggttacctcaaattctcctactagaaccccataactgttgagtcggtaaccttttccccttgcgatcattagggtccataccctttacccgatccaatattggacctttactttcatgaatctctcttcatattatttcttttgtgatccagttcttgcacccttagcagtaaaggtcagcttaacctcctaagcataaagccagacaactcctagttttagccaatatctacattctgaacaatatactcgttccaccataaagcctttcctagtggccctattagctgcttcatcaaaacaaaacttgccaatcggtctaacttagtatcattctccatcattgcgctgctcgaaatcaatcgtgtaagttttactaccttgtcactcaattaatcccttactttatagcatacatttgctcccagtcttgtagtaataaaagattcatacccacactacaaacttcgagcctggtaaggtcgcaattattcttgctagattgccctaggtacattttttagtacacttgcgactatttctttctcatagttaaaatctttctaactagaattaatgctaatgagcattaccgcacatgcataggcatacttagcaactttatatcataaacttatcatgcttctctaacaactttacacatatcaaataagaagacaattcaaacaattagtaaataaaccactgatcaactaacaatcaacacttactaagccatgagtcaaatgagtcttcgcagtcaatgtacatatcaagccagtcttcaggatctttaaaccttagtcgctctaatacaatgttgtaacgccctgactctcacggacgccacgcgtgtgcttttataatcttattgtcattaatctattagtttaggaaaagtgtggtttaattaaaatctttaattaaatttaaaatagaaactttaacttaattcaaaatactgccgtaatatggggatcccctgatggtaaaattcttttacaacaaattttaaaaccgttaatacaagagtaggttatacatccaatcataggaaaaaggggtgatcctgcttcctggaagccaagac

SEQ ID NO: 267131 - DNA, 524 bp, Cannabis indica
taggagagttcaggccgagtaattagcaagtattgtaatgcccccacaatcgacctataaagctgaggattgtcaaatggttcatgaccatgagcagatagttttaaaccacttaccatgggagttggcagaggcttagcatcctccatttgagctttaataagaaggtcacgaatatactttgactgagataagtgcaacccgtgaggtgtggtctgaacttcaatacccagaaaatatgttagattgccaagatccttgagagaaaactgagaattcagagagttgatgatggtggttatgagagtggagtcactgccggtgatgactatatcatctacataaaccaagatgaatgtagtagaggaggatgtgtgtaaaatgaacaaagacctgtcagattttgaggatgtaaacccaagagcaagaagactggtgtgtaacttgtcaaaccaagcccgtggagcctgtttgagcccatacaaggccttgtgaagcttgcacacaaggtgaggagcatcagg

SEQ ID NO: 267132 - DNA, 1722 bp, Cannabis indica
ataactgatcagttttaaaccgttttacaataaatgatagtattaaagcagaataaacgtttaaagaataaatgaagaacattttaattcgttcttgtattaagtgcagcaatgtatgcgacttgttaagcgcgagttgcctgttcatatccttgcacaagctcgcaggctttaggtgtgttttgtattcacaatggcctatgggcctatgtttggatctctgtgttcacctttgatggcatagacggacatctcatgtgttgacaacgtgaaacgtgcaagtccctaatgagccatcgaacatattagtcatttggactaatccttgtgtaaagaagcgatctttactagtcgcaggagaggtctacttgttcatcgcatgtaatcggtatatacacgaccaatatcaaacctcatggtcctgcttatgtctttgactatacgaggcatagtatgcgactagaccatgtcatggtcgcatcatctcgcgagtttagatcaagtgaggctaactttatgggagttattaattaacatgtcatcttttcggaaattgaatccgtgtgtcaattttatatgagactactctgtatttctaggtgagaaattcccactataacacatgtccctagttttgcgagtgacaactgtgtcatatagggaaactattagagaggcaggcgagttattgtcacgagatggtaatttttagttgtcttgtcgagggttttcaaaagacggctacatttattatttttattttcccaagatgccatgtcatcaaaattttcaagtgtgtgtaggcatgatcttaagtaatcgttggattgggtggcctttggtatttacctggcacgtgtctatatcccaacaaatattaatgatttgtatttaactctctcaaatgcaaaatcgatcacacttcatttccctaccattttcacttttttgaagttttctctcttctaaaaaacttttggttttaaaaatcttcaagattttgaattcttttttctagaaattttttcagaaatttttagagtgacaatcgaattcaaaagaattaacatcatatgaaaggttgttgtttccttcataacttctctataatctattttctttgaatattcgcatacctcctaggtatttagggggtagaagttgtatgaaaaaaataggatatgttgtggaagatgaaattttgagtgaagtaaggctaaatatggaattttctggaaaatccctacctgtaacttgaatattcgcatcttccttgtgatgaactttaaatatttgcactttttttcattagagcctctttgcatacttgcatacttagtttgaactgtctccaaattgagattgccagtggttgggtgtatcacagagatttaatgcttatttctctttataacccttaggtcactatgatacacccaaccactttgttctattctggaggttgttctcttattatatattattattattattattattattattattattattattatatattgagtcgcgatttagaactaactaagctttgaagtggtatggtgtttctcagtaacttaatgttcatattgatgcatgattctttagacactgagatacactcaaccactttttgaggctcaagtgttagttttgttgtttttgttgaatataaaatctgttgttcgggtgacgacactcctcttttaaatcgcactc

SEQ ID NO: 267133 - DNA, 779 bp, Cannabis indica
caggttgggacagcaggaaacgacacgaaaacaccaaacgacatgaactgctgggaaagaccagaagacatggattacaagagaccggtttcttattgcgatatttcaaaggcatcagatctagctggagaaatggtggcggccctatcagcagcatcattagtgttcaaacaagaggaggtggtctactcagaaaaattggtccaaacagctgagaagttgtttgaattaatattggagagtaccactaaaaaggacgatgaatattgtagtggaatagaggcaaggaaattctataactcatctggatatttagatgagcttgtatgggcttccacttggctgttctttgctactggcaacacttctcatcttcaatatgccacacaaatgtttacttctgtaacaagtaataataatgatgatgatgatgatgatcacaccacttctgaccaaggcttcttctattggaacaacaagcttattgcttctgcagtacgtacttctctctctctcttcttaccaaggctttttctgtactgttatgatgatgatgatgattattccaatattggtacattctaattaggggtgtaaatccatctaacccaaccgatcaatctaatcgattgcaaaacattgaatattcaattgtgatcggatcagattgaatattatttttaaatatccaattcgattggattgaatgttgaatattgtgtttaatattcaataaaaataattaatatttttatttagtgtgacagtcagtagttccg

SEQ ID NO: 267134 - DNA, 1471 bp, Cannabis indica
catgtgtgtgcttttataaattagtttataataataaattaacggtttaagtaaattttttaatttaattaaaaaaaaattgaaatataaatctcttggcataactctttaagtttggagatcccctttaaaatattaccaaagatgccattatattgtttcaacaaattaaactttaaaatttagaacattgtaaaatataaacttggacaactcgcctctactttccggatcgactgatatgtacatttgttggagaagatctctgactcatggctgaccaaatatattctaatctttacctgcaccacatagcacctgtgagtcacaaagactcatcaagaaaagtaaaacagcatacatttaaatttaatataatctacataatcatgaaactttaatcaaatactagttattcataaaaaccatgctcatagcagacaactaactcaaattaccttaagtatacaaatatctaatattatacatgcacttgccttaaacgacatgctatgatcattaacttataaagtaaccattttctatcattgcctaataaagaaatcatgataagtctaaccaggcatccattgtcactatcgttacctaatgagacaaccaataattaagaaacctaacattagtttcagtacaaattaatgactctttctttcaaatcagtaattaccgtatcatatatttgataatttacagaattttttctctcaaaatttacttgaacaactcaggatacaatttgttaggctaaaattagtctaagtttcgggtcgtattttcagttagttttcactctttgtttcttgttttaggtctattttacgcttgattcttttgtttcaggtcctcgggtgtttaaagaaagtatttacaagaattgaggacaagttgtgaaagaattgaaaagaaaaacgaacaaacattttgctgcctaatcccgtcgcgacgggacaataccgcgacgaggattggcatagagttttagaaaattctacttaagcctccgtcgcgacgggcaaatatcctgtcgcgatggggacccagtgacgggatttttggacagtttcgtaatttcacgaattttaaagatgagacttggtttaaatagagggagttcgtgaaaattagggttcattcagatttggagccctagaaacaaaggaggaggctagaagagcggcttgtggcgacccggatcaattgcttcaactagttctcttctctttaatttttctatgctattttctgtttcaattttaattatggatttgattatggatgttatgaactaaactcctatttagggaggatgatgactgttgtttttagttttacctagttaatgaataattgccattccttcaatcttgatttgtgaaattatctatatttgtgtttaattccatgtgtaagcttgatcaccttctacatgttctatgatctcaattcaaaa

SEQ ID NO: 267135 - DNA, 1315 bp, Cannabis indica
ttatttgctcatttttttttattattttcatgtcttactttaataaaaaaaatcaaaaaaatttaaaaaggaaagtgtttttttttctttctatgaaggatggtttcttgtaaggttagttaacactttgagtttttagcccttgagataaacaaaaagagagagtagtaaattttaatttttagtttgtatgttcaaactatagactcttttttcagggggatttgagtttggtttatgtgttaaacttttgttagagttagcattgtattttgtgttaatggtggtgccattcagggggattgagtttgctaactttgttttgtaggcatttaaaaattaacgaatattttgattatctaaagtgccaaagggggagattgttaagtcatttttttggcaatttagttgtcaaaatattgtttaatttatttgtgaattaaatagtattttattgtgctaatttcgtggctatggttgtctttttttcttttaggaaactttttttatagctaatctttttcttttaggaaacttctcatataagagaaggaattctctttatggaaagtttttctaaatttggaagaattgacttttctcttttgctagttgttaatttcagtttggctacgtgtatagcagatcatataatctttatatgataggaattaaagtctaaatcatgatcttgaacttatttggaaagtttccttgtttgacactgatttgccattgcatagtgcgattttggtgctgcaaatcaaggcattttttaggaaagttttgtaaagttgtgtaaacgtgtttgtggctatctttatggtttctatgttctataaataagacctagagaacagtcaaaggtttctctccacttctaggttcatttttatattttcatctttgtgaggagagagtttcttctgtgaaaacctagagtgttcagctaggttttagtctttgtttattgtttttataccgttcttagaataggttgaagaacttcattgaataagagaaggatcttcgagagaagacttgtgaaagcgttacttcaggaggaagtaagcactcacacatcaattgcatttagaaatcaaattggcaaagtaaatcacaaaagagtgtggcaaggctttagagggaatctaaacttaattaattcaattgtattttgtgattgtttgagactttactaattgattatattctctgagtgtgaccctgtgaattaggagtgtttgaagaacactaataccacgtataattatcttgtgtcaagtttttatattctgcactattatttttattt

SEQ ID NO: 267136 - DNA, 1217 bp, Cannabis indica
acttattctacagtgcatcatccgaagacaatccggagttcattttagaaacataacctatgttgccttcacaacctcgtggtaagaagaccacaacaagaactaactcaactagagtccatgatcgactggaagttcaaaatacttgcatgtcactctcaccaaaagacggttggtggaagtagaagcttttaaagaagacctgatcgggtaatagaatttccaactgggacgcaaaccaccatccatggtgtcaattggacagagtttgacaacctagcaaccctagtgaatgtaatcacaaccccaaagttgtcagggtttgaacttgatagagagcgacgatcaccactctctgaccaaatcaaagctccattaatccctctaaagttcatgaaccattcctagcatcaatacactgggaaggaagatttttttatctcacatccattacttcaaagtgtagactaatctgcaaggtgtaagagatgatgtcaggtgcagaatctttgctaccactctaacgggcctagcctagtgtggtacctcaagcttcctcctagatcaatcgactcatagaagaatctagcatatgcatttggcaaccagtttactccttcaagacaatgccaaacaaagcccaacgatttggtagatgtcaagcaacaggacgatgagcccctcaaggactatattaaagggttcttagagacagtcactaagattaaaatacttagcgaggatgcaagtgtaatggaacttcagccggactcaagaaaatgagtcctttgtggtttgaccttcgtctcaagttagtcttgtaataccctaagggcccgtttggtacgcaggattggactggactggacaagatgggattatggtgaaaggaatcctatgtttggtttaagaatagactagactattttatttattttcttttaggaaaagaaaaacttaagttaaaataaaaataaataataataaattaaaattaaaatatataataataaataaatcaaaatgaataaatcacagcaaaaaaataaaatataaaaaataattaaattataaattataaaataaaacaaaataatactataaaataaagtatatatcataaatgtataataaaatattttatcatattttttatttaataaataatcaaaatagttaaataaattacttgaataatataaaattatttatcttaa

SEQ ID NO: 267137 - DNA, 571 bp, Cannabis indica
tgtgtttatttgatgactacttggtgtttatgaaatttttacataaaattattggattcatgatctagaattatttttttgggatagtatgaaaaaaataaagcaaatcattttcaaatagaaccgaatttttattttatttgaattagttatgattttttaaaaattagaaaaaaaatcagggtggaggtcacctacttacgcatgcagacgctgagtgtcactcgatcaacacatgtgtaaggacaacatttgtctgaggaagctcgcccacaaccttgtctaaaaggcccttacgtgcatgaaaattctgccagcaacctcaaacactagcaaatctcggtcagcatccatcactgcctgcacagatatcatgcattgcataccatctacaccaaattttttttatttttttttcatgcaactaattttgaattttttgtgtaattttgtatgtaaattttttatttttcaaattttaaatctaattatcaaatcataacaaattaagttttttttaattaattttagatattagtagattttgaacctaaaaagctataatatctat

SEQ ID NO: 267138 - DNA, 583 bp, Cannabis indica
aaacggcacttttatttttaaagctaacaaatttttgaagtgtgattatttacttagtgtaattattatgcatcgaattctacataatttgatttattagttattataaaatatcgctaactgtacttataacggtactccattcatatgaagttacactttaagatacttaataacaatactcaagaaaccatgcaataaataaagtttgatctttattcataaataaaaaatatatatagaaatttttttctataggatctctcaaaaaggccctattagtggggatgtctgatatcgagtgatattatattgcgacacttggacaactttagattgagaagtacttataatttattttctcttagactatttttgcatgttttagagaattaagatctccagttaaaaagtgttctataatgtgttaaatcaattaaaatttaacactttaattaaaaacctttaataaagtcaaaaaaaagtagttaaatatacataatataaattagattagttgatatgccaaattttaataggtttaatacagtatgtgacaaattttaatagtataagaaatatt

SEQ ID NO: 267139 - DNA, 1300 bp, Cannabis indica
agatgaaccaaaacatacacaaatgaatgaaaaatacttctgttattttattgatattgaataatctggattacattgaaatagaattttatttagggcataaaacccaacagtattggcatactttgtttacacagtaagcaagttcaggccgagttattgttgcatattgaagtcccccaacaatggacctgtatagagtagggtcttccataggctcacttccatagcgggacagattaaggccactgttcattggagtactttgagtgttcacattctgcatttcagcttagcagagtaaatcttgtagatacttggtctgagtgagtaataggccgtcagatgtgtgaagggtctgaatgccaagaaaataatcaagctcaccaagatctttgagagcaaaagtgttgttgagatctgttataagagtatgcactatgttatcattgttgctcataaccaagatgtcatctacataaacaataatgtagatacatgttgttgaggtgattttgataaaaagagaagtgtttgcaggtgatgaatgaaacccaagattgattaacacaattgagagcttgtcaaaccaagctcgaggagcttgtttcaagccatatatagctttgttaagcttgcatacatattcaggatgagtggtactaacaaaacccggaggctgctgcatgtatatttcttctttgaggtcaccatttaagaatgcattgttgacatccaattgccgaattgcccatccttttgttatggcaatggtgagaacaactctgatagtgattggcttaaccactggactgaaggtttcagagtaatcaaacccaacttgctgatgaaaaccttttgcaacgagtcgagctttgaacctctcaaccgagccatccttgttgtgtttaactatgagaacccatttgtagccaatcggttgtctgtttggtggaagtcttaccaagatccaagtgttgttctttttaagagcatgaaattcattattcatagcattattccattttggaattttgagagcaacttgtactgttcttggctcacacgaggctatcagggcttttggttttctaattcctgcctttagtctggttatcatgggatgagatgttacagtggtgctagtagcagttgtaggctgatttggaggattgttggaagtgttggaaataacagtttcaacaccagcaacagtgggaacaccagatgcaacagtaaaaggaactggttctgtctctgtaaggcaaggaagattagttgtacattgcacagggatatc

SEQ ID NO: 267140 - DNA, 594 bp, Cannabis indica
tacatgcatatatatatataaatgtacggttgatatatatatttatcgtataaggctcacatcacatgcatgcaatattctccaatgtgttatcgtatcaaaccaatattggattattatgttatatatatactataacttattatacttgtatatttatttttatattatatgttatatatatatttattgtagtgtataattgtatggtatactctcgaacgaacgccgcccacatactacgtacttatgtaataattaatatcatgtagatgtatatatttgtcataaaattataacaatatatattgcataatttattatatatagttatatacgatatatattatattcatccgattatattatatgtatacacatttaatcattttaatatatatttatatgttacaagatgtggtaggtaggccagcccaaatattttgggggccttgtgtaaaatattaaaattaggctctttaaaaaaaaatcatgtacattaaaattataattctattaccaacatttttttttaagattcgttcataaattttcaattataaattttttatttatgtatatataataggaaaa

SEQ ID NO: 267141 - DNA, 828 bp, Cannabis indica
cgagctgcacaacaagtttaaaatcacgttaacacgcctaggctagttagggtgttacagaactatagtgtgcaaactacacaaatttatctacgatctcaagcaatcatccagataatggtacagaaagttatctgatactcttattcttcaaggcttcacccaatcgcaagcagactacacattgtttaccaaaggatctaacaataatttaattgctctttttgtgtatgtcgacaacatcatagtcaaaggccctagtcagccgcttctccactaattacaagactcattacacactcatttcaaactcaaagctctcggactcttaaaatattttttgaattttaaaattgctcaagcacaagaaagactctttctgtctcaacaaaaatacactctaactgctagaagatataggatatattggaagcaaacttgctaagacaccaatggaccctcgcattaagttagatgatcaacaaggaacccatcttgaggatccgtcctcatatcgacaactcattcacctactatatcttacactatttaagcgagatattacatgagtgatcaacaatctcagccagttcatgtcgcaacctcgcactccacatatgtaagcaatacattatttgtttcaatatttaaaaggcagcccagcccaggggcttattttatactcgaccaaatcttctctgcatctccagagttttcagattttgactaggcctcatgtcttattactaggtgcttcaccactagattttgtatcttcttagtcgactatctcatttcatggcgtacgaagataaaaccacaaaagct

SEQ ID NO: 267142 - DNA, 1434 bp, Cannabis indica
tttcgtgaaaaataattgaatagagtgaagggagtatgaccaatgactctattttatgtagtgcgaaagtgaatagagttttcatactcatggtaatcccttaggcttttctagcctatctgatagcaatactaactccgagactaaggcttgttaatgcctgaaccacgtaaaaactctgagtgtcttcttcgtatttgattcgtttaattgtattttctttagcactaatatcaaataatttattctttgaaaatcttgataaagatttttgtgcttccattgagaactaaagaatgcaatgataccatccaagattacattcagtaattgtttactgtgattttcagaaaataaataagagcttaagaaataaatgaagaaataaataaaatagacattattttacgtggttcagacgttaatgatccctagtccacgagtcagtatattagtcttagaaggcttgtataatgtattacagtggtgttcgtagtggaaaacccttactcaattctcttgaagaagaagaaagcttaaagaaatttagatagagttttggctattactttttctgtcaaccttttacgtggaaaaagggtatttataggcttcttgaccttaaaaagtgatcaatttttagcgaggttgtgtggatctgatgcttgcaatgtatttgcacaaataagaataaaaatcaataaaacaaatttgttatagaggattggcccccttgtgatagcgggcaatgacctactccccttttgttatatttctactaagggaaatactacccagatcactatagattggatctgctatagcacccttacgattaaaaggtatgaatcagtaatggaaaagcacgagtgtttaattgtagctaaggtaggcaagtgagagaggaagtgagcatgggagagagtttgtcagacacttagagcttggatgcaggtttcagacttagatgcaacttaggtttctaggctaaggttaaggcctttatataggaggcctaaaaccctaggttatagcttcaatcccttaatacttgcatagtttgatagatatttacaaaagacaaaagttccctagattctatatattattcagccattctgttgggcttttagggcccaatttggagcccatttgttgctatccacgtgtagaagtgtcttgaaaagcctgcagtgcatgtcttagttggtcaggcccctgtgcaggccatgttgggcggccattgagcaaacccaaagctggccgaccacagggccgacaaggtgtggctggccagctcttaagaggaagctggtctatcacttgatgcccattttagtgttagggtcttcgtttgtttaggtgctgacttggccttcctatttggaagttgtattgccacatggcactgattttgtccatgtaagcatgcca

SEQ ID NO: 267143 - DNA, 3444 bp, Cannabis indica
aggagacattattccgctgcatcaatgtaaggttttcttaactttagatgtatttaattatcgttttagaaagttcatatttagggtgttaaacaacatacttgtgagtaggtctaagatcctggtaaataaattccaacaaatacaagcatggaacaaagtagaattgcagtctccattttctatccaagctattttagctttctgctgcaagaaagaagagtaatctttctgaactctaataaaaaattctctagactccttctgccttatgtgtaaatcactactcagtggctgctgctgaatctgattctgcaggttgtctaggtctgatttagccttactaacaacactttgtaagtccgagaacccctccttattaatctccttgagtttggccttaaaatgcttcattttggtaatcccctgaaacattttagacccttttattgtcaaagtccatacctccttcaagcgggtttcaaatttagggcgtgtcttccacattcgaaaatatttgaaaggcttttttccactcaccaaaccaggatgtagagttagaagaccaagagaatgatcaaagagaccttcattaaggaacactgcttcagcaaactcaaaactattaatccaagattgattggccaaaaatcctatcaatcttggagaatattctatcttcaccaggttgcgttttagtccatgtgaaaaaattaccactagctttgacatcctccaaattacaagtgttgacacactgcaggaagtcagaatcaggataagattttactctttgaccaatcctctcttccttagcaaggatatcattgaagtctcccatgagtaaccagttgtctacagtagctaaatcacataagtctttccataaaagcttcctttcaagtcgattattagaagcataaatcacagttacaaaactgttaaagccatcaactgttgatatctttaaatgcattaattgactagtgcatttaataatatcaacagtaaatctccaacgattccaggcaataacaatttttccccctggatgccaagctatgttaaaagagaaacaccatccttcaaatacattcgagtacaaggtcccaagttttggggccttgactctagtctcaagaagaccaaaaaaattaacattttgaacatgaataatttgctttattagatgttgtttatgttgattgttggctcctcaaacattccaacatagcaacttatccatttgagagagagggctctcccccctgtcttggccccttcctttgataagttctcaactgcttcaatgactaattcctcaagcaggtggaaagaattccttacatctgtaacagcctttgctgaagtattaaccactatttgatcttttctatctagtttcttgatccttgtcaccttcacaaatccctcctcaaacttgtttcctattatcatgtttaacaatccactcttgtttcccattagtgtgcttcttacattctgcagcaagatggcctaaaccagagcaatgagaacacgctactggtttccattcatatttcacacccactattgtgtttgaaccaaactcaatctcaaattccagcaagtttggaaattcctgatccatcaacacctcaactaggaccctagggtagttcaacctctctctttccctagtaactgaatccaccataaccggttttcctcactggccaaacgatcttgaacaaagacctatagccccaatacttcaattctagctcctccaattgaacccaaattggcacacacttcacatcttcttttttaaagttcacattgggatcccaaggcttcattataactagtcgtctattaaagaatatatagcctccattcagtatttggtccctgtattcaagagagctaaatcgaatgataaaaattccatatgaaaacatcttcactcgatctatcttgtctttctatattctattgacaaaaccttcaagaatgtgcaaaggaaggtttgctcccaagacatagcaaactatcgacgacttccaaaatgtaatttccatactcaatgtcatctaaggtaatcctcaccttgctattttcaagctcagatttcttaaaagagtaatctaggttacaaacaatagatccagatcttaatatcagaggggtcggaaccttaccttgagcaatttcactattacattgctcattagctttgaggaaatgcacaaaatcgttcctgacgtcctcttgtttctgaattgcttccagtgaagatttgcgagataaaggaggttggaaaacatccataagagcgggatcatcttccttcagaacctccttgtccgacatctccaaggggttaatttcaacaagttcatcgaccaaagttgcttgaattgtatcagatcctaatttctcacccttcttcttggtaatcttggtagcagatctagatttcccatgagtttttgacctttttttagccatatatggcaccagctttctcagctgcaagagcaagaacccacaggagaatcttctaccgccttatacttctcatatatatatatattgatgtttggaaggatttttgtgaaggaaaaaaagggtaaatattattttgaatcctgtgttttaacaaaagttactaattggaccatctgttttgttaaatgataaaatggaccctgtattttccaaatggtacaaataggaccctgaactgaatttttgtcaaaataaaatttaataataatctgatttaaaggtattatgacaaaactatttatattttctgtatctgttcgtgttaggaattgtcttcaagttggttatattaaaaaaaagttgtcaaaaattaagctcatggtgtatttttaccattttggaaaatacatggtccattttgtcatttaacaaaacagagagtccaatcagcaacttttgcaaatcacatcgtccaaaataatctttaccttaaaaagaagtagcaaaagtgtagggaaaaattgtaaaaataataaaataataaattctcatatttaataaaaaaaaatattgaaaaacacttaattcaacaaaaattttcacattaagcttaaaaaattgattcaaaattatgttttatacatgcatttttatgtatatacataaatttacaaatataactcttaaattgcaatcaaaagagttccgtggaagaaaaaatcataacctttttctaaaagccataactttttcttttttctctcaatcatttcatattataaatatatatagattttattattaaaaaaagcggcatttgttttttttttaaaaaaagcttaaaataaaattattaattaatataattaataataataaaatgtttaaaaaaatatgagaaaataaataaatatttataaacttaataaaaaattaaaaaagagagaa

SEQ ID NO: 267144 - DNA, 2868 bp, Cannabis indica
ttgcacaaagcgcaacacttacactagaggaaagatccttatttcaactagcgctaactcttcacttagagaattcttggctataatatgagcaataatatttgtttctctataagtaaatcggaacctcacattacaattacttgggatactcctattgtcgcttctaaaactatattcgctatttttagagtaatgccacatcaatgtatcttgcatcttagactcttcacacctagaattgtcacttttaaaaattctcttaataaaatctttgtcccattggccatatactagtttgagattaataactttaagacccttcggtaagtgaggtttatcatataatttggtcttaggtcttagaagccaggcatcttccaatatatcaatctcattcccatcaccaatcctccaccttatgcctttcaagagtccttttgataatagggataatgataaggacatacatttattagtgctgaccctggttgaaaaaaaaaatttataatccatacttttgaatagtggcagttgagtaggttccatgaaaacatcttgaaattcaagtaaaatttctctcccctcactaggtaacttcgcatctagttgaaaattttgaggcagagatggatcatcattattgttacagcagtaatacaatacatttctcgaacatctccttcttgaagcaaggcatgaaattgagaaaaagtcaattgatgtgctgccgcatctgaagacccttcaagcttaactgaatttccctgccactgacatttcatggtaagagccttgtgatcatgtaaacaaggaccaagagtacgaaaccattgcattcccaacactatattaaacccccaaataggaagcacatatagatcaactgaaaataggtgaccctgtaaacacagctcaatattatgacatagtttagaacaaagtagtgaattatcattgctcatataaaccttgaagcactttgtatcctcactaacgagtagctaaagattcttgaataaaattattgttgctgtcgatatcaatgaggacttccacggtttcctttccatgagtggcgtgtaatctaaaaattctggggttaatagaattggacagagcattcaaactcacttcatcaacattcgtatcatccaactctcctttatcagattcctcaatcgaagcgacttcatcctcttcatcctcatccgtgccacacaaaattaatacatgattcttgcatttgtgaccaaaactatacttcttatcacaagtaaaatacacgccacgctcatgcatctctcgaatctcagcaagagttaattcttagctagcaatggagaggaacctgctttgaaggatttcagactcgtcacgttcgctgtagctgagccataggccaacaaattcatagaatttgatatttgagattaagagtaagtagcgagcgagaagaccacccgaaacggacaccatcacctttagaactgtaatgaccgcctaagtttaatatattagattattaaataattagggtttaattgtgaaattgaattattaattatgatttgtataattatctagatttatttaacttcaacatgtattaattatgctatatatgtgaattcctcagttttttgtgattatgctcggttgtagtggaaggcgacgttaggccattagagagtcatgttttatatggtttggaatttttttagtaatagggcaatatgtgtgacttgtttgtattgggtattgacgggttttggaaataaccaaactacccttggttgtttttaacttttgaactttgactaggggcattatggtctttttggttaattaatattttctttttcttaccttagtggagctgatgtaaataaattagataaataataagctatagtcaatataattagttgtaacttaggaatctagaaaatacctcatcctctcctacaactctttctctctctcaattattcaagttgacagctagggtttggtgtggtttggctcatttcaggaatttcttataggatttgagtgctttggtttaaggtatcatcctctagcttctttatcttttctttctcttaagcttaaattaagtttaatgtgtaacttttggtatatttggttgctgagttggatattggtgtttgattttgtgtataaaggtattattggagttgtttatgctattttgggttggaattgttggttgtagtgaggtgtgagcaaggtttgagattctgtgtttattgatgaggtttattacttgaatttgatttattatagtgtacacagatattttggaaggtattattgaatctggggttatattatggtgttaggatcgattttaggtttcccagtgctgaactggttgaccagttcaaggggacctgtaacaaccggtcgattggttggtccctaaggaaccggacttccagttgagaactggactgccagtttttttaaaaaccctagttttccccatttttgtgttatatttggggtattgccatgttattcatcaatagggatattcctagtttagattttaagtccccggaaagtattttagcgtgtctctcactagagttataaatgttgtgatttagggccctgtgaaacgttgagctacaattctacttaagctgaccggcacacctgagcacgtaaacgaggtaagatagcataaagtatatgtatgtgaataaatgtatattattatatgtttacactactagccccgtaaaatgtgtgttataagggtattagtacagtgtagggttttagggtagttacagtgttaccaacacgagtacgtgggggtacgtcatgcatgtggta

SEQ ID NO: 267145 - DNA, 812 bp, Cannabis indica
cattagctactcttcctagtagcaatacttctaacaaaaacagatgggcaactagaatataggcagcattgaagctgctcttatgttacttcaaaagaacaaagtaatacatattttattagactttttttttttttacttattttaaaataattttttatttttacggaattttacataaaaatctcatagtaactaacgaagcaacttaaatcacaatcaaaattcatgtaacaagccacttaaaaacctaaaccatattatacattatacatatttatataacaaagggctttgtttctttctttgttgaatttataaagcttgaaattcaaatcctacctttttcttttttcttttgttgataaaatcctataatattatgacatcatatttaaggattaggagagagaggagtgtgtgtgagggtgggttgagtaataatgaaaaaagggtagagaggatagggataggagagtttgttggtttaggtttgaaactttttaaggtcagagacagtgtgccatgcccataagtaccataaaacgtacacccaagacaggaaacaggacacgtttcactttcttattggatagtcagactgattactgttagattccccagactcgaactgaaagaaatgcagccttttgtggaaacgaccttatcacaactcactccaccacaaataattacttattcacacatacctcacactttcacacccaattcactttttgaattttttattgtgagcttcacttctccaaaaatagttttactaatgaaataagggattttttcagttttaa

SEQ ID NO: 267146 - DNA, 1831 bp, Cannabis indica
gaatacaaaagagcttgtaaattagcctaaaaaaattactcttaaaaatagtacaaccaaagaaaaatcgagagtgtctagccaaaatatgtgccactcaatttcttgattgcctaataaaacgaaaatcaacattttgtaaagagaaaataatcaaaccaaaaatagagttcatagcttgattacaacgaatgccctgtatagtgagcatactatctgtttcaatctctacattctgccattgttgattcttaacccaaccaagagcttctttgattcctataacatcaaccacttcagcaacataatctcctccttgataacaagttttagcttcaataatgcttgaactacctcaagctaccataccaaagccatgaagaattttctttctaaaataaggttgcaacaacattgttctagatgtggtttacttatggtctagtccaataatgcttgtaaggaacaaagatgataagcgagatttgtcctgagcttttcgccaatgatcaaggaaaacacaagctaatgcaataacctcatcctttgtaggtattatttttcttccatacgacatcatttctggctttccaaactgcccaacacaacgtgacagttcaactaacaaaatcatcattaaaagacttcataatattctccaaccaaccatccaccaaaagaaggcaaggggttgtatcataagttataccaaaagtggtccaacaagagtgagcaaaatcacaagcaagcatagcatgtattatcgtttgaacatgagaatgacacaggggacaaactgagaaaattttcacatgctttgttactaactgcagacaagtcgatagataattagagatgacaggctaaatgaaatttttgacttcgggatgaattttcaaatgccaaagcctacgccaaaacccagaattgttgctgtctaggcaaaattcttttggaattgaagcaagagataagcatttcgaacaaagaacatacctatccgatctcgagaacaacaccataaatcgctgcagttgaaaagctcaaaaggatgcccaaaatcaaagtagcatcatggacagagaacatatattgagtgacatcaagatcccaattgtggttatcaatggagaacaaagagtttacagttttattgaccaaactagggttagtggtggtgacatactctgaatttggtagccaaggatgagagagaatactagtagtaactccattgccaatagtataacaatcccaaacagaccagaagttgagcattccaaatgttatgccaaacaaagcttggattatgaccaagttcagtcaaaagaaagtcagagtaaggaaaatacttgtctttgaaaacttctcccgctaaagaatcaggctttcataatagacgtcaaccttactttactaacattgcaatgttaaaatcatgtaaatgacgaaagcccataacaccattaacttttggggcagccattcttttccaagacatccatataataccatttcctttgttagaatttgtcttccacaaaaaactggccattaacttctcaatatcattacaagtgcctataagtaagagaaacatgctcatagcataagtaggattgaataatggttttgagaaggattgatttactagcataatgatttattctcctccatccatctcgcagtatacatgctctttgtaatgactcgtctcgtctttacatatctttgtatttcttattaggacgcatttatcctgtatcgcctcgcattgtacggtagcgagacgacccatgcaaaaaacatgattgtacactctgttgggttt

SEQ ID NO: 267147 - DNA, 960 bp, Cannabis indica
aaaaactcaaaaaaattaataaactgccattatcatggtcgcgacaagacctatgatagtcgcgaccattaggtttaaaaacccaaaaaacttgttttcagcaaagaaaattatgcccaaaacacatcagaacccaaacaaaaacttagaaccatcacataggctttaaatcattaaatagacagtctaaaacaccgtttcatgcattaaacatcaacaacaaactctcaaaattcagattacacagtaatcaaaatgatgccttaattatcaagaattcaagctcataacttgagcttcaaaccaacttgattccaatatttttccagcagctcaataccaaataaaacatgaatttcaacctagaaaatcccctgaaatctcagccacaactcaacaataaaacctataacaacttcacgttattcacagtcaattctatcaagatctaacacaaattccataaacaagcatattcaagaacaccacacccttttcatgtactttttacaattaattcagtaataaacaaagattaaaaccatagaatgttacctcaaaactcaatccaagagcaagctcaagattctacaataataaagctccaaagcaagctaagattcaagcttttcaaccaaaaatcaaactcgaattcaaagagggctagagagagagagaggcgggtcgggtatgaggggaacaaaagccaaaaatactttttcattttccttaaaatttaatttttatcaaagtaaatcaataaaggtcaaaagaccaatttgcccctagggctaatgcacacataaccacacatacaagggtatttatggcatttcatgctcatctattttcaaataaaatttagattcctcactatcaaattgcattttgggcccgaacccggttcaacccgaaatacccggttgtgactgtaccgcgccaacctgtcagaacacacct

SEQ ID NO: 267148 - DNA, 723 bp, Cannabis indica
tgcattcccgggcaacttcttcttcccgatccaaatggaatgaactcgaagtctctacctatgtaatctatgttatttcccgaaaacctttctgggaaaaacttttctggctcatcccaatactcggggtctctcccaattgtccaagcgtttatgaacacacgcgagtttttaggtatgtggaaaccattgaccgtgcattcttcgatggctgcatggggaagtaacaatggtgctactggatgaagcctcagggtttcctttattaccatgtttaaataaggcaatttgtctaaatccgtttcttccaccattctttccatgcctaccgtcgtttcgagctctttttgtagttttttcattgctgttgggtgtttgatgagttgtgatattgcccattctactactgttgatgctgtatccattgaggttataagcatgtcctgcataaacatagtattggttttaaaaatatactgattttaaattacattttaatcgagaggttataactaaacagaaatacactaaaaaaattaaaacaccaaaaagtatcaaaaataacaataacaacaataaacaatcattaatattatatcataataaaattattttttgaataattataatatttatacatgtattacaatcagggtcggccctgggtataggcgggctaggcctgtgcctagggcccacctagtctaggggcccaaaaaaaaa

SEQ ID NO: 267149 - DNA, 776 bp, Cannabis indica
tctttgacgtcttttaatgattgcacttgtctactttgacatcattaattacattataatttatagttagttcattagagtatatggagttttgatgtagttacttggaaaagttctgaatacaccagaagtttcgcgtgtttatattgggtatgttattccactccctgcctagcttccatgctgtaatttcatttcacatagtttatttgtgccacaaaatttctctcccttatttccaaaatcatgtatatcttttcttatatattgcttaccaattatttacaacaaaacttatcattgtgtgcttgaacttgtatagcgcaaaaagaaatagatcactgccctatgttcaagcttctagaatgtgttgtttatgtgaattgttcacaactaaatctttatttcaaacattaactcatgagtgattttattgtctttgtagctcattcaacaacaaacctgttaaagaatcagctctaggtcctatgggccaagaactctttgaaaaagagcaagatgatctcctggcagatttggttgatatttcaaagaaggcttgtgaccgttgtaaggccttattatatttagacgtgtaagcgtaacacgaaggtctatgtcacatagacataaataagcgtgtgagcgtaacacgcgagtctgttatacaaacaaatgtgaaatggcattattatttatgtgatatgttagttatgattattgataattatactatctttctgggcttggctcacgggtgctctactgtgcaagaa

SEQ ID NO: 267150 - DNA, 2161 bp, Cannabis indica
gccttgctttttttccaatatacgtggcaactttatgattggccatgtggcagttaaggcttaagattcagaagtgtttaagaatatcttgagtaaatttatgggttgagcggatgtgttcgaagggtccctcttggagttttgattggaaccagagggaccaacgtttttgctcttctccaggagttaggtaaagtcttctcgattgggctcagggttttggagatgaactattcaaaggcattaaatgcgacatggaggaaacgtctatggacgaatataaaaagacatgttagatgcattgaacctattcttcagtgattacacttaaatagaggagattagtgatgactacataatgagctgtcacgtcaatcaaggaaggataagggcttgtctcacttaaaccctatgtaacctactatgtagacatgcataccctatccaaattttagaacttgtgcaaacctaaggcgaacacttgagataatagaagcctttttcttctctgaagaaggctataaatacccccaaccacatttgaaaggggggttggacaaatggagtagaatattctctgtaaagaaataccttcatattaaatatcagtgactcgcgaactaagactcattaatgccccaaccacgtaaaaatattggcttttactatcttttaatcattttcacagcttttataaattatttgtcaaaactctcagtcaatattttagtgctttcattgagagctttggaagactttacatataaataacaacaaaagaagattcacactacgatggtggagactagaaaccatacacgtcaacctcgtccatttcaaggtcccaaaggaccaggtgatgaagaagtagcttcgtggatagacatggaggtagaagaacaagacgaaatgaatgatgtagagtatgaagaaaaccaagaagagtatgacgcctatgatgatggcagttacacagaactaatggccttgaggcagaaagctactgatcatgaagccgagttagcaaaacaaaaggaacaaaacaggaagatgcaagaaataaaggtcgccatgcaaaaagctacgaaaatagtaggaattcacgtgcatccaaaggccatgccccttggaccagacaaaacaagagaagatcttcaccaagcactcgaaaacatagaagtcgagagccaagccctatttaatagccctcagaaggctcgccaaagatgaatcccacatctttcctcgaaagaaataagaaggctcaggattcgcaaaaagtttgctccaatttcccaaaggaaggaccgaaagagcgtatccgtacatcaggagccaggggagagagtgttgggattttatgccttaaataaaacgtatttcaatataatcttatttgttatcaataatagattagaagtcatttatgtttacatgtatttttcatgcttatggtttgacatacaatttttattaaatccagaacatatagttattcacaattatagtgatgtcaacacaatggaaggtaattgtaattatatgcttcaaaagtttatgtcccatgattcatcagtgcattggatttacattgatgtgatagtcagtgataaagtttacttacaccttggataagtgttatgtcatttccagggcattggtaaagtaagttagtatcggatgtatggagtatacattggactggaccgatattgttcttggtaaagatattataaacttacgatgatatctttctaagtcaatatcactggttgatcttagataaaaaaatcttaattctgatatagttaggtttgatctcaagagtgttatttatgtttttagagttgttctattttttaaatttcttttatttccatactaatgtattatatcatttattattttttgtcttcttcttatctttgaaatcttttttattggtaatttattttgttattagtatttcattttttttaatgtaatttttattgatttacctaatatattatattatagatctatttttgctcactttttctttttctttttagagttttattttgtttctttcctcctattttgtaaattaattataattataaatttagaaaaagataaagatttctaaatatttcaaatattttttttaatatttttt

SEQ ID NO: 267151 - DNA, 661 bp, Cannabis indica
atagaattattgtaaatcgtattgtttcgggttttccatattgtatccagtacaattgaagcgtacaaaaataattcctagacctcaactcctttttccttcaggctccataagaatttgatctaatcccacactcgggccccaggattcagcactggcatcacaccccagggggaggacctccagaggtgaaaaacaaggttgcaatagaggaaaaaatgttccattgtttcctctcccacaccacaaataggaaaagacacattctcaatatacatccttctaggaagagtagccctgataggtaaggcatttaagagaacactccattaaaggaccttgtgacactctaagattctagagttctaaagtttattccatagagcgggagcaatgttgctaggagaagcacgatccaatgcataagctagatataggaagatttagtagagaaatgaccattggattctttagtcaaaatccgcttatcactaccttgacccccaggcctaccacctttgatgatactattggttgtctctaggccaaacaagtttttgagttcggcaatatcccaattaggggtggcaaaacgtgtcatcgtgtcgtgttcgtgtcatattttatgtgacccactttatatttcgtgtcaagcgtgtcg

SEQ ID NO: 267152 - DNA, 4338 bp, Cannabis indica
ttttttttgtggtttggatggatctagtccaatccaatacataaactaaaatattggatggatttgatctgattcaaaaaatattagatgtaaaatattggataaatcaaatttaaaccaataaatatatataaaatatatccattggatatatagaattgatccaatctaacatctaatggatgtcggatcgattggatgactgaaattaattggatcggattgaatggtaaaatctaacatccaatatataattagatcggatctggataagtttaaaaatttaggatgtggtccaatgaacacccctagttctaatcatataaaatttggctctcaaaaatgtggcgagtttttttttcatattattttaataacaataataattttatcatataaatatttaataatataaaatatttgtaattaacttttcctaccaacaatatttttttcactcgttaaagtctttatagagaaatcaagatccaactaatttttgtaaaacaatcttgataatattttcccatatatttaagtagttccagtcacttccaaaaatttcactttgattgaactacttaacttactgataaaacagtaaggtgtactgcttgtaactattccaatgaaaatacctcaaaccttggtgcaacacaattatgaatcattatacatcaattttaggcaatgcataaatttttcttgtgtcactaccttagtgaccatatttgagtacaaagaaccaattgttgtaaaggcatagacaatttgaccggcacatctgaaattagaattgaggtaagactagtatgacacacatgtttatatttgccagatatatgacatatttgttagaacgatagttggtgtatatatgattacatcttaatatcgtgaatgtatgtgtttatcaattcagaaagtatgaaccaatgctatcaacactagtacgccaaattatactgagtgcatgtggtattatggttgggtatactttcaaaagcatgaactagtactaccaacactagtacgccagagtactgagtgcatgtggtattatggttggttatactttcaaaatcatgaactagtactaccaacactagtacgactagagttgtaagtgcatgtgatattatgatcaattatactatggtcaagaatgttcgagactcatttatacatatttgacatggtttatgacttgttgataggtgtatgggcgcttagtcgcaggtcagttatatttatattttatgtttttcttactgagtttgtcaactcacaaatgatatgttatgtgcaagtaaagacaaaactgttgttgaacgacaataagttttgagctggatgtagattgtacatatcaagatagttcgacctggagtgttgtatcttcgagaaagctagggctcactattttgtagtcgaggtgcgacatcttttaattatgtacagttaaaaaatgtagatacgggatctcagattttataaatgtaatacattatatgtttatttatttaagattaaattttatcgcttttgataaaccctttgattagcaaaggttgcacaataattatgaaaagtattgtagcacgcctaaactagtaaggtgttacaagatggctgttattttcataacctgataacataacaatcatcagactactttgtcagataactaaaaaataaagaaagcttctctagattttgaaatactcatctcttctttcttcttagttttgaaccctatagtgagtgagtgcttgcccacacagtcaatactcaaatatagtgtggtagattgtgaagaattccatcatctaaggagatccaggtttagatcttagtaatactctgtgatgaaaatgaacaagggttagagatctgaatgaaaggaaacattatattccgctgctaccaatgtacagttttctatagactttgtatgtgtttatttcattgttatagaaaattcatatttaggatgttagattatattcatataatcaacatacatgttagtaaatctagatcctagtaaaataggctccaacgttttatatgtcaccctacacgcgtgtagagtgggcctacacgtgtgggctatattaaggtccaaaattgatttttcaattttgccataaataagatttattatttattctacaaataaatgataatttattaattctcattaatctcttatttaacaaggattaaaatattattttctctaaaataataaatttctctctttaatattattaagagtaatattatatttaactaattaatatagttaaatactattaattatataattcataattaccataattaatcaaaataatattcacaaattactattttgctcttaagaatttcttttcgaaatcaattaattcactcaaaattcatctatgaaataaaatctttccctgtatagtgttgtatagaggtgactcggagactatagacttatatttcaaagctccaataaatccgcgattattatcaatctaattaatataataatttggtttattaattctattattactctactataaatatggaattgcactctttgacaatatagaattatatttacaaaattcttacttgtagtccattgatataatcaatataagtagttcgctctccaattattagttcataattagagttaattagttaaaataccaatttacccttctaattatctcttgattctttatgtaccattaatttactacaaacagttaatttataacttacaatagatttggatccagctgttagcactcccataattaacactataagggaactaataatcgatcggttaggaaaacttagattctactattgtataacatgtccctagccacgtactcatattattaagctcccaaaatagaagttgtaaaaatcatcttctctgagaaactttaacgagtgaatcaaagaactcaatgaacacaaataggagttcatgtatactcaggatttaggttaatctactaatgatcatcatttgatatgaataaatcttttcatggtaaatgacaagttaatgaaaaatgtttattacatattggtcaagtcatgcataatctaattatacacagtacatttactacatgtctatctatatatgtgattcgaatcaaaatcacacacacacacactagaagtatagtgtatagtaaactgtacttagctgttccatattgaagattcctagaactttaacacactaccgaattattttatttatatcgtataatcttaattctcttgcacatccttacaagattatactttctctatatgaataagaaatttttagatatttaataattatactcttataattaatatatcatgtatttaccccaatagtgggtctagtttgcacaaaacgacctagtgggtcatgggtacgctcagatctggatcctagcctataaatatccctttatatcttcatgcaagagagacaattcacttcacatctctttaggttctcttctcctctaagccaaaaaaacctaagtgagaaaatatagcaagaagttagagttgttgaacttgtaagattccattgtaatgcatcaaagcaattctgcctaatacgttgagtcgtggactaaagttaattaacacttgaatcacgtaaaatctcgagataaattgataattacctctttttattacacattcaccaaaaataattctaaaataaatttaattgaaatataccctattttataatgaactaccaaatatacccttactacaagttacgaattcctccatagcaactgaatgcacacacttcatgtgctttattccattatgaattccactaaaataataataataataataataataataataataataataataataataataataattcgtgctccattcaaataaattatgatagaaattaattgtgattatattaataaattaacagggagaagataaaggatagaatagattgaaatgtaaatggatacataatttacctaataagtatatgttatatatttaataagacatattatttattttattttagacacgttatttatttaataagctgtgttgtttattttattgtgtaataataaaggtaaaattggtatagtggctgaaaaaaagggtaaaaacgaaagatatagaaaaagagggtaaattttaaatactccaacttaaaagaggtataaagcctatttttctcaatttgtttataggtactttttctaaaggtcttgtattaataaaaatagggttattttaaaaaatatg

SEQ ID NO: 267153 - DNA, 537 bp, Cannabis indica
aaaaccccaagaaaagtcaattaaaaaaagtgagagttgagaggtacaagacaaaagtttttaatagtttagggttttacattcaaaaacgactaataaagtaacactaaaaggggtaatgcaatgcatggttgtgtggaaggaaacatatacacgtgagcctgtatttgcttcaatggtttttgccctattttcggctcataaagctttctttttttattatttatgctccaaatataaatatatatatttttatatatataaaaaagaatatgtctaaaaaaagcttcttattcaagctataattggtcccaaaataaggaagaagaacctactactatactatactcgaatatcaattatcattatttcaaaaactatatatttatattagttatgatcatcaaacgtatacccttttttcctttgaatcttttttctttttctatttattttggttcgttttggtttttagaattgaattcaaggagatttcccattccgcacccccgtttagatacctttgatttctcctgt

SEQ ID NO: 267154 - DNA, 679 bp, Cannabis indica
ttaaaaatataaaaagaagattaaaagtgaatacgcttcaatagtagataatacacaagaaacctaattctaataaatgaaggttccctgtataacattaccaaaagaaaaaactaaaacagaatcattctaagtaaactctttctcaatacattgttttgttattaatttcatccacaaaacatctctcatacaatttcagtaactccattgttagttgttcatctttctcttttaaccataaccatactgtattttgaccaaaaccaaaggctttcacagtaaatagtgggaaaaaaacaacaacaactaggcaactaccacatgatatatgaaatcattctctatctctataagaattccaagcaaattctaagcacattttcagtagcttactcaaacaggtctcattaaacaagaaacacagttaaattgaaaaggttcatttcaatacttccatcatcaaactcaattaacaggattcaatagaatgaataacgataaccataaatattatacacatttgtgtaaatttgattcaagaatcagtaagaaattacctaacattttataatctatctcgcactgtgttatacttgattaataaaacagattcggatcgtcaggctactagacgtggtggtgtgtcgctggcatgctgctactgccagtggaaagg

SEQ ID NO: 267155 - DNA, 1844 bp, Cannabis indica
acaaaccccttttcattagattagaaaaacaacccaatttttaggtcaaattatcacgagtgacacataaagaagatgatatatatacacatatatgttaccttgtcctggttttggtgaagctgtaactgtaagagtttgtttaagagaagagaagtgaacaaccccaaaagatgtttcagcaaagcatgagagaattagaagtgaagccaagagaatcccactaagtcctgccattattatttcagatacccctttttagcaaatcttaatcaccaaaagcaaaaagggattaagaaagagaaaaaagagacagatgtgatcgattctagttgatatgaaatgttagatttgtaggcttcatatatatatgtaaagcccaaaaacaacaaacaataaaatactgagatttgagtaagggacgtaagcataggagaatatgtcaaaaggcccaaaagtatattttatgtgttatataatataaatataaatatatttcatgtacaactatagtaaaaactacaagagccaatgacctaaaaacaagaagaaagagagattgataagtatattaatatgtaattaagcatgattaatatccgaatgactctatagtaatctgaaagggtggggttaggaggacttttaatatataaaaaggaaatttttgggctgtatgtctttggggtttcgtttattgaatttgactttgttttttatttttaattttattttgtaatatatagtaaggcgttgaagtttatgatatgattgatatacgaatgaaacttagatattatcagttctctttttttatttttctataaattttattccaatttcttttaacatttgtttttgtaaaaaaaaagatttgtttttgtcttctaatgtctcggaaagggcaggcgtacggacagtcgcacagcatgaaattgggagacgaagctattcgattttggaaagaaaaagtcatatattggttggtttcgtcatatgtatatatatgaatgaaaatacactagaatatccctttatttatatatatatgtaatgtatacaaatagaatgtacaatttgtcctcattattgccaacatgattgcattatttttttatgtattacgtgagaagaagtgtcaagtaggcagagtacttcgtatgccaaccattcatgagctgctacgctaatccatatactatatatattatttgtataaatacatatttattgatatatgtaacttatatataataattaatacttgaaagattaatgagtgagatgcactgtaagattaggaatcatattgttgacttcgagatgatccagtggatctattattttatggttcaagcttattcatcgttaatcttgaatattccatattagtttaaattaataaatgccaaactagttgagttggttgcgacttattacatgtgaatgtgataagagattctaaacttgtaaaaatatacgtacgagtttatttccaatacattatataatgatatttctatatacaaattttcattatatggtatttttatagcatatgatactaattagtcaactttattttgtttataggttactgaaaagcaagtaaatagttaaggtaagaattatctgtattcattatttaacataggaaaatatgaataacaaatcatgaatgttaagaattatggggttccatctcaaaaccaattggcaatgagtggagtagctcatgttcttatatatggctcaattctctaccatttattctatgtgggacaatgtccacaacattcccctcaagatgatgactatttttgctcatcaatcttgaactgtat

SEQ ID NO: 267156 - DNA, 1488 bp, Cannabis indica
aaaaaaaaacaaaaaaaactaaacatggaaattaaacttttttaaaaataaaaatgtgcatatatatatataaagattagacttgaatggaaatatgtaaataatcatatcactggtgggtaaaaactcattttatcacattataagctataaaattacaaaatttattgatactaaataaaatacaactcacaaaataaggagaggttctattacaaaatgaagaatagttcacaagcatccaacgggaattctttccattaagtattaataaccactctagacttgttctccacaataataacttgtagcttttgtcttagctacttccaaagacaaactgtaggcagccgcttccccacacagagcatcagaaaactccaaaagttttgtttgtacccaaaccacctcgccaagatggttccttgctactactgcaatacacatgctttccatccttactttaacatcacaattcaatttgagtcaatcttgaggaggagggtgacaaacatccaacaaagtcaggaaagaagtcgggaagagggaagcacaataatttcataagagatatgaatagagtcaatgcattgtttaacattatctagcttattattgtgtacattgtcgtttcaaacctgccaaatggtgttgacaacagacgaagcataaaaaaacttcatcagtgttaatgctttggttttttaagccccataggaatttaacctagtcccgcatgccaatgtcagtaccatagatacgaaagataccccaaggagacgaccccataaatgaaaggccaagttgcatgaaagaaaaaggcgttccatcgattcctcctcaacccgacaaatagggcatcctgctgttggaatatattttatcaggacctagatttactaaaacatatgttattaacatcataaatataaacttctaaaacgatataaaataaacatataaaaggtatttgaaaccttacattggttgcactggaattaaatgactccttctgctcagatctctaacccttgtatcctttctgtagtagagtataatcaagatttgagcctgacactccttcaattgtttgaattcttcacagcattacacactatgattgaggactaacttattatgggtgggcatgcactcaatcactaaggctcgaattttgatggtgaagaatactgagaatttcgaaatagtagagagaaaagaagaagaagaagaagtctcaaaatactagttgtctgacagaatgaaaactagcaccattaattggataatgagacctttctttctttttaaactagttcacttagggttaggattaaattatttaaaataaaaaaatgataaaataatagcaaaaataggacttagtggtcggcccctatgtgggtccatcactagttagatttttaccattttctcatccatttatctatttttcataaataccactttttgcaatttcaatcctat

SEQ ID NO: 267157 - DNA, 743 bp, Cannabis indica
ttcttataaataaatatattatctactctttgctacacttgtcttaattagggcatttgtttataaattaacatgatgactacttgacatttatttgaatatttaaaagtattttttttgaaaatttttattaattcaaacaatatttttgaccaatatagaaagaaattggggaggaacaacatccacactcaaaagatgccctaattttttagctctttaattccttgatttgtgataggatgctcttgcaatgcaatgaacaacacacactacaaaaacagttatttttagtaatattttttgtcacaacttttttactttttatcacaaattttgttatgattaaaaataaaattttttgtagtgacagttagcagaacgcttaacgaaacataaagaagcacacgataatttaatttgtaagcaaaacatgaaaatcatatgcacaatcgtacaaaattcattcatagcttgcactccgatcaagcaatctgatttagggccagtttagcataacttttaaaaaagtttaaaattgctttttaaaagaaatgtgacaaaaaagtgtttggtaagcagttaaaaaacaacttattgaagaattatggaaaaactacagctaaaagctaaagctggtacaacccaacttttaaaaaaaactgtctggaataaaagactataataaattgatttttactacaaatttatttaattatttattacatattacaaaaaaaaaa

SEQ ID NO: 267158 - DNA, 815 bp, Cannabis indica
aaaaaaattcccacccaaatgaaccatgacgagaaattgactcccctgctaatggagtttgctcgacacagctgcataccaatcgaatcccaccccgaagctatcccctgaagaaataactaatactagcttctcacctgggtctaatgatcaaccgaaagctatttcgtggaaaagaaaaggaaaagaaacagtgcggcaagtcaatgctgatctggggcagaggaagagaagaggaaggcctccgaaaacccaatctccattagctgccacgccgaagtctttcaaaggaggaagaaaggcaaaagtctcaacgggaggaaaagcaacttccacaagtcaatggcatgacagaacatttgacctcaaggtaaacttggataatcattttgttattattgagaagaagcaaaagcaaaaacagaacagtaatgtcacaattacggagattgatgaatgccaacaggagtcaacgggcattaaccgtctggattttcaatttggggctatggagacttgcccggaaaagtctccaaggtcgccatgaaaatcttagcttggaagtgtcgtggtctcgggaataccgcgacagtttgacaattggcgcaacttgtgcgctatcataaacccgacttgctagtcctctctgaaatccgtctgcctcttgataagtttaatcgagttttctttaagcttcacttcattgattcgcactatgtgcctctttgggactctcgggggggttgccatgtgttggttgaaaggggttagttgcaacattcaagcctattctaagtactgcaccattggagaga

SEQ ID NO: 267159 - DNA, 2308 bp, Cannabis indica
aataaaatatataatacattttatataatgaaaaaatagttgacaaaacttcagtagagaggttttgatttattgtttttcataatttctattaaaggaataaaacatataatacattttatataatgaagggtattttaggtattaaaaagtaaaaaaggacatttgctttattattttaaaaaagggacattaactatctatagagttagaaatagggctatttacttacatttctctattttaatagggtcattttgcacaacaataaaaaaaaatatattaaatataatttaaacttgaattatattttgtattgaccaactaatagtattattcttttgttctaattttgtaaataattttttttaatgtcatttgctcctttttattttttccaaatgtaccacaaagttactttcatataaaaatattttaaataaaaatgtatcacaataattttataaaagtattagatataattaatttaatttagttttttacatatggattattttagaaatacataagtgttgaccgagaattttggcaaccaaataaataatgtaataatgagagcttagggataattaatacaggtaatttttacgtggttcagacattaatgagccgtagtacacgagtctctgttattaatgagagagtatttcttacagagaatatttttgtgttttttttatccccctcctaatttttatgaggggtatttatagcgattggtgagaagaagaaaatgagtaacttgtctttaagtgccaactatgggcatgcacaagtttcaaaagtacaaaatagggcatgcacaacttgcgtagtaggccgcgtaggtgttaggtgagattagtcttcatcccttcttgattgatatgattcttcataatggagtcatcactagctcccttgattatcgtgtaatcgccccaaatcgggtttatgacgtctgacacgtcctgttatgggcattcccagacattttctccataccgcattaaatgaaaagtgactgttcaactccagcattactggccaagagaagcccatccgtaccttagctcccggagaaggagataggccttttgctcatgttcgggagctagtagtttgaatcgtactctctttcttaaagtggtttagataagtcttcaactcatcttcgggtgatgtgtctatgttagtcacatgtcacacacaacggcggccacgtatattgggaataaactaaagcaacatttacccccaagtcttatttagtcgtaggtaaatgagacccgtgagtcacctccgccaccaataaatgcaatgacacgtgcctcaggcacatgggcaatatttattatcacatcaatggcctttctttcttttgcaggcaacaatttgattccctcctattgacactcctttccatcaatgccggtgtcagagaggtactcaagcgtttcaaccgtcctttctcttcatcatactcgttcatcccatccgttggattgaggaatctgaactgttgtgaaccctcatcgtacgatggtatttgatcgacactgcctcgcaacctaaatgggctataaaagccaacactttccccaactaggtcatttctacttccctttagtttccagattttcaaacccactcaaccgaattctagacgcccctagttttcttctactattcctctgccattgttaggcaaagtattaccaccaccaggcgtcttcgacctctgccttgctgtctttgtgtaagttttctatttatacattttttttcatttgttagggcaagtagtgataataaagtgtgtatttatctgatttgcttgatttttttgaaatgacgaccatgatcgccgttggtgtgacgcccccttcgatgggggtccgatgacttgtgtcttttgtcaccatatactttattttatctactactttcgttgtgcacgcactgtttctctttttcctgagaagagggttgaaaatgggggtttttcgtatgcctttttctagtggtccgaagcagttttggtactcccatatgtcctttcctttgttgcttggatattttgcacttgatgtctatccttgtgaatcgtaggattcctcttgacagccatctggagggagcctctttccagcggttaggggacccccattctcctttttgacttagggtttgatgtgggggctaactgttggatttttttgttgtttcagatgagtgaagtccttcgcgatctcatgttcggttttacgccctaaataaaactccatttcaatgtaatctattttat

SEQ ID NO: 267160 - DNA, 968 bp, Cannabis indica
aagtttctctcgctcgtcatctgcttccaaataaaaatccataatttttcgatcgaatttaaaatatttatataaactcttgcgtgttaataatgaaaatagtataatatgtatggaatttgttgaatagagactattacttcattattcatatatataataggatcttaataaatcacattattaaagggatttactatattgattgaagataaattattatacagttggtgctacataattaacagttttaaacatgcatacaatatgaggtatatatcaatttaatgaacatcgctttattatgtgacaattctcgtagatttttttactcatattttaaagtcaaggccacggcttaataagccaagtaagatattaacatcgactcactcgatcgagcccatgagaatgattagagagagatgagccaccattatacgtgtccagctttgattctcgttcaaattaaacaaagtgagaaaaagaaaattgatgcatatttatttttaataataataaaatagtaaaaaaaaataatatattattttagaccaattaaattattttttggctaaggacaaagcccgtcagctgtcacgcgtcatccaataatattctgccatgtgcctctggtcaaaactcggtaacccattacgtcgaccttatatttttcgatttttggtttttctagatgacgtggcagaaatctggtggttatggaagaaaagaaaaaggacacgtgccttaactcgtgttaattatcgtacttcattcggagtcgtgtatgggttggagataagtcacaattctctgtcgcgttgatctttaaataatctctcttggcttgccacgtgttggcgatcgcgtctcacttcgagtgttttcagttttatttcttttttctttttttttttaaaaaaaaataaattataaattttaggagacagaacaaaatgttatggggt

SEQ ID NO: 267161 - DNA, 1505 bp, Cannabis indica
tttatttgtaaaaagtgataaagtgttatcatgtatgactatatgagcattttttaatatatttttttctcactttttcaaaatttctttatgatttttattgtttcaattttagaatatagaacttaactatttctaaaaattaagtttttttttggcatttttcttatatgtttttttaaatttagtttaaattattaaaacagtcaaattcggagatataaataagacttttttcaaccttaaaaactaatttttgtagttctacaatataaattaaaaataaaaatatgaaaattaaaataatttatttatcatcccatatgaattttagttgatattatttgttttctcaatttttctcatttcattattattttttaattaataaaacaaaagtaaattaacgaactacgtttttaataaatataaataactaataataataatctatatatttatataaatgaacgttaaagagtaatgaggtgacatctcatattttttcaatttatttttataattttgtaacagcatcaagtttacactaaagaaaaatatcatatcactttttaacttagtaaaaaattctacattgttgaaaagtactttaaatgttggtcatgaagtctataataactttttttactttgatgtgacacaatattacttttaatttatttttacttatactggtgattgattaatatcttaccaatcagttataaaaaatttagttcaactaatatattatatatatatatttaaatttaatgacttatatctatattgtatatatcgattatttattattttgctgcgtacctaatttagtaccataaaactaacatgaagaataatggaagatggcctctcagttgccaagtcttggtttaaagttcttgacctcaggttcgtcatcttcgtctcccttccatcatggaaagatgcaggttatggtggatgctgccttctcggagtcctaaactgctgttggagttgtcgtcgtggatgcaaaaggccatgcaaaagaagtttttgctaagaaagttgatgtgtcatcggttctccatggttaattgtcggtagtgtggtggagagctaaggttattcgtggcgttcagggcagggattcgaatttgttctctggttgtttgtctctggttgaaacaatcaaaaaaggtaaaccctttgagtggaagatggctcttgagttctttgagctattggagatgttttttttcttgtaatatttccatgttttggtttaagagggattgtaatgtagcagcccatgttactgctatgtggggtttgtccaatagctattacgggttgttcaatttctgggaagtgagtctccttgtattcaccaaaattttagcttcttcttaataaatttgatgtcgtttcagcagaaaaaaaatattataatatcttttgtaacattattggatcttgagtgtagttattagacgatcaacaaacaaagttgcccacttcgt

SEQ ID NO: 267162 - DNA, 1171 bp, Cannabis indica
gctctgactgaactactataattatgtgtctcctttacgtatactatgttttcgttctgctattcgctattttattttgagtatttgccactctaagtgaatactcgcaattctgtaagtgagtgttcttgttcatctcgaatactcatgatttctagtgttgatgtctattttcctccgataatatttttaaacccaaaagaagatttatcatatataagagtattattatacgcgtcagaaatactaaaaaaagaagattttaagaaagtgttaatttcatcatgaacaatatgattggaaaggaataagaaaacccgtgaagtgctataagtaccccacaccaagttaagatatgaatctcctcctattataatgaactatgttgggaaagaaaacaaactaagaaaggaatttaagatcaccacactagtgagcaaagtaatgaaaatgcaaaaattcatagttaaactttatgtgaattcagcgatatcaactccttaaaatgtgatcaaattttgagcatctattttctcatcagattaacaaatgaaggtggtcttatccgaaccactataaggtaaatcattctagtacaataggtttagctccattgtagttgtatttggtgttacgaatcttttgaggcttttgatttttatctagttaggcttcaataaaatttaaatagttttttgataaaattaaaagaattatattatccatttcaacttgatggaattttaatattttatactatattttatcattttaaatgttatcattaagaagtttaggtgaagagtcaaaccaaaatagtatgcctttaattattaactctattataattatacgttataatgattaaggaggtgaaaataaaaagttcttattgtcttaactatttttttgcatattctttttcaaatttccaagcaaaatcagttgttctattggtaggattgcatttgactcaagatgtgggagtttcaattgaaagggtcttctcagattcatatcgttggtcttagttttcgagagtcaggcagagtatttgaatgaattcgggattatcttttttttttctttttttttatattaaaattatattatatagctttcatggggtgtctctctctcatattagtcacaactttaatgttgaggctca

SEQ ID NO: 267163 - DNA, 685 bp, Cannabis indica
gtgattgtgacagtcagagtctcatgatctacaaggggaaggacgaggaggtgtgcaatcccacatcgcctagagaaggttaagtgtgatgattctgagattgtgtaggtatgtgactacacagtcgaagaggacttaaatgaattaattggtactatctatatcaataagatggatcttcttttcggtagtttatcatgaaaaaatttcaaaattaagcgtgtttgacctgtggtaatttaaggatgagtgatctactgtgaagttttcctaggaagcaggcgagtgaggacaaatcacactagaaagattcttattggtctggagggacagtcctcattccatgaagcaaccaagaatggcatcactgtgcataagactaattagtttgtgagggaaggcccaatggatgcttgaagcagggacaatacaatattcctgagttatgatgataccaaataaggccatcaccatgagagaagaaactaatgggatgaatgaggatgtgctttatatcaattggagagaaaaactaatgtaataaagggatattccaatgtttttcctctgtgataagagacccaaccatcaaagttagagggccaacataccgaataggtgtgaaagaattatgacctggtatccaagggtcaaaccaaacttgactcaatgtccatctccaatc

SEQ ID NO: 267164 - DNA, 770 bp, Cannabis indica
gagcacatagcgtattttgtgctttttgcaactcccatgttgacaacactcttcacacgaacagcctccatagcatcaattgctggttatatgacttacattgatttcatgaacaatttgggtcattgcaattttgagctcgttcctaaatcactcttctctatatttccacctcttaagtacttcatgtatactccttcgtaagtttctctttcccttgtatatatacaaacgtagttgtacaattaattgatcttcattattgtgatatgcatatctgtggtacattttcaggttccattcattgcaccacactcaatttcgaaccaactattcattatttatgccactttatgactatctatatggaacaatggacaagagtactgctagtctttatgaaacatcgttgaaaagaggagaagaatcagctcaagtggtgtacttaacgcatctcacaacaccggagtctattttccacttacaagtaggatttgcccacgtgtcatcaaagccctacgtgtcacccaaatggtacatcatgatgtttatgtggcccctcactctctggtccatcatgataacttggatttatggccgtccatttgttgtggaaaggcatcgttttaatcgactcaacgtacaaacttgggctataccaaaatacaagctccaagtacgtacgcaattaatataatatatatttaataatcatatgtaatactagccttacagtattcgtacttatatataaaagttataatgttttt

SEQ ID NO: 267165 - DNA, 735 bp, Cannabis indica
tacttcaacacaatattgaaaaggaacaaactctattgcattatcatgataatccaatctttcatacagaacagtatgattattgtattaaccagcgcttacaacactctcatttatcttcctcaaataaaattgaatgcacgtaatatgaaagaaaatagatgaattatgttgactctctttctaattaatattaatatatattaaaatatgcatgtattattatttgatattaattaaataagtcatatatcagaaggagataattattgtattacccagcgcttattagcgagtacagtttgcttgactgcgtggacaaactgacacacagagggggagggcatgcacatcctttccgcgccaatcttcattcgaactccgttttggtctggacggaacagaagtaaacctccatcttctttcctatatgcttttgttccttcaaatattccctacacacatcaagtttctctcagacgcaaaattttattattacttaattttaggaaattacctcatatactatttttttttaatttttttttaaatttacgatttagtttataaagtggttgcaacgcttgttgcaataagaatttttgtacaattttttgttacaatttaaattgcagcgctaattgcaatataaatttctatgtaaaattccgtaaaaatgcgaaaaaaaaaactatcttgaagtgtaaaaataaaaagacccttttaaattatgta

SEQ ID NO: 267166 - DNA, 1658 bp, Cannabis indica
aaaaaaaaaaaaaaaaaaaacaataatcaacatacttcagttcggccaaaaaaaacgacgacaaaatccaacaccaaaatctgatttacttacctagttagttttcataagagtgacctcttttgtacctcaaaaacaaaaatggcctccattcctttagtccatttctctcagtctctcaccatccctaacctcagaactcgcttcccttccctacctcacccactgaccacaccaaatctccccaacctcaaatctcaacaacacaaatggcccaaattcaaatccaccaccgtcacccgcatgtcgtacaacaaaggcaccgtcaccccagccaccgatcgattggtgtcggcggtggcttacactctccctttcttcaattccctccagtacggtcgccacctcttcatgcagtaccctaaattgggttacctcttcgaccctctccttccaatcatcggtctttacaggtccatcccttacgcaagcttcgtggccttcttcgctctctacctcggcgtcgtcagaaaccctagcttcacccattacgtcaggttcaattcgatgcaggccgtgactcttgacgttctcctggtgctgcccttgctgctccagcggattctgagcccgggtcggagcgggttagggttcaggattatggtttgggtttacactgcgttgttcgtgttcagtgttctttgcttcgtttatagtttggcttcttgtgttttgggtcggaccccttacttgcctatcgtcgctgatgctgctgctaggcagatatagctgaaaatggtactcttttaagtgtctcagatttgaactcttcactttctccaatttttttttgttattaaaaacgtttaaccttttctcttttgaacttttgctgaaacaaaaatctgttcaaagtgttcaagttcggctcttttgttttgagtaggaaaagaaaagactttgtttttcgttatagtatgtacatttgaattgacaaagctttttgggttgggtcagtgaccgtgacaccaattcaactgaaccgtaaaattgatcccaaatgtatgcagtttatgggataatattattgtccatttcagattatgcaagtttattacccatgaaagctaatttgcaatggaaaaggaaatatactatggcagtcattgatcatgttcctaaaaagtggattagtcctccatcttcaaaaatagcaaaaataattctcgagatggcagaatttttgtctcctatgcgtctaaacttttaaagaacttttaaagttgttaaaaatgttccattgttggatttaaagaattttgtctaatttcattcaattttactatttcagtaattgtttatgtattaaaccatgcttctcaaacttgaatatctactaaatcatgtacctcgaattttaacacgtattaaattatagccactgaacttttattcatgttagatttttttactacaattaaaaaaaaaaaaatcttaaatctaaccatctcaataatttaggttataaaatttagagtaatttgcggcaaaaatacttaagttttattccgagtagctgataaatacttaagtcatgttttttgcggtaaaaataccttccgtcacacttctggaacttccgtaggtacctctccgtt

SEQ ID NO: 267167 - DNA, 682 bp, Cannabis indica
cttcgggtagagcccgtactccacaaagttgtcctctgaggtcaacaaagtgatatttcgggcagcacccagaagtagagcgagtctgtgagctctatccctgagagcaagtgtgaagggtggacggtgatgtatatggatttgctggaaccgagtgtaggtggtgcccatgccatccaccatgtaatactcgtcaacaaaattcccaattttgttcacacccttgtcctcggtgcctatcaaccacttgaagtccggttgagaaaaatagaagtattctgacctcccttgcttgggagtacacttcaaatcgaaaaacaagctaacctcatgaggagaaggcacatcccacttctgggtgacatagagaacgaaaagggcagacaaatacttgatgcccttgggagtgaattgggttggacagagacggaaaaagtccgccatcttcctaaagtacgggtgcaaaggcaccagtgccccttctttggaataagcacccaaccagacacacatccccttctttgggtgagaggctcggttgttcgagccaggaacataacatccaaactcgccctcatctagatcccataaatgtgcctcagtgaccttggacggaggactcacccacctggcacccaaggcactttgtcccctttgaagaactacagcagtaagctcctca

SEQ ID NO: 267168 - DNA, 1723 bp, Cannabis indica
aatatgattacatattaccctacacaaccaaacacagtttacacatttctctataatcatattctctttcataatattccctataatcaaattattttgaatacctcataccaaacgcccccaaagtctaatcacattttcgagtcattttaagtgtacaatgatatgatagtaacccaacagttaaatttttttgcaagcaacccaacaattaaactttgttttcattagaaagaatgaaataaatttgttacgtgtcgaagggtcacacgactctttccttttccattttccaagtcaactgcatggatgagcctaatttttcctaccaattaggttaaatttattgttgaaatttcaacaacttatacatgacctctaaattctcatattaactttctatatgtattgccttttttattaaaattttaaattaaaaaaaaagtaaatttgacgtcataatttataatattcttattttgccgtctacttgagctctaaatttccataaaccaaaccagaaaagaaactaacatcaaatctccgttcaaaattcacttaatttttttcttctggttcagcaaatatacagtaagtaattaactttaattacatgaaaattgaaataaagaaagtataaaaaaatatattatattttatattaaaatctaaaactttctctaaaattcctagcctccttgttcttcttccccgtatttccaagcaatttagaccaaaacccacttttcttttttccatttttaccctcagcatgaaaaccatgatgatcatccaaaccacctgcactgctcctcttcggaataaacgcaatcgacctactcttcttcagtccaccaccgccgccgccgccaacgctgaaaaacaaagcaatcgaccccatcatctcggacgcattccggtggtgttttcccccacgcgccggtgacgcgccgcgggatgaatagtgagacgaaaaagcagtagaagaagaagagaagaaagaatatccagcggccgaggcgggaccaaacgacgtcgttcttctattgaaggaatctgagagttgagagagtctctctcttagacagtccgaacaaacccctggcgtcagcttcgtcgttgggtgcctcttgcatcctcgctccgattcagaccaacccattatttatatatatatgtatttgtaaagactactgtgattgatgagtttttgtacaagtgaaagggtttcttttatttggtcttaaatggttagattttgatgtgagaaaattgggtcatattttatttatagagaaagagagagagaagttgaggtgaggggttgggtgtggaaggtagttatatagtgtggccaccgaacgtggttccacgaaacttctctttttaagggacctgtcacagtcactcattctaacgtcaccgacatttgtactgtttctatttaatcacagacactaataattaaattaacaacttcttaaaattatccaaatatgtaatcacatatatcatatgaaattctaattcatatttataaaaagcttgaactcattttagattcactactactactagtatagggcccgtttcactatcaatatactattagggttttttttatttttacacttcaaaataccttttttttttgcatttttacaaaattttacataaaaactcctattgcaactagcgctgcaacctaaattgcaacaaaaaa

SEQ ID NO: 267169 - DNA, 2735 bp, Cannabis indica
actataccataacaaagaaaaatccaaactagatataaaattatttggagatttgaagatctagaatatatactatcccatgaaacgataatatcacatcaataagattgacttaaaaaaatgcttataatacatttcattggaatttctttcatgaaatgcttttagcatttgaattcccaactgtaaaatcttaaaatgagaaatagattatcaacactaattaacataatcacgtattaatatggagttatattattatataatcaattatgtgtaactaaggaatgcatccgtgctttgcactagttttaataatgtaatgactatcatacttagacatgaaattagtaagacacttaatactaattaattgtattatgtagttatatgtgtattttttgttttatagacccatttttatgaaataggtgttatgattattatttctcgattctaaaaatttattgaatttcatgtgtgatatgcatgttatgtataaaatttcataatgtcacatttttataccagataacagtggaaatgggtcggacgataatttaagtcacatggatacgagtttctatcaagtatattgcggcaaaatattattagacattttataatatcgaggtttagcggggtaatggagttggactatgttatcctagggttgcgaggctacttagcgagcaagtggggcattttagtctttttctctaaggattagtcactttttttttttgagagattggtgactgtgactcatcttttataggtgaccagaaacttaaagcaaaataaaagaaaaacaaaagcaaaactaagtcaaagtttaagaaaagtcaaatttcatattaccttctattcttctccttgatgccttctaaaactagaaagaacaagaaaatttccaccactttcaagctccttattaattggaattgatcaaatatttcagctcctagctcctccaagcatctaaggtaaattctagcacaaaacttattggtttttttaggtttttgttggttttcaataggtctttttagtaggacttgctgaggaattctaggaaggttaagaaaggctttctagggttttagggaccgattaggactaatttgaaaggaatcggttggttgtaataaaagttatgcaagtttgagttcaaacttggctcatgtttggtattttgattttgttgacttcgcttctagccaacgatagtgcgtctatattaaagcaattagataaaataaacaatggaaagcaaagactataaataatgaaaacacaaaaaattttagaggttcagccccgtgactgtggtaatagcctactcccctttaggttatattgacttgtgagacaaagaacaaagtattctctatctaaagctcttacaatggatctttgagtaactctctcttagatcactatttctctcttgagtgttttctctttgattcaatttgtcccctcaaatagtgaggcaagaccattatttatagggcctcattacattgaagtagtttcccttaatctataatacataaattgggaaataaatatgtttccataattacaataaagaaattgaagttcaggctatattacccttattctctgaagatacgagtcaatcccatgcaagtagggataacttcgtgtcatgcaaacttgaagataccattgattactgctgaagttaccaactcacatttcctggtcagtgcacgagagatgataatacaactgggttggtcggatgtcctttagtgactctgtacggacatcctgccatgcctatgtaatttggatcctcatatcaatccttatgggcttttaagagtgaaaccattttcccaggtcaaaaatgtaggacacgtatcattcagctagtatgccacatcattgtgcaaaaaattgagataacatttgccccctaagtctgcgcgggaccttcttgatcacacgtggactttattcgacttgtgacacgtgtcttgactattgaattgatccgacatgactttgattgagagtctcttcggtacttgagcattaaatgccttggaagttgttcatcaaatcacacactggcagttgaggaacttagcatgttatatctatcttccgtaatgagtacttgaacgtaaactttttggggggaaaatctaaattttgaattttgaatgaattattttcttttttagtacctataaaaggggcttagtccttagtggaagcttttttagttattttcattctcagagactcagagaaaaaaattcttcattttttctctcaaatctttgaataaagttgttgggaaatcctttcacgctgtcctccaagtagatcaagaaagctacgaacaacgagtaggttacttcttcctttggttttatataatcgtcatagtatatgcattattttctagatttctcgccacaagcttatttgttcttgaactgttcttgactgattgtagaatagatagtactagggcttgaaactttaaccaacatttaactataacttgtagttctctaactgcatatcaattttgacttgacattatccatttccactcattaatgagactttaaagactgccaagtacctttgaaagttttgaacttctgggtttgggaattctatttttcaatgaaaccctttctttttgtctttaatgtagcttggtcagcatataaagtttgtttttcatc

SEQ ID NO: 267170 - DNA, 634 bp, Cannabis indica
ggtaagctgtgcaatctcacatcgcttggggaaggtcaagtgtgatgattctgagatttgttgagtgtctacattttaaacaaaaaaaaaaattataataactcatactagatttatttaattttgtgagtttttttaattgattttttttttcaagttaatcacttttctcaaactaaaactcactaaataaaactcttaaaccaaacatgtcaagtagtgccattactcttttatctttgcttcttaattactcctccaagtgataacattatattaatgcacataagtagtgtcatattattcaagtagaaaagtgtatatagtgtcatattatttgatatatatttttttttggctgaaatttatttatctataaattcaagtgtaataaagcagtcaaaatgcaggccttaccaaattattacttttaatagagttggcaaatggggaacaatcatgcatcattatatttttttggttaaacaacaaaaaatgagaaagccccttttttgtggcttcatccttttgattagtcaaaaattaattattgacatcaagaaattatatatatttatataattagttgagatatatagattcaaaaaacctaacaacttttttttttattttt

SEQ ID NO: 267171 - DNA, 1002 bp, Cannabis indica
atttaaaagaaacaaattaccactttcctataaataaagaaaatgaatatgaattaataattaatataaagggtcaaaatcactccactaatattcatattaaaacaaaattagcttagaataaggaatttggaaacaaattgcaactaacatctcggggagagagagctgtcaatatgtgaaaatcttcttataataaataaataaaaaacttatttattttaagttttctatttatagaatgatagtgagaaacaatgaaagtttcaacaaagtaggaaaaaagaagctttcatcatcacatttattcgaatatcacatttcctttattcctaaataacatttcacctaacccaattaaaaacatttcaaaatcaaatgaagtttttgatgacttgctaacagttcatagtttaattatgttaaacatattcttgattctgttacttgacatttaagtgttttcagttagttagtttttgtgtttgtattttactggttttgctttggacttgtatctcttctctatttgtataaataaaggctcgagctactcttgttaagtaatgctctttcatttcaattttgtttaatactcgagctactttttttaagaaattccaaatggggtactcttagttaagtgttcaagaattaaaaattaattttgtaaaaattagatgttatttttgtgtaataacttgttgcacaagttagtgcaccaaacttatacttaaacctcaaaaagtgaacttataatcattttacaagactaagacttgtcttaagtttcttaggtctttaagtccttggtggagaaattttgacaagtttggaaaaatgatcattttgccattgattttattttgcctttgaatatgactaacttaatttgtgctgcaaaatcaagaatttgatactcataaataacaatcaaataattaagagtttgagtcacatctaattggtcttgagaatatatgaaaaaaaaatattaaaaaa

SEQ ID NO: 267172 - DNA, 1244 bp, Cannabis indica
cagctccaacaacaacgacgtcaaacggtaatttcagactcttctctattacttgaggtttcacgaaacctctcaagcttaccgaaaaatggtttacagatgatcagagaacatgcagagcgacctttacttgacctactttttagtcgcaacatgtcacactcaagtttacaagaacttatagcaaccaccattatgaatctagctacctcaattgtgtctcaagactctgatcggctacctgtttcattcttggaatctgatgaagatatttccacactcttctctttagttggcttcacaggacctaatgtcctgatagacattatcagaccaacattctgtgtcaatcccactcatccacaaatattaaagccaaattaatagaagtatttattttctagaaactatgaccaaaatgctgtattttcagaaatttccaccatactttgagagcttataagatggtttggatagattttatttaagttttatttttttttttgtgcatcactgaattattttcataataaaaagttgcataaaaggcatgactcattattagtttgtattatcaatgatcaatttttccgaagagttgttcctgaaaatcttgaactacatgattcttaatgcgttctaacttttttctaaaaaaaaaaacctttaatatataaatgatacagagagagaagagagaagatttgtgtgactaccttttctgttgttaactatttgtgtcaacttcctgtatagcttgttttcaaatattaactggtttatcaacatttgcagttctcagctttgccagtgttggtccaactgtgtgagaataataacctaaagttacgtgcaaactccatcaacctgttctgttgcttggcagacggtgtagatgaagctattatcttggagcatgtaaatcagaaattcatagagactgtaatacagatcatcaaatcttcggatgacaatgatgagattgcatcagcaataggcattatctctatccttccggaaatccctgggatcaatcaatggatttttgatgcaggagcacttccactcatcatccgcaaactcaaaaatggccagcagaatggtccattcaagaaccagttgatagagaatgctgttggagccatttgccgtttcactgtttcaacaaggttggaatggcaacagcgaacagctgaagctggcattattactgaattggtgcacttgcttgagtctggaactgg

SEQ ID NO: 267173 - DNA, 712 bp, Cannabis indica
gttaggcgaaaacaaaaacccaaaaaataaaataaattgccaatgccatggtcgagatcagacttgcgatggttgcgagcccaaacaggggactaaccctcactggttgagcgctaggtcgcaaccactaaaataggtgcaaccactggatttaaaaatccagaaaaacatatttaacccaattcgaacctaggtcaaattatgccaaacttaccaattcataaccacaaattaaatccatcacagtaaggaattaaaaataccaattcaagcttaatcaacaacaaaatatgcatcataaacttagattaacaacatacaagctaggctccaaacattgagctaagcatcgcacaaattcatgcccaaactttgaatcttcaaacccaaaacacaacaggaaaattcagagttgttaaataaaattaaaacatcaatctaacttcaaaagataactcaaatcattcaactccattctttcaacataattaaacattgaacatcaaaattatactaatttcaactcacatgcatcatagaacattcaaacacataaacatgctttttcactcatcaatcacagcaacaatttaaataaaaatacagtagagaaaaggggtgggcatccgatccaatccaacctttttttcctcatccgatccaatccaattagtaattggatttggaaaatcatcatccgatccaatccaat

SEQ ID NO: 267174 - DNA, 1238 bp, Cannabis indica
gtgtgatcacaccttcgtaaaaatttagctttctgaccggaatgatttgaaaatggctctcgaaaaaacaaccatggctgtttaacgatgggttatttatgttagaaaattggcttgcttctggtcaatgggaagatgctcgtcttgatcattttttatgttgggtgcaaatgaaggattctttcctaaaagtttttactaaaaataatgtgatgcgtagtagggaccaagaaggggatgtttctgagatgcattcgagctatgctcaacaagttttttttactggacatgtatgactcaaaaatggatttcctatcaaggaaaacatctttgttgaaagatttattattacaactgcgagaaaaaagaactagatttagatctaatttgattggttgccattttatggtacaaatgtggtatatgggggcatgaatagggagattgtagtgagaagcaagaaatagaggtagatgaaggtggttgtttagttccatggttttgccgtgaagattacccaactcctacttcattgcttatcaacaacaacaatgagaagacagacaaaagatgaacatatccatagcagagttggatccaaaaaagaaaaataaagataaggtcaaacatcaccaattataaatagggtcaggactagttgctagaattgaacaagacctctcagcgagaaagttaactagcaaaccgaccatcagggaaatcgtagagatatatagttggggtggaggaaccatttgcttatcaacaacaacaatgagaagacagacaaaaaatgaacatatccatagcagagttggatccaaaaaagaaaaataagagataaggtcaaacatcaccgattacaaataggctcaggactagttgctagaattgaacaagacctctcagcgaggaagttaactagcaaactgaccaccatcagggaaattgtagagatagttggggtggaggaaccatttggtgactatccgcgatcatggatctcaatgaaaagttagcacaaaggcctacaagtaattctaagggaaagttacaccaaatactaactttttccaaactttacatttatactttgacaagaaattttttacatttatactttttctatttaattttattttatgtttgactattttttacttattaaaactttaaaaatgctcttttttcctttatatttttttgagttagcttttagctaacttttttttttatta

SEQ ID NO: 267175 - DNA, 565 bp, Cannabis indica
aataaaatcaaaaaaacgtaaaaatatttaaaattccgtgaaatcgtatttttgttgtttttttttattattatttttgtgcatttgtgaaattaaagcactcgtaatgaaaaaaaaaaaatccataatcaaaatacgcacatagttttttttggacgtgaaggtattttaaaacaagtcaatctaataccttcaatttacgctttctttttccttcattctccaattctctacatattctattctcttcgtgaatttctttttcttttggtaactaatattcatgaaaactattttagaccaatattcaacaaaagttattgacttgactccttattttgttaaattacaatttacactttgtattttttaaaatagtacaaatagtactctaaattcaatttttatcaaaataaaacataataataacttgatttaaaagtgttatgatcatattgattatattttttcgcatttgttcatgttggaactgttattttttaaaaaaaataaattgagctcaaaatattattttataatatttcaaaaaaaaaaaatatatata

SEQ ID NO: 267176 - DNA, 1445 bp, Cannabis indica
ttctatttgtagacccaaataaatggcgaataccaagtctcgtcccgttccggacaatattgaagatatttacgaaaatatcactgcatacaaacaaagcatcagcatgcaccacaacatacgccaccacttggccaacttgtgggcatcacttagcttgtaacgtgccatcttagcacgcacgttacacccatcataactccaatattgcattgtaagattcctaagtgaacaattataattacagtaattgtaattcctattacagttagccaccttagataaaagaatagagtgagtgctggatcaatttcttattttatattttatattcctttgaaatatatttctctaacggttgatccaataccaaaaaaaaaaggagaaaatgtctttatagttgttgctgaattgcatttgtcaacttgaatgtgggtggtgtaattttcaacttggggtagctgtcctaatattagggagagtagcaagccaatctttagtgtcgctcaagttggctcttcattttgggtcaagcccactcagattgcctgcacccacttactattcttttcttgaagattctttcactgaaccacttacttctatatctgcctttttagttgatttttcttgtaacacattacaactctacccaaacaaaaatgtaatttcattttcctctactttcatcatgtaaaactacttcttaattctctaaaataacatcattaaactaagcttaatcacatgtttttttttgccaactttattataatgaggttaaggtgagcactctcaacagcttctatatcattaaactaagattagacaattattttaaaaacatcatctgcttgaaaaactaattgaaatttaaactactctttatggcaatctattcaggtacaataaccgtttctgtaataatgcaagtgtttctctaacatataatatcaaaacaaaaccaatcattcatttgtacaaatatttcatttcaactatctatctactaatgtaatgtaagttatcatgaatatacagcattaaaaccaatttttttcctaattaaacaaaagaataaaaacacacccaatttgattgaatactcaattcgatgaagattgacttactaaagaatcaaatcgagaatcacttaaaccgaaaaggattctattcccattctcattcccgttcctactcctaacttcattcccaacatcaatcattgtaagcaaagccaccgccttagctttacccttggctgagccactcgccgccacctccctcgtcccctccaccgccccgctatcgccaccgagacccatttccttaatttccctcaccgccttctcgcccccgcaacgccccaaattcagcagcgccgccactgcattctccttcgtcctaagacttgatccggtggccggatcaagcaaatcgacaag

SEQ ID NO: 267177 - DNA, 1940 bp, Cannabis indica
gagttacatcagtgtaccagaacagagatcttgaactaactgaactaacctacctaaccctacaaactagccaactgaaataactaacataacattttaatagaccccttcaagatggagtgtaaaaatttttcacacccatcttggatacaatttcattgaagtgagttagaaacaggggtttagttagtacatcagctaagttggatttggaggaaataacatagttcatttttgatgctgccatttgagactttttctcggacaatatgactgtcgatttctacgtgtttagttctttcgtgatgaactgggttttctgcaatatgtatggcagcagaattgtcacaaaagagagtggaggggagttgtggttgaatgttgaaatcattgatgatgttctggagccaagtgagttcacatgttgcatttgccatggccctgtattcagctttagcggatgatcgtgacactgtgggttgcttctttaatttccaggagataggagatcgatcaaggaagacacaatatcctgaaattgatcttcgagtgtcgaagcatgctccccaatcagcatccacaaaaggcttggaaatgaatggcagggtagtcgacatagaaaaacaaaccttggccatgagggcttttgaggtaatgtaagattcgagttacagaagtcatgtagggtttccttggtgattgaaggaattgactgagtttattgacaacgaagctaatatcgggtcttgtgatggtgaggtagagaagttttccaattaaactcctatattgagttggatttggcaagagatctccatcactgttgctgagttttatattgggttccatgggtgttgatgcaggtttggatccgaggcagcttgaatcttcgagaagttggagagtaaatggtctttgtgtgactgatatgcctttggtgcatcgtgcaatttcaagtccaaggaagaaatgaaagctgccaagatctttaagtttatattgagcatctaaagtggattatgcaaaatttcataagatgttttgtctttgagagttgtagagggggttctgttaagtaggtaaacacctgtcttaatgatataactccaatatatgatggggagattagattggaaggctaatcgagcaacattgagaatatgttggtgtttgcgttcaactacaacgttttgttggggtcttcctacacagaagttgtagtgaatgactcctatactgttgtaaaaagtgggtaagttgagttctttggcattatcacttcgaacagacataatgtttgtctgatattgagtgtgcacatacatgaaatttttttggattattatggggccgggctttgtatttggcccttagtaagtatatccaagtatatcttgagtggtcatccactattgtgagaaaatatttgtaaccttcaacagagggtgttggatatggtccccatatgtcgaggtgaatgagatcaaaattggctttagaaaaattgttatttgattgaaatggtaatttcttttgttttgccgattgacatgttggacaatgaaatgtagaggaaatattatgaggaaaatgaagttgtttattgattttatttgaaatccgtatagaaggatgaccaaggcgattgtgccattggcgtttgtctatttgtacattacaaaaaatggaaaaattagaagttgaactgatttcttattccagatagtagagtctgccatatcgtttagctatcccaatcttcaagatccgagaaggtacctgaatgtaacattcattagtagtgaaaagcatagaattggaattgttgtttaataatgcagtcacagataataaattgaatttaaaagtaggtacataaagtacattaagtagagtcagatttgagtttataatgacagtgcccactttttcaattttga

SEQ ID NO: 267178 - DNA, 1077 bp, Cannabis indica
aaattcttaaaacaatgttgaagcctcatgagtttaaaatacaatgccttcattccaacacacttcataggcatgttctagtttttcaaaataacttttttgaactctagatgatcagcccaaatgttgcagtaacgaaaaggtttgacaccaatttcttcactcgctgcaacaaagataacacatgaacaatggtctacaaaaatttcccaactgaaatgtgccttagcagttgaaaaatgtcattccattcttcattcacaaacgcgtgattaatcttagaatatatccttttgtccacatcttgattatttgtccagttgaaaccccaacctattttggccatggctttagtgtggctttaagcaagccaatttgaagcatcttgaatgtctataaggtaacatcattgccccctattctatcatccaagtcgaacacaacattgaaatttcctactattaactaaggcttaacacgaaattttaatctcaagaggtcagcccacatatattttctctcttcaattgtgttataaccataaacaaaagtaatgcagacaacattcatatgaccagccattttaacataacagtggatgtattgtggtgattcatctataacaatgactcaaacaaagcttttcctccaaataacaagcaaactaccctctatagtaggactggagtagtaaactcaattaaagaacttcctttccatcatctctctaattttattttccttcaatttagtttcaagcaaagcaccaacacctattttattcatatgacaaaattcaaagacaacatcatgtttatcttttttattgatacccctaacatatcaacatgctatattgcagctatctagtattaaaagtagtgttaccagaaccccttgtctccttgtatctctgttcaccttcttgatcaactccctgctcttgtaaagatgtgaatgagttgctggtttggtctgcttctactgcaacttttgatgttagcagctcatgctttgatcttgttttcactggtgctgtcttcttggggactatccactgtttgttctactggtttt

SEQ ID NO: 267179 - DNA, 1040 bp, Cannabis indica
atatattttttctctacaattatatagttacttttctccgcaatacaagcataccaaactagctttaagttatctgaatttgcgcttattgctgataatttcatcttaaatttttgagtgattccaattataaaaaaataaaaaataaaataacacagtaaaaccattatgaattttcaaaaagaaagaaaaaaaatgaggaacactacttttaactgcacaaaagttctctttccccgatgacattgagattagaatcaacggttattattgctcataaacttttcgtacagtcatggtcttttcccctgacattgtaccaggtgaatatattcgctctgcatagagccatattggtaggtaagctttttataaaacgtgttcaacattgttttcttttgaaacactcattataattacgaggctatttattgtgtctcaattttgtattggttacaaaattacaaataatgagaaatttaaatttacatccatacattttatattaaattttttcaacataaacttattaatattaaaaaaatatacacatttatattcatactcattatattcttctctctgctacttatttttattattttttttatatatttttgtacataaaaagtagcatcaggtgaccatcgggctaccatcgaactatatctacatttatagatagtaagctccatttattaagctcgtcaagaaggcatcaagccaccattagaccactatcggaccatgtcatcgggctaccatccgatcttcatgttcaacctttactcattttaacaataggatgacatcagaccaccatcgggtctaacaaaaaaaccaatttttttatccaaaattcagatctgaccatttttgtgttggaaattattttaccatgatcttagatttactcacaagtatgttgtttaaacaccctaaatatgaactttctaaaacgataaattaaacacatataaagttaagaaaccttacattgatgcagcggaattaatgtctcattccactcagatctctaa

SEQ ID NO: 267180 - DNA, 1154 bp, Cannabis indica
caaaccattgtccttggagttggtataaagtttcttaattatccattaccacacaaagttttcatgtgattttaaagaaattgacaaaacataatagattatggagctttggcaactctttgcaattggcttttcttatcatgtgatcaaagtacatgtaagagttttagattttaaccaatgaagaagatcaaatctttcttcactctcaaaatttcaagattagttttctatacctacaaactaacaacaattttgtcggcaaatgagtctttaatatgacttgtttgaccattgacatcacacacacacacacacataaaatggggcccttttcaaatttaaaatcaatataatgagtacagttccaactatctatatatatgtttttttttcaactcgtacaataaatgtggtgcccaatattgaccactccttttggattaaaagttaaaccttctttcaccttggtcattgtccatagcactagccaaaggttatggtttgtcttagtgaagaaggtaaaatcaatggcatatatataagctaatcaaaatttagttcaatttatatctatatatatatatcaagtctctatcatatatttaataaattaacttacttggtctagtacaaatagaggtttttattttgtccttttttttcaacacttgaatcttctattttctttctctcttggtggtgacaaaaggtggagatatggccttaagcactataaagcacaccaatataatttgtgggttctttgaaagacaaatatttcaaaagtctatttttgaaaaagagaagaaaaaaaatgttttggtctagcaaatgatcattgcatataaattaacaataggattatacaagaaaattgtcaaaagaattttccacattggaaattaatcatcatgaccatttatatgtttcctcaatgtcaattcatgatctacctatactccacttcatagtggtattggcatcactacatcaattttcttaaattattgtcattattattattattattattattatgttgatgttacgtgcatgcacgtgtaattaattttttttaattagatttaattaagtgatgttaagtacaatacatgtatgttcaattaattttaattaggtaatatattttt

SEQ ID NO: 267181 - DNA, 1754 bp, Cannabis indica
ggtttcacacattgagactgatgtacttatagttgttaatgcattgaaagctcccttcaattcaatttgtacttttcatgatctgattgttaatgtttcttgtcttttgtcgtttttccttaatataactatttttcacgtcaagcgtacagctaatatggctgcccatgacttggctaaatttacgttaagggtggatgaaacttgttattagttagagactatccctccgtttatatactctcttattataaatgactatactctttcatttaaaaaaaaatgatagaaatcctattttaattagcaatagtaacaacaaaagcatgtggtgcacgtgagagatgcaatgccaggtcagcaacgacaaaagacagacgcagcagctgtagttggtacggtatggtaaaacattcagtaagatgtgacgtggcagcacgctcataccaattgaaagtccatagttgaaccgctagacagcgaagcaccggaacattttttggatcgaagcttcccaataactccaactgatgagaccaccgtctctacctgacgccgtcttttcccaaatcctaaattgaattgaaccagtcattcttctcattcctcttctccaccgctccaattcaattcgaaaccctagaaaaaaaaaactgttttgatctcctcgatcaaaccagccatgcccactctcaccgtcaagatctacagcttgtattacaagctctgcctcaagcaactacttcacaaattatcatcttctcaactcgaaggctccggatccggatccaattccgacccatttggaatcatctccagacccggagaccccattgttcaggctaacccttctttccaaaacggcgtcgctagtaaagacatccatgtcgatcccttatcttctctttctattcgaatcttcctccccgattccgtcttaggggtttctgattcttcagataagagtcgcagcagcagctgtgatgatggtgttgcttacggtggttattctcctcctcagtcgttgtctcggtgccggaaactcccggtgatgttgcaatttcacggtggggggttcgtcagtgggagcaacgcgtcgccggagaatgacgccttttgtcggcggatggctaagctttgtgatgtgattgttgtggccgtgggttataggctagcgccggagagtcggtttcctgcggcctttgaggatgggattaaggttttgaattggcttgggaagcaggcgaacttggcttctcttcgtaatgtgagacacgtccgtgctaatcgtcgaatttttgatagctttggggaggccatggcggagccttggttggctgctcacggtgatccatcgaggtatagcttcctaaaactcattcatgaaaatgtcttaatactgatactttgttacctttgatttttgcttttaagtttgctcatatatgttgaagcataccctcaatgtgctagaaatagagataaatatttgttcttttttagaaatcgttggaaaatttacatttttatccacataatgtcgaactaccaccataatcaattgtagaacatggtttaaagtttggattctcagaaccttagattagcgaattactactacacaagattgtcataaaaattgtagataacctttagcctatgaatatgtacggacttgtaaaagcacaaatgtatggattgtatttttagcttctgatcccttgaacttagttatgaaaatcttctaccaattt

SEQ ID NO: 267182 - DNA, 2402 bp, Cannabis indica
atcgaagtagcagttgtaaatgaaattaactcataaaataacataaagccataggcgaggctgaatatctaacggcacgtattattcaggcatgtattatgaatggggcacagagatgccttaaaaaaataatacttaacctaaaaatatgaatagaaggcttaactattcttatacgcaatcaaaaaatgtacaaagtacttcataaaatgaattattaaaagtatgtttaagtttgcttttaaattataaatgacagattacaactgctcgcgcgaagtagatctgataagaactgcttgcgcgaagtagatctgataagaactgctcgcgaattgaatacatacgtagaatataaattctaacacacatacatatagtagattaataactacttaaagaatatcaaaagaaactcgagatcaatagaaatgctcacttaaaagtatctcaatttgatcaaaatataattgttaaggttgtgaattaaaacgcaaatgagcaagcatgttaaattcaaacataaaagatacgagacaataaaggaaaagataaataaattaaagcaaagttggccatccaacaatataaatttgtctttacaaaaatattgccacaagggtaaactattttcggccaaaaggccattttctaaataaaaaaaaagttaaaattaaaaaccaagcctacatcataggagacttagatagatctcttgctgcacctcaatctcttctcttctggtcttctcgtaaaaggcaagcatggcctcggctctttcacccaaaaagcttaagtccatatcaggattagctgaacagatttgataaatggttctcgtggaaatgtgttgaccctatttttggtgtcaatttttgcctcttcaagctttttatcagcctcgccctagatggacttgatggaatcctcaagttctttgatcctcttctggtcagcttgacattgttttttagcctcctcccttgtgcgagaaagttcagattctgagtcattccatttcttggccattgtatccctatgctctctagtctaacgaagtttagtctcgagcatttcaacttgctaaaaccctctatgttgagtagcgaaggaaagaagaaatgcatgcgagaaaaagacagactaagaaaagagtaaaaaatgagaaagaatgagaactagaagaaaaatagactaacctgatgcatgaggtcataactcctttgcgcaagaccctcaaagctgccttttgtaagaagctcccaatcactagactcaaaagtatggtaacgacgccagccgttggtagcatgcagcgagcagagttgtgaacctttaatcccggcctcgaggggcaaaggacaagaaggctcgagaagaacaatccctggacaagaaccagagaactttacttggtgcactgacctagtaggttgttcattggtgctccccgtagtaggaaccatcttctctaaagacttagctggctcgataacttcttcttgttggcggtggttttagtccttttgggttctttggtagaacccgagacatcactggcttgggcagcttgtttcttggcctttttatcaacaagtggaggactgctgaacatgttttccaagtcaagatccatatctacaaaacaaaggaggtacatcagcaatgaaaacaaaaaaaaaaaaaaaaaaaaagggaaaaaaaactcaaactaaaagaaagttaccataattatcagaaggtgacgagaaagaaatataataattactaaactccgtagaccttgtgctctcgtaaataccagaaggatttagtggagataaatcctaacttgagtctagatggctcgccctatcaaggatggtcccatattgctcggtaattccgtagtatgaactagtgcagttaagctgaacgtgaaacctagggtaccaactatcgaacctatgtgttatgcgatctatgaggaaggggttccaagtgtaaaaattatatcgactatcttggaaagacactagcgtgttacgctctgccctaagcacagtaggtgaccatctatattgattacctcgggatgctccctcttcagcttcccgaggagttactttttggagataatgtatacaagccacataatcttcactctcttcatcggctggaacagagactttttgccacgaagaatacttggaactttatagtcacaagtaaactcgtccgagccaaggaggccaaccttccccagattcttctcattacataagaagttagtcgatcgcaatccgaatggaaggtttagcaggattttatgatgctcggccattttaggagttggatctggtctcttggaaactgatgtcaacacaataaatgaataagtaagcgacctcaaagatataaat

SEQ ID NO: 267183 - DNA, 946 bp, Cannabis indica
cacttgggaattttctcaaacagttagttgacttaaatttgagactatttttgcttgtaagtgtttttggggtcagttgctttttgtttcaaggtcaagagagaagctcacattttattcagatttactttttgtgtcgtaattgtttagagagagattttaagtatttagatttatttcagtgaaatgtagtaatttttacttgttcattgtcttgtactattgaacttgttaatttattttaatgattggttgatcttttcattgtttatcttaactatatgcttatttttaaataaagaatacatttttatcatacttttctaaaattggtcacttgggaattttctcaaacaggtaattgactaaaatatgaggcctttatttttgctttttctcaagtgttttcgggtcagttgctttttgtttcatggtctttgtgttcacattttgatgatacagatttacttttgtgtcgtaatttgaggggcctcagctcaatctggtagtttagttagagattttaactactagcttagattttttggaaatgatgcttagcttgaacttgagtatggagtaacaggaaagagagagcataatgattggttgattttttgattgtttaacttaactatgtgcttattgattgaaattttcttacatttttatttaaagttttcttcttttggactctagtagtttcttacattgttcattgaagttttattaatgtgcaatagtattctaaaaggacaattgctcaatccaatagagctgataatatagagaatttaagtaccaaccttacctttgacaggtcccactactgtaaatgttcgtattactggacttacaccagggcctcatgggttccatttggtgagtattcattctttatcttcaataagtgtctttaaatctgtataaatgaaagttggtaact

SEQ ID NO: 267184 - DNA, 641 bp, Cannabis indica
gttggcaaggttcaaatcaaacaccaaatttaaatgtcgccaatctgaatgtcgacttgcacgtatgcttaggtttttttacttttaattaggtaatgaattttaatttttaatttttatattaaataaagatgtaatttaattaaataaataatattattatattagaaaattaaaaatttgatataaagttttaaattaagaaaatatatgatagcaacaaagtgtttccattccacttgtttatttattgattaaaattagatgaactccataatcaataactctattatcactttttgtctattaaaaacattattctaaaaacatagcaggttttaatttttgtgtaatgtaaacttagattccttcataatcagttaataaaataaaccttacttagaaatatggactttgttatttattcattctatatagaaactattactgcattactattgaattcagtctatagaaactaacttagagtattattgaatagttcacgaacaaattctcgtattgtgtggttaaaaaatatatatatatagtattttatgcatttaaattagattaagtattattaaaataactagatcaaaatattaatcttatataaaaatgtctacataatttttatt

SEQ ID NO: 267185 - DNA, 993 bp, Cannabis indica
aaaaaaaagaccaaacttcaaataaaactaacaatacgtggctaggcacgtaactttcacctagtttatatataggtgactaataattattgtgaggctgatttttttttttcaattttttcttacttttcagcgagataaaatgtaatttcttaattttaaaatttaaaaagagtattttttttaaataaaattttaagtcataaaattataaataaaatataaaaaatatatattgttaaaaattcacgttaaaattatttaaattaacaccaactcttcgtttattttaagcgactactcatctataaataataccacaagaaaatagtgtaaatcaggaatgataatgtgtgaaaaatatttaatattttctccttaaaagtggttaattatcagggataacatctgataagtaatatttggaataaaaaatagtcgttgatgatacataaaagtcgtccttgatatccttgccttttgattgaattgacaaggttattagagacaaatggtattttttttatttattttttttttttgtatttttgataagggacactcgcattactcaccccaagcaagtctttgctaagtgtagctcatatctggaggacatttagctccgcgtagccagaagggcctatcagcatgcaactagaagctagtagtagtttcccatttgttaatctgcacaaaataaggaaattactctcctcaaatcaggattagggaataataccaagctaaaacatgaaactacataattgaagatgaaataattaatgcacaattaattatccacaatcaagggacaaggtaataacagttgtgaccgtgatcaacatgaaagttagcatacagtcactgcctcatgggctgggtttcacttggcccaaagtactgtattatttgtaaatactattgcttggtttttctttcatgatagataatttgttccaaaacagtcttggaacactttcgagcccactc

SEQ ID NO: 267186 - DNA, 598 bp, Cannabis indica
cccatgcctttccctatgtgaataactttagttgggtcttgatcataaattcttaattttttgcttttttccttaggttccaaaacggtctcggacctgatgcgaggacccaactcgtcttgaccttttagtaagttggtgtgtctggttccctgaaccatagaaatggcttgctaggtggccacattataacacttcctcgcctccccttgatttttgcaaaaagttcctattcatgttgaatgagtagggaatttgaggtacaggtgcctgattgaggtaatggctctaaaatccaccaaggtcggttgtctaggattgcattgtaggccgtgggacggtctactacgacgaaggtgcaatattcaaacatgctttatggggtgtctgggcataaggttacagggagtctcactttccccatggggacgagtgtagtcccactgaacctagtgacctgagaaccactcggagagagatcttaatctgtgagacctatagtaaggaaagcatctttgaacaaaagatttactgaacttccgttgtctaccaaaattctggcaacaaatttgctagcgatgggagttttgatcaccaa

SEQ ID NO: 267187 - DNA, 1012 bp, Cannabis indica
ttctaattataaaattgaaaagtaataacatgtttttgaaaaatattttcacttttctacttttaaaaacataataaactttagggtagtgtcaataactgtcaattagtattattcagcaaaaaaaaaaatcgtgtcaattagtgtgagtaatggtcccgaattttatggtgttattgacttgccatttttaacaaaaataaaaataaatcaatatataaaaaaactgggagcaccagaagtattcaaaaccataccaaaagttcttaatttttgagtattttgcaaatttcagcaccaacacaagtaagtatcaactagtcataaaacttaaatccatgaatattttcaaatcaattaaattctatttttgtttctttgttacagttcatttcaatgtctgaaaaaagagttaaaacgacatcaaaattgatggtgtttgaagaagaaaaggttgacagaatttcgaaactacatgatgaaattctcatacacatactctcctttctccccactgaagatctccttccaacttccctcatttcaaagcgttggagattcttgtggtgttcagtccctacactcaatttcctccaaactaaaaaaattggacatttagatggccaagaaatgttctacaattttgtgaataatttcttggaaaaccgcaagagaggtatggataatgatgatcatcatgattctgtcataactagctttaaactttacatagatcaatatgactgggacaatgctcatgcatctcaccatagatagatggttaggtttggtagttgagaataaagtcaaagaaattcatcttgtgttgtgggaagaaaagtatgatcgtgagaacggtatcatgtactacactagcttacctaaaccattactcaatgcaaaatatttgactattttgaatttggttagggtggatttggattgtagttacacatttagttttccttacttgaaatttttgaaattgggtgttgttcggtttgcggaaaaa

SEQ ID NO: 267188 - DNA, 623 bp, Cannabis indica
tcaaaatgcttaatacagattgcccagaatcatatctgcaactctatttgactatgtttggtttagtaacattttgtgagggcaaacaatagagaaaactgaggtgaaaacattttcctaaaatttattataggcttttttgaaccatttctcttcttgaatatattaaaattgctctaaattttataaagtctcacatttaacactagccttttctaaaattgtattctcttaattttgtaataatccaaatacaagaaattgaaattctttacaattcattctttttcctccctaaaatctgtgttccaaacatagggtttttaataattggatattgtctttacacactagaaatattgaaagcacaaccagcacacagactgtagatatttgcatgggctagttgaagattcacagcaccttccacccatatggaagcatatgcttttaaggtgaaacattttcgaccatacattagaatattccatattgaaatattataatggaagaatcactgtatagagtatctgatgcaaaatgtcaacaaaactcaatggttttgggaggcttattgtcattgtacggggtttaaactgatcttttattacttttctgtcgtg

SEQ ID NO: 267189 - DNA, 1328 bp, Cannabis indica
aatttacactaaaattttctactttttcattcagaaaaaactgagcctctctctccctatctttggccaaccactccctctctctcttcttcctaaatatttcgaaactagggaacaaaccgcgcttcgcgtgcggttatattttatttagtgataattaagttataaaattatatctaattttaaatttttataatattttataattttttataataatataagtaattattcttttaaatatttatttttttactctcaataattaataatgtaaatcttaactttttcaattgttttaattaatcataaatacatattattatacagttagtttttataatatatattttctttaaattaattaatcagaataaaaaaatataatgattgatgactctataaaagcttactatatgatttaaaactattgtcattataattatctctttgtagctattactacattcaaagagatttgctctctacatcaaacaaatcaaacaataagtttactactgattacttttatatataaggtgaatctacaatattttttaaaaaaataaaataaaatataccaaataaaatctattaacaatgagaaaatagattaaattgtatctaatcaaatttaaattcaaattcaaattcaaatagtatgttttgaatatatttaattaacatatttaattttactttttcataatcatttaataaaactattattaacaaaggaagaagaagactttaaaaatatagataagaggttttggcaaaattttaaagtgatagatatttttttgaatatctcacaaatttattattattttttaacgtaatatatgaggcaagtaattatgtagatttttttaaaaattattattaattaataatattaaaaaattaggaagtaaatatcagaaaattaataaatatttataaattaaaaattacatgatgaagacaaaagaaaagaatctttaattgatagagaggtggaggtgaaattgaaagataaaaaatgggagtgggagtgggagtgggagtgggagtgggagtggcgtgtgtgtggtgtactatggttgctaggagtaaatatatatagatagattaggtagatattttttaaattggttatgaatagatagatagatttttcttaatttattaatacttaatattcattaacaaaataaaaaaatttaagaaaaagagaaaattaaggagagaagagatagtaaaattaaagtgattttagagcgccatgtcaccgcttcatacttctcctttatagatatatatagatacttagtgattagagtagt

SEQ ID NO: 267190 - DNA, 1675 bp, Cannabis indica
ttggtgctaagtgagctactactagtcagtggggctagtagggcaggcatatgaggaccacgaggggactcatatgtctccatgagttggagtactcatggatattatcgggccgacccggtagtgcgtcgaagaatgccgctagaggttcactggtacattccccttggcttgcccgtatgtcgcttgcacgggacatggcctagatcctccaagagatgttgtggtgcgccttggccacgagtcttaacacgagatgacacgggtagtcattcgtgggctagcttgcatgcacgcttgggacggatgcaccatgctggaaagagacagaggtctagtgtatgcaactagtttggtggcttgtctcgagggcctgccaacatgcgtggaggcatggtgtcttgaggattggttcatggacgtatgggagtccttgggcaacgagggagactatttggacagtatcgaatgaggcatgatagaagcgttggcacgttgacttagtattggcatcttcccacacatgctaccttagtcacgagtgataaggtgagcgtcggtgttaggatttgtcttaccatagtgagaacctatggacaatgcgagtatcttggctagagagcctcgatgcatggagacactcaaggatgcttgcaagcataactcgacgggagttgttcgagagacggaagtgtgcacgaggcacacggtcgcgcgaaaaatgagcccattgttactcgaataaccggttggaaggttgcccttggcttagagaagtcaaggtgccgcacgggtgttccactgcctgaaaaggtgagcccgtgatactaggcactactagtatccaatagaaatgctcgagaagaaagagaaatgctaaaagaaactagtggcgcttaacactcttctcaatgtcatattactattgttattgttaaatatttttttttattaaatatttttttttatttaagcgtttatatattataaccatgttttacctgtgactcgaactcaggacctccaagacacacacacccacctatggccacttgaactagcctcaagtattgttattgttaaatataagtattgggcctttcttttataaaatatcgctaactattcgctaagtgctactagtagagatgttaggcacactagtacataatataaatgctcttagtttaataaatataagaaacatctctaaacatttaatacttaatatcaatgctcttaaataagaatagttgtatgtattgaaccgaatggtgctttttcttctttccttttatgtgctgatgtataaaataaaaatccaaggagaaatcatatttgtttttggtactatttgaaattatggaattatttggtaacacttttattttttaattttttaatcacaatatgaaagtaaaatttttatttttaaaattttgtttttaaaatatgaaaatgcgttctgtaactacttttatttttcaatttaaaaacaaaaaataatagtgtattctgtaaagttcatttttatttttattttttgattttatttaagtcgggtctaggtttggggttggattcaggttcgggtcagaggccgagttcagcgtcagggtcgttggggtatttggatccaggtctggtcggagtctaaaatattgaataaaaaaaa

SEQ ID NO: 267191 - DNA, 1031 bp, Cannabis indica
atggggtccgatggtggtccgatggtcacctgatgctacttttgatgtacaaaaacataaaaaaaaaaaaattggtggcagatttggtccgatggtagtccgatgggtggtccaatgggtccgataggtggcccgatgggtggtccgatggtggcctgatggggtggcccgatggatggtctgatgggtggcccgatggtgtaaatggagtgatgtaaatgagggtattttagggatatcataaaaattgtcatattttacaaatattagttattatttgtttagaaaaaattttttaaccaaatgtaagcataaaaaatcaaatttccctacatatatatcaattatacaacgatgttaagaacattaggaaaatttaaataatttaataatccttgtgtatatatggcatattcactctttttccaagtgacatatatataattaaatatggatatatatagtatttacattatataagataaagtacataatgctatatatcaaatatatattatatattctggagacagtattaacacaaattatgttaattatatgcagacaataatcatacgtgaaaaaagttgcttaattaatataaattagcagagttacatacttcgaacttgagtttttcctacatcaaatcaaactgttatatatctacatatttgagcattgctattagtcatttgcctaatattgttgtgaatgattaataattttaaaataaaataatattattttttaatataaaaataaaaatgttcagtatttctttcttatcgtgcatgttttattaaattggatcgaatattccagagtaattaagggagagattcattattggtttaatttgcagggttatcagaaaagagtgaaagagatagatgaagaggcagagaaaagttgatggttgttaattaagcagcagagcagggtaattgggaaaaagaagcagtacgtacgtactagtggcgggcatctcaagaggcgaagaaggtatctatccatatatatatatatta

SEQ ID NO: 267192 - DNA, 761 bp, Cannabis indica
tacctacttttatgagtgagttgcccagtatactcccactctctacttaagtctaacttataatttacattaaccaaaaaggttcaatggaaacatcatctataaaaataggtgtatcttaaagaatataaaaataaaggtaaaatttaaacaagtaaaataaaatagatataagtaaaataaaatagatatataatttaattttctcaaaatttatcattcttcaagcctaatacaactcagggccgaccctagttaccatgttacataatgaggaaattacattgtatacccactttactttatttgttttgatttttaccttcattttcattttctttaagatatacctacttttatagatgatgtccctattataccccttaagttaatgtaaattatatgctagacttaaatgaaaaagtgggggtatatttgacaactcgctcacaaaattgggtatatttcaataaaatataatataagagtatttttgattaatggacacaaataaagggtatttttcaacttatcccttacataatcatatattcattatgcatgcatgccttcttcaaaatagctcttgaactcttcctcctctttgtagtgattgagtatgactttgtacacttccataaacactttcggaaatcttggtgcaatgtatccatctaaatgttgaccatcaaactgaacatatatataaatttaattactatagtattataaaagcactataatgaatacaaaagttaaaa

SEQ ID NO: 267193 - DNA, 1811 bp, Cannabis indica
ttttgtatcacactttataatagcatatacattatacatatgtgcccacataggatttttaatccaacataaaatactagtagtggtggactataatttaatgggccaatttatagtcattagggtgcttctatgtacctcaaatgcagataataaaaccgaccatctcattaaggtcttaattacataatcggcattataccatgcatgtagttatccacatattaatattgacactctatgagcaacacttatttatgtaagtccatataaattttttttttttttttttttttaaaatgccatataaaatattctaacacactatacatacacatataaatttaaagaaaatgatgatcacaacaaaaaataatggaataaaaatataatagattcaatgacaagttctttacggtacaatttctttattttcttctctattttagcatcttttaaatagttttttggttgttgttgtctttcaaatagttatatgtttatattttcttttttcttttttgatgtcttttaattttttttgtcctgtgtatgtataaatatatatctatacaatttctttattttttttcttttttattatcttttaaatagttgtgtgtatatataggtatgtaatgtgtgtatctatataagtgataatttaaaaaatttgtatatgtattcaaacgttgtatttttatattaatatatctctctcttacaacttacaaactttatatttttatttttttttgataattagaacttttttattgaaaaacaaacacaactagtgaccacaacagggggccacttcccttagcaaacccgacacagcgcaattagattctctagcccatctagcaagggaatccgcatgcacattagaagtcctaggcacataagtgacaatcacagactcaaaacgctcacaaaggttcatacacttagaaaacaaggggaagactctccacccataaggaatcctggcatttttaaaagctagagcagcaaccttcgaatcggtttcaacccagattttcaccacctggtgcttcaaaccagactctaaggccagctcaatggcccttagttcaccttcaaggcaccctcgacattcccaactcccactgccaaccaggacttctccaactcctgttgtctatggaagacagcaaaccctgccctgccaccagccacagaagcatccacggagcaacgccagtggtcgtccgggggttccgtcagggatatccaaggaactcactcccttgcctcaggatcctcacagttgttccatattctcaaaaatctgttgcacctaatccaaagcaatctcttataagtaagttaacattcaaaggtttttccttgaataccatctcatttctccacttccacacagtatcacaggtgcaggcaatgaaggtttggatctcagaatcctttaaatttctccaccatctcccgaactcctccaagttagtccacccgaaacaatcaaggcttatccctctcaaaaaccagattcccctagtaacagggcactggcagaacaaatgcaggccattttctagcagcagacaagcagaaggggcagagataaagggtcataaactccaaaagctaaattttcccccgttgaaagcatgttggagaaaagtctccaacagaatagtctcagccttggatgaatcttgcttttccagaatctaccccagaagtcagaaggcaccttgaacctgtgcacctggccagcccaataagcacttttaacactgaaatttcccgacttagcagccttccag

SEQ ID NO: 267194 - DNA, 1919 bp, Cannabis indica
atattggtggcatgcgttctcctatgcaaccttcacaataaacagactccctactcctgtttgggacaatgttagtccttttcaatgcttgtttggtcaagaactagactacaccatcctaaagccattcaggtgtgcttgttttcctcatgtaagaccttacaatgctcacaaaatggagatgagatctcaacaatgtttgttcttggaatactcctcttatcacaaaggttacctgtgtgagaataacgaagggagaatgtatattcctaggaatgtcatattcaatgaaggtttattccctagcaagcaaactggtcatcaagattatcagcaggtacatacaaactctcctatctctacatttccttctgctacattctttaccagtaacactaatccagtttctaatgtttctacatcaactggaaatgttctaagggaggatcatgctgaaacaacagctgcacactaatgtaatcaggctactactcaaattggaggttcagttgccataaatagtactgttgcccatcaacaaactcctatccctacccaggatctgcctactagtcccatttaaccaattcaaccaatcaattcctctttaaatccaaactctgaacctagtactcaaactatacctcaacaggatccccggcaaacaacacaccaaatagcatcctcaaacactgaattaaatacccaacactagtctaatttgaccccaaacagtcacacccgaactcatgccatgacaactaggtctctaaatgggataaggaaaccaaaagcttactgtgcaacaaaacatcctttacctaaagcattgttgccaacagaacccaagtcggttaagaaagccctcaaagatcgaagtcgttatcaaggttggccactaaagagaaaagagaaagaaaacccaagaaaataagtacccaatgttttaaggatggtgtaggtactggggaaggcctcccctaaaattacttggagaggtccccactggacccatcacttgaagggcattgtcttcatagattaatgccataaagtagtgggtcatgaacccaccatatatcaactaaatagtcctacttctagaaatccatcccactcaaagccctagaaactccaaagggataggaagagacaaaatcagccaaaagcttcctaagactcatatcagttaagttgggatttttatgtctgttacctagaagaatatacacgcacaatcatggttctctattaccgaccctaatattcattgtcactcaaaatacactctttaacggaattgcacgcaaaagaactcagaatagagctcaaaaatacaaaatttacctcaacaataaaatcaaaaattgacaagttcaacatcacttacttgtgatgtgatttgaagagggcggtcagtttctgagagtggcctaaaatatgcgtgccagttgataactcggttgtagcctacttggacgttgaactcctcatctaactgagggtgattcaagttgagatcaaagactggtgcgtctggaaaataacacgcttgaattcaaaacaaacaaccaaaaataaaggcaaagcttttgttctaccactagtaaggatactgaacgtcagtggaaaacctttttctatctaagtttctggggaagatgtttaggttcttagagatagagggagtttgtaaatcgcagagcggtaaaaaaagaagaagaagatgaatgtcccctgttacaaaaattctgtttattacgcaagtgtacgtatcaagtagtatctcacgcaagtgaggtcgaaccacagggaattggattaagtactactaaactatacttatgattctattcggtaaaatattaagttgtaattttgaaagtaaataactcagaaattaaagagaaaatagacga

SEQ ID NO: 267195 - DNA, 695 bp, Cannabis indica
aagcagcctaaatatcaaacaaatacataacggttaattagatcaacaagatatgttggtgcattatactgaaagacagtgattaatcacacaaaacattcacaaagacatagtgaatttttacctggtcacttccaatgcattcaaagggcagagacctgcaagctttctatcatggtaagtcatgttagatcgggcagtaaggagttctggtcgtagtttccgctcattgctcacaatctcatcgtattcagggctcaaaccaggaaggcaaccagtcctcacccacacatccttctccatccgaaggtgcagagcaaggtacggccctttgttcctcatcctctctgccagcttgttgccgaggtccaatattggtggagcaaacctcaatgcatgaaatgcaacctaaaacaaaccaaacaaagataagatgcttttattatacactcgtccaaatttgtcaataaaaaaaccattatcaaaatcacatttccttaacagtaccttgcaacgaagtttctgaagatcagaaggaagttccttagagagttttgaatccaaacttcgtaaaagtaagactccatccctgctaatctgcaaaaaatagaaaaaaaaaatttccaccaatcaggaatgacaacaaaaatggtttaaaaaccacattagtaagcgaaaagcaaaaatgggaaggc

SEQ ID NO: 267196 - DNA, 894 bp, Cannabis indica
agaaaataaaaaaaaaaaattgacaaacttataaaatgttaaatttagaaagaaatattaaataatattcatgtatttaattttggctttagttattaagtgtatatgtttgtagttgtttcttaaatatttttattttaaaaaaaaattaatactataaagtgaagtttggtgagatcaaactcacgtcctcagctaacataaatcttatcttcagctaccactacgttgggcttaatctaatgatattaggtgttaatttcacataaatatagtagttaaataatgaggtcttaaaattttaaatgggtccctagaaagagtggatcctaagcacaggcctagcccgcttatgcctagggctggccctgtctggatgtatacaaagtacatgaccgtaacatgtcttacatagtaaatttagataataatatatgcacttgttgaatatgatgaaatgccttactcacataaaatttcttactcagaaatttattggacatatatagttatactatatctatgctcatacatacaaaataaaccaattacctaaaagaaatcttaaatacttataaactctctcatacataaatatcagattccaagtaaaaaaatgattaataagaaaaatggcaagttaattaaaaaaataaaagaagaagaaatattatgtaattatgagtgacaatggctgttgttttatttttattcggcataaaattatttaattttaaaaattatatagttagcagtataatttacttaatttattgtcaataaattttgtgaattaaattgccactaaacaactcctatagtcatttcggaaaaaaaaataaaaataataaaaaaaaaaagcaataaagatgtgtacgatgtgacacctcatga

SEQ ID NO: 267197 - DNA, 1404 bp, Cannabis indica
aaaacgataccaaccaatcaatccagctcgggcggacggcgcgcgtgtgtgtggtgggtcaagtgagtgagtcctcacccattcacacaaaattggtttaaagtgaaaatgcaacttttttcatggtaaaaaaaaaaatatcttctgtctccaacatttaaagtacaaactatcaaaatgaaaaggtttgttaatgtcagcagtagaactagaaaagtcatcggtagtagtcatagcagaatgaatgtcttaaaattattgagtaaattggtagcaaaaataaaagaggaacgatattaccgaatgaaaatttcgagttgagtcccagactagatcgctctctttaagaagttcgcgtcactgtccaggaatttgtaagcagtcagaatttgttgatcgtccccaggataaaatagctcagtcgtattatattggatcacatctaccctgtagagaaccttcgaatacacccctaaaatttatgatcgcagatggatttttgtagtgaaaactgtgtttttatttttcattataataaagatgtattatttccatcagttcaatcacattatatagatgaatggattgaaataatataacaaaaagaataacattttttgaatcgtggggagtagttggttgaaggtgtctcattaattgatacaactaagtaatcagttttaattaaacacatttctcaattaaattaaaaaataaaaataattattttttgtaaaaacaataccaaccaaccagcctagctcgaacggccggcgtgcgtgtggtggccctaacctaagtgctaaaattacaccttatataccctttaaaacaagaactcatatcccatgtgagaatcttttcacttcatacactaagatacttttatattttgttaaaatattcatgaaagtgccaatagtacatttataagtttttagatggaaataaaactcaccatatcatctcattactaatttactctaatgtaaatcttcctatcctatcctatgctatcctactctatgttatgtaattatgtatgtaaatagactagtgttcttagaaccaaacaaggaaatgggaagagggagggataagagtaagtagagatccaaacaaacactcccaatttcgatacaaacaaaggcttaaaagccaacatcccaacaaatctcaacaaacaaccaaaaatgcatttaatattttcatagcaaataatataaactctcttcttcatctccccgaaaacacacactcacactcttcgtgctctccgtctctctctctctctctctctctccatcttccttcatttctttctttttcaaatcagacccttcattcccagatctctctcactcttgattcttcgaacactatggcatctattacaggagcatc

SEQ ID NO: 267198 - DNA, 2490 bp, Cannabis indica
aaatcaaagattcaaatattaaaaaggaaaaagatgaaaaatttactcactgttcgaagctttagagctgttcagatgacacaaatcgacactttctggaaactcttcgaaggatttgagaggaaaagatgttcttgttctaaaatcatcaagaaaggaaatgataaaagtggtttattaggacttcctaccctatttgtaagcaaattagtgaggaagtgtattcatttcaaaatttaaatgcctcagttttctcctaaaagtaaacgttgggcaatcaagtacctaaagagaaatcgtcaaaagcgtgcaaacttttggaggattttgaggtacgaatcaataagcattaaagagatgaatatcaaagatactcttagccagaatcacatcggatcaccaatagacgtatcgaacacgtgccactcgttgaaacacggattcaaatcgagtgaagtctacgagcgacttcagaagtcctgtgcagacttgggaggcaaatgttatctcattgttcgcactatgacatggcagcatgtactagtgacacgtgtctgtcattctttacacttggctggagaaatgctccgaacagacttcaagcaatacatctgcatgcacaaagtctgcttgaccgagcagagtaaagggtagataatccgagaagaaattaaagttagctctccgagtcgtgtatcaagacttgactacttcagaattgatatcgtgaagcccaagcataaagacaatccctacaatcatgggattgtatcaaagggatacagcaggttatcctaatccctcatttcacgtattctaaatatgtaatgtatgttcttagcaattatagatattgtaagcaaaagggaaacattcactcatacatttagccctataaatagtgatccagtttcactgaaaaatggatcgaaagaattgctttagagagagatgtaagagaaaacattcagagatttcattgtgagagctttgggagaggaaacattgtgttctttgttctcaagtaaatacaatctaagaggattaggctattaccgacctaaaggggtcgaacctctttaaaaccgtctgttctttattgttcactgatttttgctctgtctttattacatctcttatcgcttattaattgactcactgacgttggctaaaagcgaggtcaatatttttgtatacaaaaaggcctagggcgagcgttacgcaaaccagatatccctctaaaatgccacatgtcgctcatccagaaacgtgaataacattaaatatatatggttattttatttagtttaatttgagatttatgaacaatgagtattgtaggaatattattttagttctaaattaatttttaaatttattatttaaattagaaattgaaattatattatatttaatttttaaataattttattattttaaaatactacatttaatttatttttattaaatttaaaatggttttgcgacgccggccgctaatgatgtttcgtagtctcaaaattgaaaattgactgaaaataatagcagcaaattaccccgttaatactcgctgctattaattattagcggcagattgagattatgccgctagtaaccctcaatagtagcctattattagcggcatactattattattgttaaaaataaacttatatatcttctcaatagtagcctattattagcgacatgctattattattattagcggcatgctagtaaccctcaatagtagcaaattaccttatctaatgaagctaatggaatgtattcggtcaagagtgcatatgctctacaacaaaaattgaagggtgttggtacagagattgcagcttctggtttttggaaggtgttatggtccttgaaactgcctccaaagattaaaaacctgatgtggagggctggttctaactgcctcccgaccctttctcagctagcatctaagcgtgttccagtcaacacacgctgtcctttgtgcgaggagatggatgagacaatagcacacattcttctaacctgcagagtggtcaaattggtgtgggaaagagtaggcatcgacactactgggattgcagcagggagtatttttctggactggtgtgtgaatgttttcacgcctttgacaacagaaaaacaaggattggctgctgctctttgttgggcagtttggggagcgagaaatgatattgtatggcaagggaaacagtttaatatttcagctatagttgtctctgcgaaaatctatctttatcaatggaattatgctcaaaaaactcaaattgagtcattatggtctaatcttcaagactgtgatgggacggagcgttggtttaaacctcaggaaaatagtatcaagatcaatgtggatgcagctatttttgaaagaaagaaccagttcggaagtgctttggtggtgcgtgaccacaatggtttgctcatcgaaggccgtactaagttacataatggaaatat

SEQ ID NO: 267199 - DNA, 706 bp, Cannabis indica
gagatatacattttatctactaagtttaaaataaatttgtaccaaatttaaattcttatctttaatataaaatgttaattgtatatataatcatttttaaatatatatacatatgtgtagattaaactgaatcaaatcaatttcttttacatatcaatcaacatatcaattaacatttaatttgtacaagtgcgaattttttatttttcaatccaatctaattcaatccgcaagtgcagatattcgcactttgcgaattagattagatagatcgtgcatattaaattggattaagtattttagcaatacccctatgtgcagataagaactcccttacgattattactactttttttaaaaaaatcttatttctaatcaagactatcatatcatactcaagaaaataataggatagtcttgattagaaatgcaacttcatagaagtaacttaattaaagctacatttaaacacaagtgaacttattaggaaaaactttcagcacaagtagagatgatatccaatcaaaaacaccaccatgaaatggaaaattcttgtctagaatagaagatggaatttcactttgcaaagatggcattactaaataattaagattacactctgatttgccaacaacatttcaaaggtgtataattaaactgaaactttagtacttgcatgcatgatgatgatcttataatactaact

SEQ ID NO: 267200 - DNA, 1679 bp, Cannabis indica
gggacaaaggcagcttgagtcgggcaaatgagagagggaagtaacggttttatcctgtttgctaaaattttggaaatgactttgtataccacattacacagagaaataggtctaaactggttagttcggatcgggttttggaccttaggaataagcacaacgtttgtggcattgattcctttatgcatattaccagtgacaaagaaatctgagacagcatcacagaaatcagctccaactgaatcccaatagtgcttatagaacaggacagacatcccatctgggccaggggccttatggttattcatagcaaaaagaactcttttgatttcatcaggattagggcaactaaccaggccctcagagtcttcaggagagattcgctcttgaaataactgagcacaattatactcaattccattgtcagcccccgcaaaaatgcccttcaaatagtccaagaattcacacccgattgggccacgacccgaaatccagacattgttcttgttcaggatactctctatggcgtttcttctgcctttaatagcagcagagaggaagaaaaacttagaacacttatctccatccttgagccaagagactctggctctttgtttccagtaaaccgccttcctttccagagattcattcaacgcacggcgaacatctctttcttgattccagtcccgggaaccagccgggagactttgaagagagttgagcttttgttcaagctcttttatggtcacatccatcttcccaaactgggaacggttccagttcaggagggccaccctggtggcgccaattttcttgaaaattcgagcaggggcccaattatgattgactgaactccaagcctgggccacaacaagattacttctagtatcccgagtccaaccctcttcaaatttgaaacatctcttgaacttgggttccaggccctcagagaagagacaaagaggcctatggtccgagttgctagtctgagtagtgcaaagaacagccttaggaaataacttaatccaggccccattcactaggcctttatccaaagcagatttcacatggttcctcccagaccggtggttatcccaggtcagagagtccccctgtatgggcatattgataaggcctctaccctcaataagattagagattaccgggataaatggatcacgaccagatgagccttctctttcacatccacttaagacaaagttagtatctcccaagattagccagggcccaccaaatctatccccaattcttaagaactcagaccagaatttcttcttagcattcagataaggagggccataaacacacgaaaggagccacgggaaagagggggggtccgaatacactaggcccgagatatgattatgcgaacaagagatacattcaaaactaaaacccgacttccaagccagaataattccccccgcattaccgattgacggaacacatatattaaagtaaaagtgtaaagactttaggatacgtaccagaggtttagcatccactttgagctcggaaagaaaaacaaaatccggagagcgagactggatcagggacttcagttcccgaactgtagaggtctgccctaaccctctacagttccaagcaatacctctcatggctcctgtggaggagattcgacattctcctccacaggg

SEQ ID NO: 267201 - DNA, 2199 bp, Cannabis indica
aaaaagactatatgtgaatgcgaacacacttaatcacaaatgtatccattatgaataaacagatagaatgactattttgtttttgaggctcattacaaattcttctttgtagtgagattgaatacgaatacctatatggcagttctattctagtgtagttatatgcaaagcaaggttggactggactagcttattattagagaacaagaacaagtgatgaaaaaaaaatgctcaagtcaagtgaatgaatttgaatttgaattattactacatataattaactcacagtaaatacagaataaagtaccaatgtaatatatatggaaaaatggggtgggagggttgcaagcatcatcgcagccttgagcagatctcaactatgttggcacctactcaaaccaccaatcatgtgcataagcatagcccaacccaaaacttacaattattgttcattaattagtatacacagttcaaatacaagcaatagtcaataacaaacaatgtaataatattgtattctaaattctgatgatgaggaggttggattggcttggcttggcttggcttaaagattcatcttccagacagtagtacggccagaaccatcccctgtaaaaatctgtcctcctggacccttttgaattgtcctgacttcttgtgttgtgaagaatctacctttctcttcaaagcttggcaatgcatacagacgaacagaattatcattacaagagcaaagcaaaatgttgtttggcatcagattcttctttttcttttgcatcacaagtcttaggagggagtgttatcccattaagtgcaagaacaccctgaaacaaacatatcattacatattattattattattgtaattataattagtagtactaagtaatagattaattaggatgaatgaatgaatgcatacatgtccttcctcatgggtatagactgtctctacgtggcctttctcagtggtagcccaaattttgatagtgccatccaatgaagatgagactaaataatatccacaaaatgcaagggacatgacaccatctgaatgacctttcaaggtggccacacattgtaaattgtgatcccacacctacaaaacaatacaatatatatgattatatatgtatgcaagtaaaagagtaagtaatgcaatatatatatatatatatatatatttatatgagtatatgtacatgtactaccttgattgtgtggtctaaagaagctgaaaaaagtctgtttccaccataacacaaacacacaactggacctccatgtttcatggaagatggaacaccaagagggatgaaggttagattagcagtaggagaagctccatcagaggaagcttgccaagctaatatctgaccactttgggtaccagcaaacagagtaccattgacaacagtcatacagttgacttgaccaacaggtccctctccatcaagagtgattgtaatttcaggtccagtggtagcattattctgagtgttccaaaccttgatttcatttgggagaccaatgaaaagccaagggccttcattgatcaaacacccaattgggactccaaaattgatgacagcagttgttttagcagtgtggcagtcccaaatgtaaagcttaccatcgtagcttgttgtgtagagtttatctccagaattcgaatgaggcagagcaataccagtcaccgcctataacgagccaataccacattttccagaaggaagaaagaaggaaccatcatccaatccaatccatgaatccaatctacgaatccaatccaagaatcaaaaacagtgaaaagtaaagaatgtagcaagagtaccttagtgtggccgtggagatttgcgaggtaggagtaaagatcaccccgagaccaagaatggacgaaacgacatcgaccccctctgacacacctcccttcagcccaaaatttacacactttttccattgatccactctttacattcccactcacactctcactcgctcttcgacgaagatacgtaatacccatatcttctctttctctctcttactctcaatctctctcttcttcttcttcttctcttcttcttcttctctctctctctcttctcttctttggtctctcacctttgtctttctctttctttcgtcagtttctcaataactctcctctgtatttatacaaagcatccgccgacttac

SEQ ID NO: 267202 - DNA, 845 bp, Cannabis indica
attggctgaccaatgttaatcgtttcagacaaccagagccaaatttggaaagatgatttggaataaaggtatccatccgagactcagtcttatcctctggcgtgctctctcctttgctcttcctctgagagaaaaaaatgactttctgtcatgacaaaggatgccttctctgtgatcatgatacagaatctcccctccatctgtttacccaattcaacttatctcgtaatctctggtttggcgctcctctaccagtcatttttgctgctaccaacgatagtaatttccaatctctttggttgagcattgctaatgatatccccaaggattctctgaaatccttcatcatttgctctactattttcattaataccatttggaaccttagaaacttggttcttcattgggagcaggcaaaagacctcaaatgttatcagaatgaaatttggagcaggttcaatgatttcaacatgctgaacatgttgaaccccaagctgcaacagagtcgccaccccttgtcttatttcacatgcttcgcattgctttttaatggatggttcttacaaagatggcagatttggtgttgcagtcgtggctctcgattcaacctgcagtcgctggagacttcactactacaaaagtcaaaattcgcgacggtcctaaaaatactttttttgggggaccgtcgctaaaaaaattaagtaactgtttaaaaccgtcgagagaaattagtattcccgacggtttataacattaataacaggaataggcaacatttttaatggaattcgtaaaatttattgggcccttataggcgacggttttaggcgacagttttaaaccgt

SEQ ID NO: 267203 - DNA, 2309 bp, Cannabis indica
gaagagagagagagatggggttgagttatgagaggggtagtattggattttagataaaattgtcacatattttcaattttcatatgtattcaattagggaaaaaattatcccccaattaatgcatagatattcaaattcccctatccttattatttgacatataaggtgttttaatcttgaataattgtctacattgcaatatttaaaatattctcaaaagttttaagaaatttgaaataatttataataactatgtataaaattattgtgaatttcatttatgatgttaagatttctctcttggggagagttgtccagtgttggatttttttcgtttcctttgttgtcgattatgtctatttttttttctgagggtgtctgtgattagggttttcatcctaaaaacctttatccgacaagaaaaccaacaaggacttgatttgtttatgcataaaaggctagaacttgaacataaagtcaaaattacacaaggaggccactcgaatatgcttggccggccaatgccacttttaggcataaaaagatggtagtactatctactctcaaaccaccaaaggacacttatctaattaatgtggtcccccaacgccaaggtgaacaacacaattgaatggaactatttttcactcaataacaaagctacccgacttctgccatctttttgcacaaaaaagtgacataggtcggccacaccaaatgggaaggagattctttgccaaaattacattttcatcatcaagacatcaaaacaaagtgaggaaggccaccaagtgatatagaaaccacttgatcgaccactgccatctttgtggtccaaagagtggcagtggtcggccacaataaatggagaggaatctctttggccaaagtatatttttaacattaaggtatcaaaaataagtgagaaaagtcaccaaaaggtgtagaaacaccctagccaaccactgccatctttttggcccaaaaggtgttaaaaaaaaaggtagaggtttctcccatcaattggctaagaactgaagtgaccaaagtatttttctagcatctatatgactaaaataagcaagaaacaccatctaatgcttctcacaagccctggccgactattgccatcttttggcaccgactgatggcaatggtctctagtaaggattttgaacgtcgagatagtctggagactccaaaacttgcaaaatatgattcaccatataagaaagtcaaaccacacctcgaattgtgcaagaacatgcacagctgacactgctactttttgggcatgatgacgtggcactggtcagattttgagttgaaatgtaattactgccttgcagtaaaacaagactaactctctcaatttttatccaaataacttggttcaacttgcattggagatatcttttcaaggaggatctaagtgtgtctcatgttcattgcataattctgaatttatcggctcaaaaatgggttacaagacaggatcatacactttactcgaaaattaattggttttgctaagtggggaccacaaggggttgttgggagagctatgccacaaaatttgtgaccctctactctccctagccgagatgttccatcccttggacactcctctccaatttttctattccccaagatggagtacaatgtcgcataggcaatttttagagaaaaaagaagttacaaaattcaatgacaatcccaatgaatgtgggatattttcctagatttttatttattcatatattttattcattattttagaatgagatacgagaagttaagtgagataccccgacttgtaagggatcattaacaaaccctaggactatatatagatattgataggctagggtttaaggacccctgcttttctagaactcttgcttttctgacttacatggccgcattatcacttcatcccttgaaaaattttctttcttcatctttttctttatgttcttcatactctgacgacaccaagcctccattattccatcaccattggcgtacacatttaccaagaagaatataccattctctattcttgcctctattggtttaatgttcccaaaaactttaccatcgccattattatcaagtttatgggtatttggtctctcatgagccttttattcataagcttcagtatagatttcacctaaaaaaatttatttgtactattatccacacactcttgagaacataactcttgtgtgttgaaattaattaataaaaggcaaagtagacatagccccactaccatcgcaacacggggtgaactactataaat

SEQ ID NO: 267204 - DNA, 1505 bp, Cannabis indica
ccaaacccgaaggagagaaagagatccaggttcaaatcttgataatgctttatgacagaaaggaatcaagggctagagatcttaaacagaaggagtcattatattccggtgcaaccaatgtaaggttttcttaaacccttatgtgtttagtttcattattttacagatattcatatttaggatgttaattcaacatacttgttagtaaatctagatcctggtaaaatattcccaacaagaactactccagccctgatgtgctcgaggctccaagcacctatcccagatgagccactagaactagcaccatcatactcctcgtgaattgcgctttttggagggaagcagctatattctcccagaacaatagacctaacacgacatcctcgcccttgtttgataccataagcctttagtatatttccaacaaaaggagctatcgatcatatttttgattcgataagctctgcttcgaaagtgactattggatcttgaggggtctttgatttacgagccttggtggacataattttaaaatctaggtcacctggtgcaaaagcaacagtgactcgaggtaaaaataagagtctctctaaagggatagagttagggttcaggctaagctgcatctcgcaaataacgatgtttacccttagttatttcatgtaaaaattgcctatagcgactagaaatttcattctgattggtttttattagatgatccctaattttggaatcatttatctcaagttggatttaggtttttagattttgggttcgaatggaagagctaattcgttaggacattctatttctaggaaatctggagttaaaatttcaaaaccagattgggacattttggcaaaaaagaataatcccaatttctagaagaaatttattcattctaaacaaaaaacatatgaatttaatacacctaaattttctccttaaaaccatagaaataatctagaaaataaatcaaaaaatacctaaacaaaatgaagtaaatgaagatgcaattgaaaacaaaaataagattacaaactctggaaaagggagtagcagaaacaaagaagtaaacaacttactgttttggtaaaagtttctgggtaatggagaactcgtcgagtgaaaatttgatgactggaataatgagttttgagattctctaaaattgaagacgaagtatgatgaaacgcacaaaaaataagtcaaggataatgagggcatgcaaggtgatgagaatcagggatggatttttcgtaggacagtatgaaggttttaaaagcagaaatggcaaaatgaaggttttctctcgaattttataccttaagagtgatcaccgttagatcaagagaaatatgatctaacagatgagaacatagtagaattagaaaagatgggcatttaatgttaatgatattcctcgaaatcatgaactgccaaaattcaaagcatgcaatttttcaaattggacattatgacaaaaatacccttgtaatcat

SEQ ID NO: 267205 - DNA, 1467 bp, Cannabis indica
cttcctgaaaggacctatttccctattttttgatgaagacaaagaagatgcaaaagtttgatcattgatttgatacttggaaggcccccagattgacaaattgtgaacttgggcgctttggtgctaaggccctaggtgctcaaaaatgaatgtgctccaaatctaattctaatacctcaaatatgtctgtggtatgtctagttgatgtcacaatgcaagttttgacccattttcactaagacggtcccagaaattgaaaccctagttgggaatgtcaacctgggcactaggtgaaaccctaggtgcacaggctggcttccaggttgcatgttcgtataattttagctctcggggcctagattttactgctccatgtcttcatggtgtataatattgaaagatagtgagttggattcaagttattgaagtctaacttctattctcgatttccccaagtcaacctgggtgtagggctagggacccctccaaggtcgacttgctatgactcgggactacccaactctaagatgtcatatttcttgccacgtgtcaaaccttgatgtccacatcatcaaggctacttttggtgtaaatatttgccctcaagttagctttacacttgtgtaaggttgacttaatgacttgaactaagcctgtttctcttgaactaccaggtgggcatcaattttgacaatcttggacaattttttttttttgttcttcaagctttcccactgagattaggagttaaatttcccatcccctattgaatagtagacttcaaaattataagtataaaaggagaagagagaaagtaatcttcttgtcgtatcatttaccttttcctttttaacttaaaatttagatgacttcttgcgtgatttcctttgagttgagatactgtgaaatcaagctaacattggaatgtcaacattttggttgttgtcttagcattgactctcttgtcacactgtgtgtttatgcttgatgtagatgtagtatgtgtcttctaataggttgtagccctaaagttctttatcattccctcaactatgtttcagcaaaggtggtcttgttcatctcctttgtttgatagcgaagaaggccttcatcaacttcttagctttacagtgtaggaggccttcaacatcaccttaaatttgcagcggaggaggcctccaacatcccctaagctttgcagtggaggatgccttcatcatcccctcagctttatagcagtggaggtcttcatcatctcctcaaattcacagaaaaggaggtcttcatcatctcctcagctatatagtgaaggaggtcttcttaataactgtcaacaatttgttgaagcagtcattggctatctttggttaattgaggatgtgaccaactcccaaattagtatacttaagatggcgataatgtcttcccagtcttgggtgcaccgtagagtgattgtaggtgcggtct

SEQ ID NO: 267206 - DNA, 683 bp, Cannabis indica
atataataaaaaatatttattagtataattttagtattgtggttggaataaaaaaaaaaatttagtgttaaaattatacttttttttttaagtgttattttgacactatatttaaatttgtacattgaagatgccttactaatttcgttacccaataatgaaacaattaattctaaatatatcgaaaatataaaaaggtgcattggtgcaaaaatgagtgcaacgtggaattttggtgtattttagatataaataattggttaaatgataaatcatatcatataatataattaatattggtttgagtttcaaatgtgtttggttttgatttgatatagaagagtggacttgtgctcaagtgtagttgcatgtttgtttagacccaaaaataaataacacaatttccaacggacaagacaattatattattaatattcgtttgtttatttttaaaagttagtttagtttgacactaaataaatagatttaatattaaactctacttcccatccgaaaagctcttttatttcttaataatttctttttagtgggatgtgattaaatgtgatacaattttacatttcatacctttcactgtcctccttctctaacctaatcaccattatatatttatatatatatttagacttgtttaatatggtgtaaggtcttcacaataatag

SEQ ID NO: 267207 - DNA, 1647 bp, Cannabis indica
aaacagatggtccaaaatggtatttacccaaaatgtatttatagctaatctatttatttaacagttattattaatatactgataataattgaacctacagaggtgaaagcaggagggagcagtatgggaagtcattttcgggttacaacatatggtgaatctcatggcggaggtgttggttgtgtaattgatggagtaccgcctaggcagcctctttcccaagctgatttgcaagctgatcttgataggaggtaagcatgttaaaaagatttatttagttggagtgggtcggagctctgatccgaaatattcggatacttattggatcttggatcaaattcgttctgtcccgcctaatttttttcggattggatctgatatgatccaaaaaaacttaaatcaagactcttacctcggacccagaccgaacccagacccaaacccaagacctaggcctagatccgaacacccgaacccagacctgaatccaaacccagacccagacctggaccctagacccaaactcagaaccatgacccgaacccgaactcggacccaagacccgaacctggacccagacccaggacccaaaagcgggacccagatctagacccagacccgagcctagacttggacccgaacccgtagttgatgttagggacccgaacgcgacccggtgttagggacccagaccggacttggacccgagagccaaactctgacctagacccgggatcgaaccccaaacccgaacccgacccgtagtaggtgttagggttgagtttattgaatatattataactttacacaatttattaatacaagtcaataccaaacataatattgtattaaataatactaatacaaatgatataaattaaattaaaattcttaaaaaaaaaaagagtcaaatcagatccaatctgaataagtcgggtcgaaaatgatctaatccgaataagtcaggtcgaaaatgatccgatctgaataagtcaggtcagatttgatctgatgtgagtatctaatctagtggggtgggacgacgaatcattacatgatctggatcaggtcagatcatagccggatcagatccaaaacgccatccatctacacacctaataactaggaggtataatagttgcataaatactctaacgaaaaaacctgaaactctctaaacgttacattaacatttaacactaactcataaaataattaactaattatgattttttttcttaacatgtatatgtattaatttgttttaggaggccagatcaaagtcaagttgtatctcctaggaaagaaactgacaagtgcaaaatactttccggagtttatgaaggtcagaaatcaattttaatatataattaattagctatatagcttaatgatctaaataatgaaactaataatataattgtgatattttatataatgcaataatgcaggaatgactactggaacacccattaacatattcatacctaacattgatccaagagaacaagtaagtaaaaatgtggtgcctattccttcaagttttattattttttgcctccatttttagttagggattaatttaaaataacacaaaaataataaaaaatgataaaaatatagttgaacgaaaattttaattttttt

SEQ ID NO: 267208 - DNA, 1213 bp, Cannabis indica
atagaatgaagtcactatgtttacaagaaaaagcatctcagatttcaagggctgaatgaatctgtgcaattaagacaagtcacataatagagatgcctatttcttgggttgcaaaagcttttagaaaagttaatactgtttggtaaacaaataaataacagcttattataaaaatttactcaactaaaactgatatcaataattattttatatatatttatttgattatgacagattatttaaaacaaaaatatttgaaaaagaaaaaataaatatcaatataaaaagattatcaaataaattattcaaaaaaaaatattataaagttaaaaacaattatttttgtagttatttatatagatgcttctcacgttacttgttatatgttgttttataatgttatttattacatattactagttttatatttacattttacctagaaatttgattatagaatttactgaaaactgctttacaaaaaaaaaaaaaactaaaaacactttttatttataatttactaaacacttcatcctttagcagatttccacatcatagctaaaagtgcataaactagaactcggccaaactgaccccaactcttttttccatagaataactcaataaagcataaatataatacaagcaaatcaacaaataagcaatcataatccaactacaaaagtcactgttatgatttttaagataaaaatcaaatggtaatccttgttgtagatgtcaatctaaaactacttccaaaaaagtgaaaggtaaaatttcagcacctttgagaaaaatgatccacacaattcaggagccctgtaccatcttgttgctacatagtcctgaaaatataaaaaattagaataataattcaaagaatacaatctaatttatctatgcttttatctttgttttttaacatatggtcctcgaaaaacgaatgctaactagttgattaagctagaactcactgtccaaaatatagctgtgggggtatcattgaaagctactcttgcaagaccaaaatcacatatcttgagtttgcagtcggcgtttgccaaaatattctttggctttagatctcggtgaaatacatttgctagaagaccgtgataacaagaaatcagaacaggattgctatttttaaaatacaccaagtagatggaaatttcgaacatatataagacccagcataagactatcacctgtg

SEQ ID NO: 267209 - DNA, 761 bp, Cannabis indica
ttttttaaaaaaaaatccataaataactcttttgataaaaaaaaaaatcatattttatggtatttttctaagttttgattatattatattatatgatgatactactgcgcaaacaataaaactaaagtatactttttctatttaaatatattgctttcaaaataaataaataattgtgagaaatttcaaacgatatactaaatttttatggtatttttctaagtttttttgtatgaagcatttttgaaaagtttaataaccaaaaatacgagactagttacatactaaattatagaatattcaggaacaattatatcacgtggataagttgaggaatacctattttttgtatcaattaattaaaaatattctcatattatatttcattaaaatgtacctacttttgtgagtgtgttgcctaatatactctcacccttcacttaagtctagcacctaattttcattaacttaagaggtataatgggaatatcatctataaaagtgggtatatctcaaaaaatataaaaataaaggtaaaaattaaatcatataaagtaaaatgagtatacaatgtaattttctctataaaatgtgtatattttagcccatttaaaaaaggagaaatttacatcatttactaacttttccaataatcttaaaattatactgtgacacgctcaatatcacatttttactgttttttttttttttaaatttcggcagtatactgccttgatttggacattagttataagttttta

SEQ ID NO: 267210 - DNA, 3135 bp, Cannabis indica
caagcaattgataagatgaaccaaaacatacaaatgaatgaaaaatacttatgtttctttattgatattgaataaaatggattacattgaaatggagttttatttagggcataaaacccaacagtaactagggaagaatgaagaatttgcagaagcacggttacctaggggatgtcaaattcttccttccctctccaacccaactggcgaccaatccaagagaggggtactgcgcttgttcgggcactcacactaagcagggtgctatgctgcccttgcttccgtacttccagagaattgcggattactaccatctttgcccgacccagtttactctgaagggcatcaagtacttatgtgccctgttcatcctttatgccttacaaggatggggtgagctatccccgcatgacaccaactggctctttgaattgaaatcaactcccaagcagagtaggtcggggtatttctacttttctcagatttaggagaagtggttgacgggcaacgtggacttcaaagtgagcaagatagggaactttgtggatgagtactacttcgtctaggggatggacaccgtccacactcagttccagcagatacagttgtactgccgccctcccttcacattggggctcaagaagagggcacaaaggattctccaactgcctgatgatgctcggaacattactctcctagccacttaggccaattatgtcaagtacaaacttttactagaatattttctgccaaggcccgtgaagaaggcaaagaaggaaaagctagaccaggacgagggaactgagcaagaaaaactgagaaaaaaggggaagaaggcccctccgagtgactaggcaccagttgagcgtgctatcacgattagggaacctgatagcctgtccggcctctgccccagtggagggcaaaggaaaggccgtcctgacaaagtagtaccaggaagactcttctgacgacgaggcaccgtctttacttgttcgagagaatgcttctgccaacgtgcagggtatttttagcttgtatttatttgttccatgacatgctttatattatttttttcctctaactttcttgtatgtttatatgcagtcatgtctcagaaagtgctccaagctcttaagaagaggacaagtgatagttcgggccagactcccctacccaaatgatcgtgaggtgatgaggcttcgtctaaggagaaggtgctagtcggagaagtgatcgacctttttgaggtggtgcctgccgtggagcctcccatccagaaagtatataagcccaagagttccaaaggggggagcttagacgtccggtccaaccaaggcctcctcaactgtcgtggtgctgaactagaaggccaagaagggccaggacatgctccagtactaccttgattgctcacttcctgaggtgagcgattagttttccggggcggacaatgggccgtctgtggagctggtgattggtggagtcctgaaggaggcaacttgggtaaatattttcttctttgtttttattgtctttttaccagttccagttttaacattttcccctgcaggtcaaactgaagatggcctacgccaactcccaggccaaatccacggttgcaaagaatcttgccaccaccaacactttgcagagggaggtggatggggctaacaagaaggtcgtggacatgagggccgagctaggggaggtgaacaagaagctccttgttgccaataatcgggttgagaagctgacaaaggagattcaagagatgccctctactgcccagctcgaggcagacaacgaggcattgtccaaggaggtcaatgcacttaaagatgagagggagagtcttcgcactcttctttcaaagctaaccaaggaaaagtccgacctagaggaagacattaaggccaagcagacgagggaagaggagctcttgaaggaagtggaaaacctggaaactgctgccttggtggtcttctatgaattttggaaggccaactcctcaggaaattttgattacctcagagattccaaagaggcatatcttaattattgtgcaggtcaggcggccaaagaaagccttgaggcagacaatcccacagttccaaccgacaagagcaatgagacccctatcatccagattgtcaagcctctggccccttcaaaccaagttgatctgtacaaggagcctaggacccctgctgtttgaaacatcttttctctttttttatacatccatgggcctttattagagacaaaatgaccggccaagcagttttcaaacttgggttatatttctttttattttcggataactagctgaccgggcaacctttaatcctgggtttaccgtgatttgttatcttttttaatgaataatttcccttgttttcgtgcaaactattatatttttttcagcttgttatttacttttaccaatgctttgtacgtgtatagtttcccctaagtgatcgagcaggcttatgactcttggtcacttgcatttcacaagtatggttttcgtctgttcagatctttgggtcgagcagacctttgtacgcatttaaaggtaaattaataacttgctaatgaaattgacacaattagaatttaattaaacatctttattcatttcttggtcaaaacaatcttgttactatagtaacttacattcataaagctattacatgatctaatctgatctttagctaaatttaaacgtaaaacaattgcatttataaaagaaattgtgcttttaaaggtggtcatctaacctgagtacttaattattctatccaaaccttttggtggaatctgtttagaaggccatctacttaagagtaaatgttcttgctttgcatacttaaagtggtcatctgacctggtacattcactaataatactttctcaaatgttccccattccaatacctaggtactagaatgagattcatattttcgtcatgccgcccaagtttgtatgcccctaattctaaaacttcgaccatctgatacggtccttcccagtttggttcgagcacaccaacagtgttgtcttttggttcaggaatactcttatgaggaccatatctcccacaaaaaattttccttgccttcacttgcttgt

SEQ ID NO: 267211 - DNA, 2771 bp, Cannabis indica
ttagaaattcatatttaggttgttaaaaacatacttgttagtaaattttgatcctggtaaaacatattccaacatatggttgactacttcaacactcttttctcttcgtctttgctggatgttaatgaggtaacaaatgctattcctagagttatttctgatgaaaaatatagcttgttaatggaaccaatttcggatgataaagtgagaagagcactttttcaaatgcatctcgataagtctcttgcgcccgatggcatgacaccaggattctttcaaaaatgttggaatgttgtcggtagtgatattattactcaagtcagaattatctttgatacaggttatttctctcctctgttaaatgaaaccaacattgttctcatccctaagaagaaacatcctgagaccatgaatgatctgcgtcctatctcgctttgtaatgttgtttataagatcatatctgaggtgcttgcgaacagactaaaggttgtcctacctatgtataatttccgaaactcaaagtacttttatacaagggaggttaatctctgataatatcatgatttcttttgggataatgcattaatagaagagaaagagaatgagtaaaaatggtacaatggctttaaaacttgatatgagtaaagcatacgatagggtggagtgggcttttcttgagaagatgatgatacagataggatttccaagaaaaatggtgtctttgatcatgtactgtgtttcatctgtcacatataagattactcatggtggtaatgttctggggcctattaccccgagtagaggaattcgtaaggggaatcctttatccccctatctttttctaatatgtgctgaggggttctcttcactggtaaacttgtttgtgcaaaaacggtggttaacgggttgtcgagttgtaaaatgctctcattgtttttcacacgctgtttgctgatgatagctacattttttgcaaagccaatgagattgaagtggctaatgtgcttcggctccttcaagcatatgagtgtgcttcgggtcagaaaataaattttgccaaatcctctgtgtttttcagcaataatgttcatgaagatgctcggaatcatttgtgtggcctactttgtatggcagttgctactgataatatatagcttttacttgggtttgccttacactactggttagaagtaagaatgctatattgggttttctcaaggataaaatgataaagaggattcaaagttgggagactagaattctttctaaggccggcaaagaggtgttgttgaaatttgttgcccaatctcttctaaactatgcgatgagtgtgtttctccttactaaagaaatatgctctaacttagaggggttgatggcaaaattctggtggaaatctaagtgatcaactaaaggcgtaagctggatgaattggcggaaactatgtcgtcacaaagatgctggggggcttggttttcgtaatttgagggagtataacttggcttttatggggaagcagggatgacatttgctcacaaatgagggctcattggttgcaaaagtttataaaaactagatacttctcgaaggcaagttttttttctgctgagttgggtccgaatccaagtttcatctggcgtagtgttttggaggcaaaggatctaatccaggcgggtgttagaagatcaatttgtgatggtaaatcaacttcaatcttagaagacccttggtttagtggaatggataataagtttgtgacaacttatcacccgagtcttgtttatagattgtttgacagtctgttacaagtggggataagagcttggggtgttgatttgatcagagacattttcaatcaccatgatagagacttaatcccttcaattcaattgagtgactctagctgtggagattgctgatcctggtctaaggaaaccactgggatttattcggtcagcagcgcctacaagtatttgcagcagattaatggtgattggccgaatgatggtgttgatagttattggaagaaaatatgacagctgaatgtccctactaaagttcagcacatgatttggcgtgttatttctggttgtctaccaacaaaggtgcaacttgcatgttgatcttacatgtccccttcgcaaccttgcacctgaaaaatttcacatgttctcttcaggtgtgattttgcacattcttgctggaacatttcctctgccgatgttgctggtgtaaatgacagatattttggcagctggttttgtgatcttttggtaaagaatcggaaaccagtggcagaggaagctgctatgattgtgtggcgtatttggatggctcgtaatgatgtcttatggagcaacaaatcaacaaaagtttctgaggtgattcgatcggctaacactactcttgacaattggaaaaatgctcaatctcatggattcaccccactactaaatgttaattttagtagtcgtagggagcattgggcgaaaccagttacaactaagttcaagatcaatgtcgacggggctatcttcgaaactgaaaaccggtttcgggtttggctacataatccgagacagagatgctaaatttgttgaagctttctcaaggagcaaagttggaatggtgtctcctaagattactgaagttgttggtgtgaaggaggctttgaattggattaagacgagaaatttgtctgatgtggaagttgaaactgattctttagtagtcgttcaagctattaacggctcggttcaaatgccatctca

SEQ ID NO: 267212 - DNA, 1244 bp, Cannabis indica
ggagaacattattaagcatagggttttttcaccaataatattcattaggcaacattgagaaacataaagatataaaagaatattcattgctaagaagttcattttgaactaagaatcaataacaaaataatagtatattcattaatttcgtattttatatgcacatacatatatttcagtttacacatgtaaatgtcttacaactttatcggtctctctcactctctttacacgacttctctaccttcgaatttggtctctgaggcttctaaataatagtataaaagatcgtaacaaacttattgtaaagtgattcttagtcccacaattatcgagattttgttacggatataaccaatacttataataataataaatatgtaacaatcacaccattctataacaatattattaatcttatcatactaataataatatcacaaaataatttaccatattatatctctaataataataataatgtaacaaatatattagaccataatataaaataaattcacataattattattattatactcacaataataatatgaacaaaatatataattaaattatcagaagtaattaattatttacttaacattccctacattgcaaaaaaatatattctaactcaagaaataatattttttattgtcacaaaaatctcatatattaaataagacttcttaatatgaaaattaacaaagtactgataaaagaatatttttttacaaaattaccctttcgagaaagaggatattacaccttgtttaagtcagagaagtctatataggtttctcatgtcctatttggcatgggaacaagaaaaaaattacatatccatgagggataaaatacttctcttatgaagttactaattaacaatttttcaacctctccatttagagcattttatcgctcgcgatccaatgctcgtcctttctgacgcttcaagggataagaagaatcaattttaaggtgatggtatataaaatttgggtcaatcccgaccatatctgaatggctccaagagaaataatcttagtttgtctcctaagatgtgttttgcatcacagatactttttaaatggccaatttcttacagccggtttgggtgcctgtccttctttgacttggtgaagcattgtttggggaaaggaacttttagcaaagggcctgcgttggagagtgggtactagtacacaaattaattgcaaaatggatgttggaattatttt

SEQ ID NO: 267213 - DNA, 1277 bp, Cannabis indica
atttgaaaattgaagtcatgacattagttttatgcaaattaaactcaatttccggttgaatttttagtttcgtagtagttttttctactattttttttttcatgaattccaaatagcccctgttttgatcgattctggtcgtcttctcaagtgaagtcgcatattatggtggttctcttttggttgatttttgtttcggttgcattgggttgttgcgtggttgcccgatagttgcacgatagttacccaggaagcatggatcttggattgaaagtgtgtgtaagtagtatttgtgtaattttttttatttgggctgtatatttatttatttggctagctaaaaagtatttttgtaatattattatttttttttagttaaaactgaataaaaaacccttatttaaattagttcttaagaaaaatagcttttattcaaacatttacaaagataatttaaataagcttaataaaaaaagacctaaaattactataaccaatcaacttccttatttcaaattctttttgtttaagaatcaactatacttcatcttaattagcccatcctattttattcaatgaaatatgtatttatatatagtggaattaaaaaaatatatataatggaatcaaggtgcaagcacgtttgtaacattactctattaagaatgataaaaatgattaaaatgtattacaatttgcatagtttgaaggaggaatgaaaggttaatggtacgagggaccttgcgtgattgttgttatctttgggacgttggcattctggcactattgagtttgatagttaggttcttcaaatgaagttgaggaactggtgaatatgacaagcaagttgttaagattgaggattcagaggagaatgaagaggtggcaactaagtttggggcacaaactcttctaagaagggtggttcccaagtgtgaagtgaatggcaatttgttttaaagtatttttagtaggatgtgggaaaatatggtgaattggaaggtagaggtgattgatgctttatgttttaagataaattttgattataggaaggatgctaaatttgtactggacaaatgttggattattttttttaaaaaaaaaaatcaatatgtaggcttataaattaagacaatttgtttgacttaatattttaaattggactaaataagttgtctaaataaatgagctcaataaacatcttatttggtatgtattttgtaatgtgtaatacccaatagtaaatctaattatggtttatggggctctaattagtt

SEQ ID NO: 267214 - DNA, 591 bp, Cannabis indica
cctgataaaatatttccaacatgtatgtccaacttataaacgcgacaaggtcagaccactttagcctagaaaatattattttacccaaaagatgaaaggtccatcaggattactctagatactctcatgggataatcattgatacttgaaattgaagagatattcaaaagcctccagatatcatcctacgtggcgtcctccaaacacaaagccccaccatgacaggggtttgtcccctatgtcagacttaggaagtgtgctcgccacaaaaaggaaactacttttttttctaatgccatattctctgaaattattggtgccaacaaggtcgcgcacgacacatggcatcaccaaacagtccccactcatacgaatgattgttaccttgtgaattggacctcacccaattggcctaaagttaatatctattgtattttaccctctcaatgggcctagttgacacctttaaaccttatcgggtttgggtttacccatacccgattctaacagataaatagcacattatcccttcatgcaaagggttggaaaattatttatgatatagagagctaataataatggctatacagc

SEQ ID NO: 267215 - DNA, 561 bp, Cannabis indica
gctaagaagcatggataactctagtacatttagtaagatctttcactgccaactgtcaacagtgttacagtaccacatacacttgtaatgtacaaattcaaaatatttggcacacatgccttggtcatccttctgtactcattacaaataaagtgaataaccgagtgacttacatgctaccttagtcgagtgacacgcatgcaagtcttggccgagtaacatgcatgcaagtcttggccgagtgacttgcatgcttgtcttggtcgagtgacccttccttcatgcatgtcgagtgacatgcccatcatggtggtcgagtgacatgcatgcaagtattggtcgagtgacttgcatgcttatcttggtcgagtgacccttcatgcatgtcgagtgatcatcccgagttacttcttcaggtgtttgctgaggtgcaaacatggtcttgcattcgtagtaactccttcagtgtatctccactatcctcctgattagttgctgactaatttgaaatttcatcttgctaatttttagagttaacagtagcctattaaaataataaac

SEQ ID NO: 267216 - DNA, 1176 bp, Cannabis indica
acgataaaacaattctataagcttttaactgatatatcctatatagaggaagacattgtctatttaattatcgaagttggcttgttattaacatctttccaattgtttggaagataaaaaatcttaattatgttagttgattattatgttttaacattttttatatcctattaactcaaacaaattgaacagatcgatttttcctttttcttattttagaatctggcatcgaatgggcatctggctatatatatattaattcctctattacattttgaaataggaaaatagaaaaactatatatcgatttctaacatttctctctttttccttttcttcctcctttaggcaagacaagaagtaagaactagtaagtgtaaaattatgattatgaacattgttgataacttttatttttgttattattattaaatcaaaatggtgaaaggaaggcaataataactaataagaatataatgagattattatgtgtattgacatgcagatctatgtacatatgtattgatcgaaaactcatagtaaatatataaaagaagaatatggttggtggtgctattggtttggttgtggtggccgtggctcttatcatatccaatattccatcagaaacagcagcgataagagatgtattcccccataaaccagcaatggtatctcctcctcaagcctccacacttgcagataatgacatctgcaaaactctggtggagccacaaggctacacttgccaacattatcaagttaagtaccgctttaataaatttttacattataaaccctatattaattccttcttacaaattataaattcgaaacttgtactctgcatatgcgcactctgtataggtggtgccatatttataggcaaatagcaatgctgatatagtaaaacaaaactaatatatatgcgtgtgtaagctagtgattaaggcatataaattaagtagtgggtgttttgttacatgtggtggtgtatttgtacgtaggtaacaacagaggatggttacactcttgggatgcagaggattccagctggaaggtcaggcaagaaagcaaacaaaccacccgttttggtacaacatggggttctcgcggtaatattacttaattaatcaactgatgcttttcaattatatacgtgtatgtatgtatgta

SEQ ID NO: 267217 - DNA, 2063 bp, Cannabis indica
acttctgtttctttattgatgttgaatgaattggattacattgaattggagttttatttagggtataaaacccaacagtttactcttcgaacttcctttcttgcgcgatcttcctctttccaagtacacttcttctttcttggattccttctccaattgtaacttgaaatctattgacaagagtgcagcaataacatcagtgccatacttgatggctgccttgacttcgtaatatgctattagaagtgatctcaacaagatgatgggcttgctttctttatcaaccttgtgatttatgttagccaaacctacaataatctcattaagtcaatcaatattctcatctaaagaaagggaagaaatcattctaaaatcgaataacctttgtagcaaataaatcttgctagcaatcgatggtttcaagtataattcttctagtttattccaaacaccttttgttgtcttctctgcgatgattttccctcgaacaatgtttgatagatacatgatgatcgtgtagtacgccatctcctctatttctgcctttcctctggcttcttttctgccgacaacttttcgtctccaagaaactttgaaactttctagtacactacgattccttttagactttctatccatagtgcaaagtccatagttccaacgaacttctccaattcgaatctcgccattgatgacattcaaagtttcttcaagaattacagccaaaagaatcttgattctgcgatcttgatcgattaccaagctctaatttatggaaaaattatgactaatggtgcggatacaagatgatcaaaacattaaacaatcaaacaattagcaataacaagattatcaaatcgagaacaacaaccgacagtaaaacaagggcaaacagagtatgtaaaaaccaaaaaacaataactgcataaaataaagaaatcaacactaagaaatatactggttcaagtcttatagattgatatgatctatggctctactccagttctagaataccgccgtaatcttcctttattgattaagcaagaataggtacaatacagtcgagacgagattatctgttgagttctctcaaattatttcaactctgacactttacacccaagaatcttcttcatctacagaagattattattacaaaacccaaacccgatctctcttttctcttcacctttatctctacctcttaatctcatctgaacaaaattctcaaactcatgtatctcaatcgtgtatttccagtccatgttcttctattacaaaataactagtcaaggtggtatttatagttttaggatcaagatcctaaagttggtggttgcaagaaatgaggttgttaagttagttagaaatgactaacttaaccaactcctcatttagcatagtacactcgttagcttaagtaccagagcctccgaaaacgtatatgagctcccggactcacagaccacggacactcgccgatgaggcttccagataggatatagtctgctggagtcgactatctggatctcacattccaggagggctaactagccatctggaactcctttccaggggaaggctagctatcctgaagactgaacccagagaggacatagtagacatccgggaactcccttctggactcgactatcatcctagaagactccttccgagactggcatccgtgtgcgacaaacttctagaaaagacgattgcgtagactttttcatttgtaggatctataccacacctaggaagtataagaatggtgataaattaatgaaaatattagttgctaactataaagtgtgccatttgagtgagactgtatttggccaccttgatttgtgtttacttgtatatatatatagttgtctttttattaaccaagttttactttctctctctccctcaaaaacataaaaaataaagaagaaaaaagaaagctgatgatttgtaaagttgttaagtgggtgatgatttgtgttagatcaactcattactcaatcatgttgatgttgggttttatgccctaataaaactcatttcaatataatcag

SEQ ID NO: 267218 - DNA, 508 bp, Cannabis indica
aatgaaaattattgttattacttgttcatcacttatttgttggtaagtaaaaaaattggttggtattgaatttattttttagtatgaaaacaaaatttccatgcttatcttaattaactctacaatcattagagtccctatatgaaataatatgggaaaaacaatgactttatatataaaagaaaataatttctttatttattatttagcaacgatttatgtaatcactcttctttgttttttctttttcaaatcttattgttctttctcaatttgacatattggctttttggcttcttttggcaaagcaatccttgcagatattaagtggattcaagcgatcaagctccctgttttgactattgtctcggattgccaaagtgtggttgacaaaatttatagctcttattgtaataactctattcttagtgatgttgttaatggtattagaaattcattgttgttcagtcctaaatctgtctgtgctttatgttccaagagattgtaa

SEQ ID NO: 267219 - DNA, 581 bp, Cannabis indica
acacctcatcttgaggatgtatttatcgataggagtggatcctttctttgttgattgaagcatgcctcggagttgcagaactcttgcacaataagtgtttgagaaaagttaaagcacaatactcgggacatgacccatcatgcaccttcagagatcgagttaaatagccaggtcagaagaaattgatctaagcgtagcaattcagctagctctgggttgggaatggttcttaattcatcagtcgaatcattgatggtgggaggaggtcttgtgcgtgatctaatgagaaaacctttcagctgatgtgcacgaattgtggagagaatttgagatctccagtagaagaagttgtttcaatctaatcatagagtaagagacacaatgtgatttggaataacttgaatcgtaggagctagagaagcttgcatggtggcagatgatgaaccttcaagtctatgactagaagcagaagaagatgccatggaagaaagcttaagaagaagattcatacaaaaaaaggagaaaaaaataagccaataagaagctttgatatcaagtttgagaataagatgagaaaatga

SEQ ID NO: 267220 - DNA, 581 bp, Cannabis indica
gaggagtttaaatttttgaaatgatcattttttttcgaactgcttataaataggattgaaaaccttcaatattccttttagccattttctctctcgaaaaccagagcaaaaaatttccaggtgactttttctctcaaaattttcaaaggattcctaggaaaactcttgtcaacaccatccgagctgcacaaaaaacctcaaactagtgagtaagttctttatttatttcttttatacacttgcatgcttaattttctggatatctggctgcgaattttgactgttctttaactgttctaggataaccatggaaatcctaggttgaaaatttagaaatcttgattgtgcttaaccacgacgtttgattttaattgcactttgattttaaccttacgatatccattttcacttatccattaggggtttagtgagaatcaaattccaattcgaagttttgaacttctgggttgaaaattccgtttttgagtgaaatttcttcttttgattcctcaatcggacctgatcggtacattcaacctgtttttatttgttgccccaaccaattctcattttcttgtctc

SEQ ID NO: 267221 - DNA, 1366 bp, Cannabis indica
ttgctagttttgcagatcatgctcgttgtagcactgttgggacagtcctggatttaaacattgttgttggttaagtgcagcaggatctagtgcattggtcagttgcagtataggctgttgtttctctcttcttcttggtttagctaaacggtatttatctagataggttatagcttgagttacaagagcagatgcagcacaacttgttccaccatgaagtacacaatttctatcattccatatgatccacataaggcatactaaagtttcaaatccagccttctccatagttgttgctttgtggattacataatctctattgaacataacatgagcacaattaaaatcaatattaaattttgttcgctcctaaacagccgtagcaaacttacatgtaaataatgcatgcccaatcgatctccaagcgctcttacatcttgaacaagttgctgaatcaataacctttttttttatacagagctttggcgacaggcaaagcttgttgaatgactctccatgcaaagattttaatcattggtggtaattgtagtgccaaaaaaatttccaccaagtgttattgttgtttgaagttgtttcctcatttgcttcggagattgaacttgctagatggaacccgaattttactgaatagataccggttctaacacgaatacatggaatggaatttgaccaaagtactctttgagaagaggtaaattccattccatggtgtcattgatgaaagtagaaaccggaagacatggttgtccaatgtagctaattggccaaaattcattatgtccagggaccagggatccaagccacttctaacacgaataccattccctattttgtaccttagacccttcaaaagcaattctcttctccaaagaattccttgccatgtcaatgatggtgaatgtccaagatgtgcttcaaggaaagaatttcttaagaagtatctatgctttaaaagtcggcttaaaagtgactttggcatctccaaaattctccatgcttattttacaagcatagcttgattgaaatcaacaaaagaacgaaagcccattgctccgtccaattttgacttgcataacaatttccacctttttcaatggatctttgacccatctttgtttgatcccaaccaaaattttgtcttcactgatacaatttggttacaaaatccaattggcaatcgaaagcaactcatagcatacgttggtatagattgtaccaccgcctttaataagacttccttaccaccaatggagaagagcttctcattccaagcatgaaggagcttccaaattctttccttgacgttattgaactaattcttttttgtttatgtcgttgaataagc

SEQ ID NO: 267222 - DNA, 806 bp, Cannabis indica
gctttggtagttaattggttaattttttgaaccaaatttacaacaaattttacactggaaagaaggagatgaatccccaacaaataataaattatgaaagcatggcagcttcttttctcttcgagaagaaagccaaaggaaaataaccagctctactctctctgattccccaaaacaaaatatttaaatttaaaagaaaataagatttagaaagaaccaaaccaacaaatggaacgcgagaccccggcacccagttacgccaccgacgccacctcaccactcctctcaaacagcccctcgaggagccgccgctacctgcgccggcctccgactcctcttcgtggcgcggctcggttcctccggcgcgccagcgggcgcggtatgatgctgcgtgagccgtccgtacgtgtgcgggaggctgctgcccagcagctggaggagcgccagagcgattgggcctactcgaagccggtgatcgcactggacgtgctgtggaacgctacgttcgtggggattgggatcgctgtgctctggcttagcgttaacgagaacccttcggtgccacttaggctttggattattgggtatgcgcttcagtgcgtgttccacatgggttgcgttgcggctgagtacaggaggcgccagcgcgagaggggtggggaggaattggaagggagtcaaggttgggagagcggtggggatttgaattctgggtctggaagtgatgtggaggatatggccgttgaggagggtctgttgaagctggaagtggaagtggtaatttgaatactggaaatatattaatt

SEQ ID NO: 267223 - DNA, 1567 bp, Cannabis indica
atcctcctagttgattatgacacatgtttgattgatgaaaacttggacaacatttaccccaaacttttgagatcccttggatcacagaagcttgctattgttaccggtgttgacttttgacatgtgctgcagatttaggtcgcggacacacctccacatgagctgtattctattaaggatataaacggcatttgcttcctcttgcgtggtaaccacgcaacatgccaggaggcattttttttttgccccttttcgtatgtggtaaggtgagtttagcaaaaaaaaggtggagcgcaactggcgactgggtgacgtgcagaaagggaccttgacattttggtgggccccaaaccaatcatatgggacctctcatctccctagccgttggatttactgcaaacactttgaaccgttgatctctcatagtcctttcttctttttgaaataaaaactgtctttggcggtgttattttttattattttttattcaaaacttcacattttctctgtaacttctctttttctttttctgccatcttttgcatgcaagaagcattataggatctgatctagcgtttactcatcattcgcacagaactcttcccaaacattgctcctcttcaattcgaccagcgaattccttcttcagggggaacatttgatttttaggttaactgtgaccgttgcatcgactgactctaaaaattttaagcaggcttcttgggcacaccacttatccttttaatttgacaagtaagtgcactaactccctatctgaatttcttttcatttcacgtttagggcaaattcttgcttaggttagggctagaactgttcacgtggcgtatagcaggatagtgtgcacgaaagaaactccatcatcgtacccatttttcatttcaaaaggattttcttttcccttcatagctatggatttaaaccaagaccccctcgccggtgtagccatgtttgtcgaaggtgaacctactccgtctgttgacaggtctttcgtggatcaggaccaagccaaggcccccatggcaatgccttagattggggggccttggagtctatcccaaaaaataagcccattgctaagagagatgttcctgcagatgccaagagaggcgaaagggctaaaattcctttgctggcgcaagtctgtcttgagtccatatgggaaatggactagaaagccaactactttcgatcttatgggatgttgcggtgtattctgaggttgctggtctccgtaatgtcccttgactaatgtggcacatgctttctgccatgggagaatctgcaaccactagtgttgatgggtttagtgcatgtagctggtctcatatctccagtggccctcacctccccttaagaacctattgagattatataatcagaaatagtaaaataaaaacatacttgctgaataattttgcgcttgttgtgaccagtagcgaggtcatccgaattgacaatcttcttgatattgctttgcatatcacggaggagcttgaattgaacatcgaactgtagcagagcgtgactgatctcattgagacattca

SEQ ID NO: 267224 - DNA, 692 bp, Cannabis indica
gggtggaccacttatagggtaaaacaggttcgagtcctacctaagaaagaaagtaataaaaaaaaagcaaaaaaaaacactagtctttattgagatcagaaatcgatatgaagtgaacacaaagctaattataacatttgtattttatcaatttgttaaaagaaaaaaagaagaaaaaaaaaaataattcattatggtgacgtgctggaaaaaattaacagctacgtcaagtaaaaaataatcattttgttgagaaaaaaaaaataaaactattatcaactaagaattttttatattattaataagcattttaggctatcattttacatttttaccctaaaaaaattaaacaaaaatagaaatcaaaactttttaatttcaaaaatatggactaaacaaccaatctgtgtaaacctcatccttcttcgttacccaatctaaccagaccgaactcatctccacgattttcattctcaaccctgacaattcagttcgaacgaaaatttaccaaggatggaaaaatcaagggtccaatgtagatctcaattaaaaaactatttaatcttggaaaatttaaaaacaaaaggtaaataaaaaaaaaaagaaaataaaattttttacctccattaatacaaaaaaaaaatacaaaaacaacctaaatccaaaaagatgaatcatactggaaagataat

SEQ ID NO: 267225 - DNA, 1878 bp, Cannabis indica
agaaaaggaaatgaagctgtactaaggtaaacagtgtgtcataacatcttttgtttgtcccaatattaaaagaagtttcatatttcagccaaaagttttggacctcataaaagcatttaatttgcttatttaaaagattgaaatgtttcactatgttaattctgttttgggtcattgagaagctggattacttattgaaatggattggcttgcatcattaactttcaacattattggattatatggctgagtaatccatgaggtgttaccaataaaccgcgatcaataactgtgtgcagagcgcgctacgaagatgcaaaatttttttacgagttagacacgcgaaaaagattttcagaattccgaagtcaacttaaggggattcttttccatgtaaagctattttcctaagtgaaaacatattttcttatagcttaattgttgaatgaatattaaaacaaagaacaaaggtatctaacttctcgtattatattccaaaatgtgatattaaacaggagaagctaggtacaatgctggacaagatgtttcgtgtacaaaacatggttgagaaactaagtttggccctgaaaattgataacaatatgcttcaagttgccaaagatgcagcatcacttgctatgtctgatcttgctactgcagtcgttacagagtttacgtctctttctggaataatggcccgtcattatgctcttagagatggctattcggagcaggttgtttatcactaatgttcttgtttatatgtatttaatgtatatctgtagccaaggattaatcctctttgattttgcatttcataattgcagatatcagaggctttgtttgagatcactcttcctagattctcaggagatctacttcctaagactgatgttgggattgttctgtctattgctgacaggtaatacctacttgataggttccttctctaatctttgatttttgcagttcattgtttacaaaacatgttttattgtaaactttagtgatcgctcacatgtcttacaagcttttggttctatttattcctgataaaatcagtttataagctgattatttaaatacttatttgtggttttgcttggataaattattggagtgaaaaatgccaattttgtgaatcacacatgagatgcttgctaatcttaacgtggaatacctgtgcagattagatagtctagttggtctatttgctgctggctgtcagcctagctctagcaatgacccatttagcctgcgaagaatctcatatggccttgtaagtagttatgatattcatattcgagtgggggccagtctaagccaagcggtccctttctcttttttcaaaaaaagtagttatgatattcatgatattttgatattttgggtgtaaactaattaaacactttacaaatcctttgccttttgctccaggtccaagtgttggttgaaaaagataaagatctggacttgaaagaagctttgcaacttgctgcagatgtgcagtcctttaaagtagaagctgatattgtagataatgtgagaaatggactattgtagatactttgtgaaacccaatattgttagttttaatctcaatgctttcagcaactatattttagaaagaagtaggacagaggtaggcactactctgccaattagaaattgtcttctcaataaatccattttgattaattagctttaaaatatgatggtcattgcttctcagcctgtaattgtaggagattagtttcaccctaagtttaagcggtatgcctaaatttattgttgctgcttattactgtgtttatttgtcatgcttcatgctgttcaattccaatgattgctcacccattgttttttcctattttcttg

SEQ ID NO: 267226 - DNA, 576 bp, Cannabis indica
cattgatgaacaaataccatatcaaggtgggatggtgaatacagctcaaaacgtcatgtgtatatgttcatttgacatgaaattcacatatgtttttattggatgggaaggatcgactaatgatgcacgaattctttcaaaatccacaaacccaaattataaatttctagctccaccttatggtgtgttatcaaatttattaggtttattgagattattttttgttaatatttatatggaaaaattaatatcaattaacattgtttagaaaaatattatctagttaattttgaatacacaaacatgtctggttttatttccccgtatcgaggggaaagatatcatttgaatcaaatatgcagatcgtaatccttcagaaaaaagggagttgttcattatcaacattcttctttgagaaatatcactgagcgatgctttagcatattgaagactcattttcccattttatagggatgaatgcagaaaaagacatatgttgatagagatgaagacattcctaaagtacaagatactactatacaaagtacacactaaacttgttggaatatattttac

SEQ ID NO: 267227 - DNA, 1509 bp, Cannabis indica
aaagatatataatgggtggtacgagataggatgatggggttgctctctataatcttttttgtccatactatcatatttttttggatggttggaaggttatagtgattcaagcattgtggaaccaatacttaatgttaaggtatgtttatgatttatataagtgctctaaataaatgtgatctagttgagttacaatatttaagatgaggttctattttaaaattaattgataatgagagtatcacatgtatcttatatattatctttcccacctattgaggctctctaactctaatattctccctcaaaattgtagttattttttacttaccatcttagacagctcaatcacaaacaaaagactggtgaaaaaggtaaaaaaggtccatgttttgtgtgtggcaaacttggacactatgctaaggattgtaagcatagaaaagactttaagggatccaaagtaaatgctatcgaggaggatatcattgccactcttagtgagatgaattccgtgcaagggatacttttgtgagggaatggtgaaattatgcaccaatgatgtaactttcaatgttagtaataataaagcatctagttctacttatatgattgagcatgattctttatttttgtggcatcttagattagctcatatctgttacatagccacattttctataaaatagatatactttctttcaaaaaattattcatcagaaaaataaaataatattaaaaaaatatgttagagtaaccaattatttctaagaaaagtatagggaaattatagttcgtatactattctttaatcttttctttttatttttacagtttaagttgctccggtggtttttatgtgagttgctatatagatttagattgtaatttaggttgcttcggttgatatgtgaatttctgtgaaaatacaaaaaaaaaactatttaaagtgtaaaattgaaaaaatcctaaaaatatatcatttattttacatcacatattaatacaaagatggtttattgaataattattaaagaaaatatatacagaatttgaaagacatgatcatatttgatagagcattagagcatacaaaaataaacaaatattgatgcattagatgaatgagaagtcacctcacttaaagcaaaattaaaatataactaatctaaaatgtaaagatgctgtaattttaatttattttctaaattccttaaaaaaataattataaacttaggtattttagctcatctcaccctctcttcattcttcaattctataaatattttcttttgataatgcttgggataactttaagtaaattttttatctttttttctcactttacaatttgtctttacttgttagtgtaggttgtgccaatgccttatctttcttccggttcttcttgaggatcttcttcgggatcttcctccaagtcttcttcctctaggtcttcttcaggatttttttcaaaatcctcttcttttgaatcttcttcttcggaatcct

SEQ ID NO: 267228 - DNA, 869 bp, Cannabis indica
atataaaaaattatgttaatttttttgttactagtttgtatcttgaaatgctactgcactttttatattagagtaatttcataaaaaaatatactaaatataatattttctctaatttttgtaccagtttgtaccttaaaatactattgtacattatataatatttggtctaaaatattatattcttactttaaataaataattaaaataaaccttacaaatttaaactaattcttcactatgtatttgttcttatatgtattatgtaaaacacaaaaaattttaaaataaccaaaaaaggactcaacaatgaatcaaacctagcacctcaacaaccatttaatgcttccttacttaccatttgtgctatagctttttcttgatatttgttgaactaaaagttatatattatattcttttgtgtgtatatatatcaatttaatttttcgggggcctccaaaatggtggggcctgcgacctatgccccggccgccccaccctctggccggccctgacccccttcttttgtaatgttccatccttgcgataagcgccatttttgggctgaaacagaacgagaacaaaagagacctttgaagattactctcctagaaacaagtttccccacaagtagtggcggacccagaatttaaagtgaggggggcgtaaataaatttaaaaagaaaatataaagtgtagttagtgtgaggttcaaacctttaccctctaacctatttaccaactaccttaaccattacaccaatgttactattatgtctataaatatcatcttttaatacaaatatatgttgtaactaattaaaatacatatacattttttttctcgattttttttttcagggggcaat

SEQ ID NO: 267229 - DNA, 740 bp, Cannabis indica
gactaactggttttgatcgagaatagggaacgggaaacgaagaagacgaatcagagaggaaactattgatatgaggacgcagaggagtcgttgttgagccacaactgcgtaaaattgagtcgctactgaaaccaattttgacacttttacgaagcaggcatcgtcttcgtcttggtcttactcctccacgttcaagactcgaatggtttttagttgtacagacgccattaacgctaacagtcattatttgcatcactctgttttgaaatcaatctggttgagatttgggaaatttgtaaaattaacaataaaagtgtaaaatttgtaaacacaatgaatttagttactatatggatttttttttcttttctctttttttgggtacatactataaagaataattagcaaatttggctgggaatttatgtcactaccgaattgtgcatgactgaagaggaaaaaattaaacttgaaacaactttattgcttctgctatacttgatcttcgtacaagcacgactctttatatagagtttaacatacaccactaacactataaaataggaccacaattacgtaaccataacaaacaactaactataagaagtgtctaatgtgtaaatgtacacaacaacctattatgttccattgatgtgaagtaccattatttaagagagcacaatatgaaatgcattatttaaggggtcttcgtcaagatgatcccctctctccttatttgt

SEQ ID NO: 267230 - DNA, 1301 bp, Cannabis indica
tttcgagtccctatacagttctttttcatcaaggataaaacgtttagttgggacactatttcagaattgattacacaaaattattggtgatacttcatctgcttcattcaaaacaagtaaagtttgtatgtgcatttcccataaaaaaataatgtataaaaagtaatagaaaattattagattccttttgattttctttcaaggcatgtttggcccatgagactagacctatggaccttttggagtggacacatgatccctagttggaggctttaagttaaaaaatgttgtatatccaggttttatttaagtataatttctttagttgaaaaacaatacaaaatacacactaaattcttttcaaatgtatttcatgtcaaaattattattctagtggtaaatttagtattgcatttcaaacaagccctcaatacataatccaatccaaattaatcctactataaaatccaatacaatccagtcatacctaccacgtgatcaatatgttcattagacctaactaagaaaataattcagacacttgagcttttaagaaaattctacggttggagataagctcaaaatgaaatatgtatttctatcttcctcaatgaaaggcctaccagaagcttttttggcaataggaataaggcaaggagatccattatcttctttcttgttactattgtgtaactcttctcttttccaatgtcaaatttgaaagtaaacatttggtagcagggtgtggagactggaaactagcagaaatgttatcttgtaagtcggcttttgagagatttagctctcatcattggtagctgaggtaaaatgggtgaaacagtatggaaaagttcaaaccatctagggctcgtttggaaagctactatgtaattaaaattgagtgtaagtcagagcaattacaaggtttggcgagtttgttgagccaggtactaacacagtgaccatttaattggacgtaattaagggatcactctccaatactcattcccctttatgagaattgggtgttacaaaacattaccatttttagctaattaatgttactaaactacgtaattaccaactcattgccaaatatgaaaataaaaaattcatatgcaatcactacttgacatccaaacacacgtattttaaaatagagcgtaattacattgaggtgtaattactagggtagtaattatactatctagtaattaaacagttacttccaaatgcactctaaaaataaaaatgtttgcatggttattagcatcacagaagttgaatggtcatgagaaact

SEQ ID NO: 267231 - DNA, 2312 bp, Cannabis indica
aataagaacctctatcagcagaaaaaaagaaggttatcatcaaaaaaaaaaaaagaatgagagataggaggagcatgcgtagagatagtaattcccttaagaagttcagcatcctgcctaaccctaaggagagaggacaaaccctctacacaaaggatagaaaggtaaggggataatagatccccttgccgaagacctgtagagggtttaagggaacctttgacaacaccattaataagaaaagaaagattagtagtagaaatacatttcataactaaagtaacaaacttaattgggaagtttaaatgaaacataatactttccaaaaaatgccattcaacacaatcaaaagctttagccatatcaagttttaaagcatcccaaccccttttaccacttttgcgagagttaatggcatgaataatttcttgggcaataagaatattatcaaatataattcaccctaaacaaattgaaaaggagagataattttgtgaaggaccactttgacacgattggctagcactttagaaataactttatacatagtagtacaaagacttgtgggtctaaaatccttcatagagttagcatgctgtttcttaggaattaaagctataagagtagtactaatattagaaaagtcaacattattatttaagcaatctaaaatagcatgaacgaaatcatgaccaagagtgtcccaatttttctggtagaaaaaagcattaagtccatccaagctaggagctttatccccagaaaggctgaaaatagcttttttcacttcctgagttgtgaaaggctgaaaatagcttatttcacttcttgagttatgaaaggctgagccaagaagtcaatttcaggctcctccatggaaggccctaaacatcccaaaatttgactagtagcctcagcatcacaaccctcagaacgaaaaaggttagagaaaaaagaaaaaataatatcaaacatagcctcaggatcattggttttattaccaaaatcatctttcaagtatttaatagtattattctttttcctatgagaagcaaacctatgaaaaaatctggtatttttatctctagctttaagccaatgaactctagcccgttgtgtccaataaacttcttctttataaaggagagcatcaagttaagactgaagatacgtaagacgagggctagactctctactatcaaaggtagcggtccgaatcttaacaatctccttttgaatgtcctagattcgagattggaaactaagcttagtagatttattccaggattttaaagcagagacacaagagttttggaaaaaaaaaaaagaaaacgaccaaaggcatcctcattaacagaaatgccagtggaattcagccaggaatcctgaacagttgtataaaaattagggttctcaagtcaaatattttcaaattaaaatctttttttaacaaaatgagtgctagtggaattgttgtcatgaaggaaaatcttattggctcgatggtctgaactatagaaagacaagtgatgcaaggcagcattaggaaaaagagtcttccaggacccagaaccaatggcccagtcaagtcactcaaacacaaaactattacgccaagtatatttatcatcctcaaaactgagaggatagagacaaaatttatctaaaaactgggcaaattggtccatatctttgtgattataataattactgccaattttatcatcaaaagataaaaaactattgaaatctcccataataaaccaagggagattgggagcattatagaaaatcttttcaagcagattccagataaccaaacgatgagaagaagagggagagccataaaaaccagtaaaataaaacatttcattatcttgaaattttatattacaatcaatatgattattagagaaagataaaatatttacataaacagttgctttccataaaagaaaaagtccactaccaaaatacttcctagggactttaaaaccattatcaaaacctaaagcaactctaaccctatcaatagccttcataggtaaatgagtttccatcaaaaaaacaacatcagggcagtgttctttaaccaacaggggagagcctcctgaatgcacgtgtactccccaatccacgtgcattccaactcaatatactcatttttctaggcgggtgtgcgaagcatcacccgcctgttccatatcagcaccttcaagggaagattcattttccctttcaccagagcgagcacgtttgagttgggaccttacatgtaacaccttaactaccttaggcgtattacgtgattt

SEQ ID NO: 267232 - DNA, 528 bp, Cannabis indica
cattaaagacacttggatcagatcgtggtgggagtatttggattctgaattcaaagactattttttggaagaagggatcttgtcctaacttactgcacctggaatacaacagtagaatggtgttgcaaagagaagaaaccagaccttgttagacatggttagatcaatgatgtcttactcaatagtgccactaaacgtctagggatatgcacttgtagcagctacttacatttttaatgtagtaccatcgaagagcacaagcaacactccaatgcaattattgaatggtacaaaacctgatttgaaacatttctgtatttggggtgtcttgctcatgttcttaaataaaagactaggaaactttctcctagaactaaagtgtgtatgtttgtaggctattcagatgaaacataaggtgcctatctctatagtcatcaagtctacaaacttttaaatcgaaaaattatacttttcttaaacatgactatataaaagtcataaactacgcaatcaagtggttatcgagga

SEQ ID NO: 267233 - DNA, 1786 bp, Cannabis indica
aaaaaaaaaaaactaacattttaacacgaaaatcagttatattgtacaactaactaagaaattgaacataaataagacacctaaaaaaacaactttcctattaaaaaaaatagtttcaaaaactataaaaagtgccctgtctttgctcttgcttctggcattcttggctttcaatgctctacatttatctaaaaaatgtgcttccttcttccagtagtaacaaaattttccactcttaaacttggactttgtcttggattggctattgcttccatacttattcttgaattttcttttgttagtccttcctcttacaatgtacagaccatcaccatttgagtcccctctgtcctctgttttcttttggatctcttttgaattgagtgcaacttttaccttttacatggttaatgtatctttttcatagataatcgtatatctataaaatgttcataggttttaggtagggaatttagcaagatgatggcttgatcttcttcctctatcttgacacctatgttgttcaagtcaagaacaattttgttaaattcatccaagtgacttctcaattccttactttcatccatcttcatggcacaaagcttcttcttcagatacaattcattggccaaagatttctttaagtagatggaggcaaatttgatccataaacctgaagcaatggtttcatctgagacctctctcaagacttcatctccaagactcaacaaaatggcactgtgagcctttgattcagtatccctcttgatcttttcatctgtgatttctgcaagtcaaataggatcaattgcttttgaaatgccctgatgagcatgtaatactttcatcttaattctccatagactgaagtcatttgtcctagtgaacttgtccacttagaatcttgctgatgacattttagattgagtctttgaatcttgaaccaattcttgaatgctaatcctctttttcattgagctctgataccatttgtgatgaatcataattcacctcgttcaagaacataaatcaacaaagaacattaactcacactagtaatgaaaatgtgaaattaaaccagcaaagatcaatcaataagcgtgaattgtaaacttgaactttaatggcattgaactaaaaaataaagatgacacctttccttaatgaggttcgaacacaagttagagtaacttgtgcctacattctcaggaaacaatcaacatttgaatctttattaatggaagcaattgtgattacagaactaatgagctaaactaagaatgatcaaatacaaaggagacttgctcatgaccctccccaatcactctatctcactctctcttctttctcttgaatctgtttagggtgatcacactccagtcccaaaaccacgtgccaaaagctatattatagctcgatcaattttccctccaaggccaactaacataactgtcctttaaaaatgacaaatctgagagttccacttggcacttgttgacttatgtcaaaaacactacaatatcctatgtgggaagatgtataaactcagatctcaactcaattcatttatattgggcacaaatagtcattcttcctcaatcattattgcaaaaaattgatagtatttgttgggcttttttgtgaaaaagctctgttgtatatgcaggtccaggaaaactagcttgagattacgtttggaaatccaaaggcagcttgggtgtaatacccagaattaaaaaaaggattagcaaaaccctaattagataattatgagttaattgaggaa

SEQ ID NO: 267234 - DNA, 911 bp, Cannabis indica
gatcttgaaactgtgttagccacgttcaagtcctttgtcacaatccctgctgctagcccatattttgtgttgttggctttagctattccctcttccattgtcctaacaattcacaaaaattaattcatctcacttacacaatattaattcaatacaaaagttaaataataattttttttttgagacacgagcacgattaaaataaaaaaaaaggagcaaaataatgaccagctgcctaattttgagatcgattgataaacaaactataaattaaaataagataaaaattattgcagcattatagttaactttaagagcacctatatttagtttttatctactactcaaaaaacacaacagtaaaaattattgcaccaagttcattccatatcgtagcttgagtctcaactattgtgcaatataagtataactgtactactaacaaccacttcagtcgcaagaaacttgttattctcaatcactaacaacaatttcatgacgagccattggaaagcaaatcagaaccaccaacgaaacacaataaacaaaaccataccacataacaagactaaaatactcaaaaccgtgtcataaacaacactaaaacattcgaaatcatattacagagaaaagattaatcgcagtaacaaaaatacaaattacaatagcaaattaacacaaatccgactaagccgcatctatacccaaaaaaaatcgacaggtcatggttagagaaaaaaataacctcctataactataaattaaaaaaccagaacctctaattttattttttgaatgaaaacaaattaataagtcaaataatgatcttagtgaagcattaagttaattattgacttacttaaacttcatgagtgccataacaggcccaaatatttcatccttgaaaataa

SEQ ID NO: 267235 - DNA, 721 bp, Cannabis indica
ttataatgattatgtggattgctctcactttccgacccaacatgtggttcatgtggctaatatctttaaggagaaacttgggcctattaagtttggagctcctagagaagatggagattcggttggaaccaaatcggggattaccaaaaagctcaagaagcctcgggttgtgggtcctagaggcattcctagaccttcgatttttggttagatccatggatgttttggagttggctaaaggaaacaagaggaagaaggcctcaggtagctttgatccgaagaaagactttgtggatgagagccgaggtcaagtatgcttcattggtgttgataaaaccggagttaaagatgtttttggggaagtaagtggtgtgaaccaaagcattgagtccgatagtagagatgaggggatggaccaaagtaagaaggcgagattgatcactcaagccttacgttcggaggagagctcctttgattcagctaatgattcggaggctttgacccgtggggttttgggagttggagaccatgtgatgggggccactcgaggggagggtcaagtagtaatcacagaatcggcaccggctcggctagggggtttggaaaaaagtggagtcatcagcgatgtcggatgctagaactccgttacttttgaataaactggacaatgatgtgaggagaaacgttcaggatttttctatggccgaggaggtgggccgaa

SEQ ID NO: 267236 - DNA, 2328 bp, Cannabis indica
tgaccagagcaaaagaaaactcagaaaataataaccaaaagaaaacccaaaaaataataacaataaaattccaaacaccattcttgacaaattccaaattcaaattaaaatttcaactcatatatatattgttagttaaatatattatttttctcctctaccctctattccactaaagccaacacctttcgattgttgtttggctttagtaagctcctaggaccaagaaatgcatcttcttctattattgctttgaagcttcgtccatagggtccgactactcaatttgctcaactggagaacaagactcaaagagttaacttggtgaggagcgattatgtggcaacggacttcaaggaccgattgtgattgggcaagcttgtaaggctttaaaggaagagggttatgaagtgattttgattaattcgaaattcgattactattatgaccgatcctaacctttgctcagccagtagagtcatctccagccatggatcttcgaaaccaacatccctacaaagatcccggaccaacgaaactccctaaagcctcgcctccctctctcgttctttctctttctcaagccatcctctctgtgtctacctctttccgttttccagatttgcagaagttcttcgacttgttaacccagatttgcaaagaagaatagagggaatgaggttgaagaagaatagagggaatgaggttgaagaagaagacgacgacgacgaaaagatatgctcctttaaagttgggcgaagaatcgtgtgagagaggattcacatagagagaagaaactttagggtttgggattttgaagggtggtgatcttgattatggacttagtttgagtcagggatggccgaagatggtagcacattctgggcagaaggtttgcttgtgtccatttaaggaagaagacgaatcagaagtggaaaaaatacataaatcaatggcaatggttttgtgtattttttttaattattattatttattttagtttattatttatttgttttaaattagtttttaataaaagaaaaatatgggatttttttaatattttttaatcaaaattataaggtgaaacttcaatacgtggcaaatttgacacaactaacggactagttaaaataggtagtaacggactttcaagaatggagaccttggcgactattaccgccaatttttgaggttggtgacgaatctgcattaactctaagtttttgaggacttttgccgcaattatcccttttagaaaatatagaatatattttgtcatttaacaaaacagagtgtccaattagtaacttttacaaaatacaggatccaaaatgatatttactctaagaattatatcatgactactagtaagaatttaaaatcttaaaataatttagtgaaatacatattattaagttaattaagcactaaacattttactttttttaaaaaaaaaaaatcttattgaaatgttgatcttaatatacacaaccattttcaaaacgatcaaaaaataattatacaaaaaagagatcaccaataatactaaggagtgtttacaaaaatactggattttgaacaaaagtttacaattttactgtcatgcgaaattttttacaaaaatataattttttttataaaacaaccgtaaaacaacaaaaacataaccatgacacaaccgtaaaaacttaacatagtacacagtataaaacttatacagtatttttgaaaaatattctaccccataataaaaaagtaaaaaagttaagaattttttgtaaatcatcaaccaatattgtgtacatactaatacttttaatgtagaaggatgaagcctcgatcgatgtgaactcacgtgtctaccaccagtactgaatgtagattccaaagtaatagtactgacaggcacaacaaccatgagactaaaagttgatcttgcacctcccaatcgatgaagatctggttgactttattatgaacacgatcttcttcagtcaagaactcagctggttgtggttctttgatgctatttccacaggagaaaattgttgtcattaaggtaaattgagatgttgtgattgaagtacactagttcatgagaaggttgagctctggtttgagtagcttgagctccattgaaggtcaatccattgttggagatcccagcagcactaccagtggccatgttagcattgagtggaggaaagtgttctgataccatgttaaagttgcgagccatgaagaacatgttgggtttcatgccctaaataaaactcatttcaatataatcagatttacttattaatatgtacataatgtataaat

SEQ ID NO: 267237 - DNA, 1763 bp, Cannabis indica
attagtatttcaaataaatagttgtttggcaataggattatctaatgtttatgtttggtaatcattgacaatatttttgtttcatgtatatatattattatgattataaaataatacaccacaagtgaaagaaaatagaaaggagatagaattttctaagaattttattttagtgttatacaaatatatgatgatagattaaaaaattaagaaaaagagaataataattacaagtaattgatttgaaaagatttggacatttagaaatatttattatttataatactctcccttgaatatccataataactgtcttattaaaaattttgttgtgagacaaaacttgatcaaggaaaaaagagtgcactatgaaattacaccctctcattttggcattcttggagtattctaatcttgtgaaccttcttctcgaaagttgatgttggtaattgttgattatggttacaagttttgtcatccgaaagggaagctgtgaatccgaagagtagatacgggaagcttggtgtggatccagaaagtcttatgtagaagactttgtacaacacggaaggtgtttccaggtaagcttgtaccacgtatgtaccacgtcaatcttggctgttcatctaggaaggagcgcttgtacctatccagatagctagtcagtattaaagcttctcgattgtctgtactgaaagtgtgttatcaaagctaacgtggattattattgctggtgatgagctagaacttttaaggcggtgtaaatgtgccacgatagtttcagagctatattaggcaacaatgtaaatatataaatagctatcaatctttgtaatttgtgtaagaattagatcattattgcttgagtgaaaatcgtgatagtgtaaggttgaaaaagagagtctaaactagagagagaagccttttctcgtaatctctgagagtttgtgaagattcttgtaaccttgtaaatactgatattaataaagatatgattgttgttgttctgactaagatgtagagcattgcacatgactcaaactcgttaaacctggtgtcattcttttctattttactgcttaattcattacttgaattctaagatctctttatttattgcttcttgattatgttgcgtgttcattggtccggtatactgaatcgtaagtcattgattgtttctattttacacaacagtaatgactttgtgaataagtctactagattactacttgattgaatttgttggacattgatatcaccattctcttgaagattgcgcgtaaagaatttttttggtgaaatgtgttagttctatctcctttaatgtaccctcatttcagttgaacgacacaaacattattttcatagagagctgctagtacttctatattagatgttaattcacgtgttcctcgaatatgttatgttattgatcttaatgatacacattctcgacttgcctcgtgaattgcaagtagctcagcaagatttgaggaaatagccagtatagtttactttgttgacctccaagatataaaagtgtcaccataagtgagcaaatagcctatttgagagccagccttatgtggatctaataaatttcttgcatctgcgtagccattgagttgtgacccacaattattagaatagaatagtcctttatcaatagtaccctggagacagcgaagtatgtgcttaatgttgggatttattttaccaggatctagatttactaccatgtatgtttcattaacatccta

SEQ ID NO: 267238 - DNA, 1653 bp, Cannabis indica
tgaattgataactctttatcaatacaaaaaaaaaaaaaatagtagcttgattatttgttttatacatatatagaatcaaaaactaaaactaaggtgtgttgacgtaaattgagtgtgctcagtacacattatcattacttaaagttccagtttaaattaaagtattcacattcttatgagcagtgatgataaagtgaacgtaaatacgaatgtatctcatctgttctaaaaagcattatatagtttcaattaaagtcattagaaagaagaatacatgcttacaaaatttaaatcaaaggcatcatatatatacaataatacaagatcagttagaaaaccaaaatctgaggtttcctttgcagtagatcctcagccaaaatcagttattatataatatgaaatgcattattaaataatacaatcatccttatgagtaattgtcacacagaagacaaaaaagtgttagaatattctggagtttatatacaaaagaactccctcccactatgtattctatctcttatggtgtacctatacccctagccacactctaacataatttagccatttcaactaaattttagagcctactcataaaattcaagtaacatgtaattcaataaaaacttgacctttattttctctgtttcttgacataatataaaaactgaaaaactctgcatagcataataaacataactaatccaaaacttttgctaacctgaaatttgacatacctccctaataagttaaaagatttagtcactattataagtttttttttatcacttgttcatctataaataactaatccaaactaacaattttagccatttcaaccagatttcatactctactcatgaaaattcaaatcatctgcagttcaataaaagaaatgaactttatttcttctgtttcttgacataaaaaatacaaaactttttctaacctgaaattcactaaaattttacataagctccctttttatagctaatgaagccaaagacaacaaatctctctgtctcgttatcattaatatcaaacataaaataacttctcaccacaacaacaacaaaacagacctaatcggcactaatttatataataaaatcatacatacataaattaaaaggagaaaagaaactcaagagacctaaacctaaagaaaattgaaaatagtatagagaactcatcaatggcagctaagagagagaaggcagcgcagtcgctctcgacggtggagaggcaatgaagatgcgttgcttgtggtggcggaggtgcgtcgtcggtggtggtggaggtgcgtcacagtgagagagagagacccgagtgagtgagtgagtgagtgatcgagagagagagaggataactcgtttgttgtccctatttctctgtctttgctcactccctacaaacctgaaatttgagaaattaactataaccaatctgggcaaatcagcctctcaaagacccgtaacctcgataaaaaaatatatatatataaaacaaggacaccaaattcacataatcatgaataaaaaaggtaaaaatcaaaaataaaaaccaaataaaattttaacccatttatcaagaacccaaattataatcgataaaaagcaaacaaaagttccccaagtagattagaagaaacct

SEQ ID NO: 267239 - DNA, 1151 bp, Cannabis indica
aaaaaataaaaaactgattaaaaaatataacaattaacacttacttttgtgtataaagagttggggaaataaaagaaaagattatgactatgcatttaagtttttataacaaatcaaaactagtcaagaaaataaataataaataacaatcttaactaatgtcagatttaccaccataaaattgttttttttcttcttctattatctcataatagttctttcaaaaaaaaattatctcataatagagtaagagttaattggatgataatatacatagtttaaaatgtaaaagtaaaataaaataacaattaacatttacttttgtgtattaagatttgggtaaataaaagaaaagattatgactatgcattaaagtttttataacatatcaaaactagttaaaaagaaaaaaaagaacaatcttaactaatgtcagatttttatataggggaaccattactttttagtggaagataattttttattttttattttttattttataatgttgaagatacccaaaagttacattttaacatttttaaatgagtggtgcaaatcttaattgtttctagtgtatatatttttgtttaaggcgtgctgagatgtttcaactgatgagcacaacaaagtttaatggcacttgacagggggtgatgcatatgctaattcttcataattttacaaaattatattatatattttgtgtagaatatgttcactcatttagatgtatatattaaatgaatgtatgtataatgtgttaaatgagttgtaataaattttaatacttcaattattgcccgaatatattgactatagagctagacttcttcaatatatggcttattttcttatcatgcataaaaaatatagatttagggttagattcacttttatttatttattttttttttaaaagggatgagagtcttatttattaaaagtgatttgcaagcacgttcttgttaaaattatatctctttgaattctaataaacaacatcataacctgatttcatttgaaaaaataaataaggtttgcctattatattttatatttttaaaaaaattaaataaaacaaatccttcttttgaaattaaataaggtttgcctattaaataaggtttgcatgaaatcttttgaagtaa

SEQ ID NO: 267240 - DNA, 806 bp, Cannabis indica
gggtcataattactaaaatgctcctggctcaccaacggggtcttaacatattataaattaattaaattcacatatattgaactatataataatataattcctcacttattcataattatctaattagagttttgctaatccatttcttaattctagggtagtacagtggtgattccaatattaatcaaaagaggaagactcttctggcactaggtggctcgggtcacagtaagaggttctgtgggaaccaaggtagaggtggatgcagacttattcccaataccatcttcaattgtttgaattggctcaatatattagtccaaatcaatttaaacttcctttaataattttgttatttaaatacactaaatttattatttaaaccactaaattttaattttaaaaaataaaaataatagacgatctccttataaagttttgatattaaaagtaataattaaaaattattgcacatattattaaaatgaaagttgcattaaaaatctatttatctaaacctaaatagattattagagaaaaaaaatttactattttgtttatttttaattaaaaactatttatttataaaatatctatctaaaccaaatgtatttatttatttatttattatgtaaatatttgaaaaagaaaatttatatacctatcacataatatttattttgtgatgacagcgattaggggtgttcattggatcacattcaatggatttggacccattcaatccaatctaattatttattagatattgaattttaccatccgatccaatccaattaaattgagtc

SEQ ID NO: 267241 - DNA, 1363 bp, Cannabis indica
tttttttagcgaaatcgttttaaggctcattttcgattgagttatccatcccttcttttgttaaagaaattttgtcctcaatatagtgagatttttttattagattgtgagtcgtatcaatttgtcaaatattgttagttcgagtcctcgagtcaataaatgtgctagtgttccatttgaattagttcatgctgatgtttggagtcctcctattttgttagaacctcgattcaagtactttgttacttttgtagattattattatcatgtaatttgattatatttaataaaaaaaatgttctgggttgttttctatattttgtgtattttgtgctaagattaaaaatcaatttaatttttttttattttgtactttgcaaagtgattttttcaagaaatatacatttgctcagtttcattcttatatggtctttagcggtatatttcatgaaacttcttacgttgatactaaatcctaaaatagtgcaacagaatgtaaaaatagatatcttcttaaaatgaacttttttatttcaaatgcatgttcctacatttttggaccgattccgtttctacatcatgttttcttatcaatcgcatgtcatcttctgttcttatggtaagatcccatataaaattcctttcttgtttaactcatcgtttcttgttgcccctaggataattggtagtatttgtttttctcgagatgttcgtttacatgtcaccaaattagatctcaagttgttatagtgtgtctttcttgcttattcgcatctttaggaaaggtatgtgttattgttccaatcttaacaaatatattgtctccactgatgtttccttcatggaaaacacacactattttttatcttcatctactcctactcattagggggaggacaatgattcgtcagcatattttgaccctgacacatgttctgacaagtcttatatttctccacctatctcaaacacaactcacggcgagtctcttattactcaacctgtctcagctacaacttctaacatgcgtccacctcctattaaaatgtacttcaggggttcacctctcgtttcatgtcatccacttgctttctcgtcatcagattcgaacccaaggaatgatcttcccatagccctacgtaaagataaacattaatgcacttatcctgattcttcttttgtttcttataatcacttgtcaccttcttcttgctattatattgcttctcttgattctatctcgattcctaagaacgtttgcgaagccatatctgatcctagttggcataatgcaattgtagaagagatgattggtttagatgagaatggaggaagccctcgtagtcggagtgttccctagatt

SEQ ID NO: 267242 - DNA, 1716 bp, Cannabis indica
tgttgtaaaggtgtctagtattaaaataagagtgtaagtgtttggtgtattgtggtctagtaaaacgtgttcaagtcttggtgtaattgcttttacaataataaaataattatgttttcatgtgttgtagtgttcgacagtctaacatcaatctagtttgtatattactatctgtgtaattaaatattgagtttcatataaattaatgtaataacttttaaagaatatcattaactaattacaaggcaccacttctaagtactgctaaggtgcctaataatgctcttagggctcgtttgttaagtcgtattgtattgtatttagattatatcgtatcgtattgtattatattagtattatttaatagaatactatgtttggtatattgatttgtattaataggttgtataaagttataatatatttgcaataaactcgacttcaacaccgaatatggatcgggtcaggtccagcgtccgagtctggcgtttggggttccagttcgggtctctagatctaggtcaaagactagggttgactttggattctttgtaaatatcataatacaagttaatacagattatttattatatattaaataatacattttacattgttttaaaaaaattttatcgtaatagttaatacaatacattatattatctaaatattatgttatttattaatattatttaatacaatatgcttatacctaacaccaactaaaagtggtacctaacaccaacttgaggtgctatattaatcataaattaaatagagaagagtagtcccctcattatttataaaaacgcgtatagatctgcccataaaattgaaatatgaagctgtctaatattttgtaatataatttctttttgtgatttttttttttataacaatttctttttgtgatttaatattaccttgtgtagtgtatactttcattttgtggtttttattttcttgttttgataacatcttttgtatgtcgtaaccaaaaataaaataaaaaaacttgttaacaatttatagttattaataatgtagtattagttattttatggtataatgaggtatgtaatcactatactgttgattgatcaatacgatggtcaatcatacagaccgttgttgtatggtaggaagtgtcgttcttcgaaagaaagtattatggtctagaatcagtttagaggatcagtgatgctatagaaaaaattaatactctgatacttacttcccaaaacatgcagaaaagttatttagaccaaaagcacagagatatagagtttcaggtaagagatcataatttcctacgaattttactaatgaaatgagtaagcgctgcgaaaagaaagccaagttgtgccctaggtttataggaccttttgagattctcaagaaagttggacaagtagcataccatctagccttacctctagcattgttagcaatgcataatatttttcatgtatcaatgttgaggaagtatgcgtcagatccaactcatgccttgagttatgaaactttagggctatagctacacttgtcctatgaggaacaactagttcaaatatcctcgataggaaggataaagtctttcaaaacaaacatatcttttctcaaagtactctggaggaataacaagatggaggaagccacctgggagttagagtttgacacgagggttcaatattcggagttgttcaggttagattt

SEQ ID NO: 267243 - DNA, 1189 bp, Cannabis indica
taaataaaattaaaaaaatcgtaaaaatattttaaaattctgtgaaactaaatttttgtaattttttttgttgtttttgtttatttgtgaaataatccctattattttagtctcaactattatgtattttaataataaaatttgttctgactaaatatatatttaggtttttttgataaaatcacattaaatatagcatttatcaaattaccaaaatcatattttattatcaataacattttagtaaaagtacgaacactaaaaataacatttatttaattatcaaaaccctattttattattaatagagatcattgacatcaatattatatataattaattaatcattaataattctcatattattatatcgtcatgtattatattatacaattatagttaaaatatatctaaccatgctatctaaacacacttgttatatatatgctttttatatatatgtgtgtgtacactttgaaaaaaaattagttgacctagggctaaaataatagaaattgaggcttaaaataatgagtatgttatacgactatttctattaagtatgattagaggtaatgaaatgaaataaaatagaacataaataaattttattttattcatttgtttggttttattggattgtcattcgtattttaactatgttttcatttcttccaacctccgcctaatgaagtatttgttatgtgagtttgagtttgagaaattagacttggagaaagtatacttggagggaatgaaacccaattaagtgttgaaggagattaacatgttaccatcattttaatttaaaaaatttgatccacttagaaatacaagcctcttggtcatgaaaatttaatttagttttgatattctctttctcattaagtctaaaccttgtattaaacaccaactaaatatattttgcagaataatgggattatgggtcactcatccgctagcatttcagtatttttttttttttttttaattttttttgtatgctgcagtttacacgtataacaatatatttgcttctagattttgtaattgtgtaggtcgatcgtagtcgcgtgcatgcagggtacggagggactttagcccatgtgtgggctaaagccctcactcaaatatatagatcaaattttttactatgtagatatatacatatataattcactttgctcaa

SEQ ID NO: 267244 - DNA, 1100 bp, Cannabis indica
taaaagacaaaatagagaatttctgattctggctagcaaaaaaaaaaaatattgattttcggtacacacctacccatttatcttttttttttaaaaaaaggtattcacagtaaattaaaatagttaagcgtattttcataaatatttttaaaagttggtattatgatataattttctcaagaacttatgcaattatgaaaaaaaccataaaattgaaactagcattaaagcaaaccaagggcccaacaaaaatgacactttcaaatagctatcattataaggacttaagattttatttttagttctgtctatatgctcattaaatggagatgacgtattagctagtttaaggggtaggtgaaagttaggggaactctttgtggataaatgatccatgaaaaaatttctttcaacatttgacccaaactacttctctattccatatcgccatttttgctattccatctaacttttattttttatttaaactgatattatgctaacttttgagggtgttttgtataagtgctttggttggtggtataagtgtttggtatagcttttgagtgctatttacacagtgtttggtataagtgctttagttggtgggatttagctgaaagggattgaaattaattgaatctcaaactttattgtttaaaaagctttagattaactttaaaataaataaataaataaataaataaaaataattaaattaccccaaaacaaactaaaacaagggacttgcaaagatattagtcactaaaattgtaaagacccaaaatatttaaccaaataatgtgaaaataaaacatttaagttatcataaaagtctccaaaaatccatctaagaaaataaattagaaagttgtgtgcgtacacttgagtaatcactgttgatttttatggtctgatgaatgaacagcaaaaacaactttattaaaaaaaatcaattaaaattataataccagaatcttatatatgcaatacacataaagggttcgtttggtacacaccgtattgtattatataatattatattgaattgtattttatgtaaatctatacgtggtattaatttttatgggcacctaaat

SEQ ID NO: 267245 - DNA, 1530 bp, Cannabis indica
atattaagagaagtttagcctgatttataatgtctcaattgagttaggccaactccaatacaacatgtattgttgtggcccatctgttagaaggtaagctacaatggagtgttgttaatgcattagagaactttaaatagacaattgtcgatgcttgtcaagagcaactgtagtatctatcattttttactttattttagaaaaataataaaagttaaaaactaaacataaatatcttatttttgagtaatattagggttgcttgcattggagtattttttttagtaaaaagtggcaaaaaatgatgtaaatgatagagaagataaaatattatattttaaagtgatgtaaagttttatggcaactttaagcattaattgcattagagatgctcttatatgatgttggctttaagtatgagatcttatcaaattgtttttattgacttgacacttaacgacgaagtacctacaaaaattctaaaaatgaaattaaacttaaatatttatttgcagtgaatttaacttaagtatttatttataagaaaataacaaaactttcacttttttttatttcggtaaaattactaaaatattaatttttcttacattttaatattaactgttaaatttgtaaaaaaaatacaagaaaaacaatattttgatatccactataaaacaaatatatattaaatataaaaaagtaaaaaatttagtgctttatttgcaaatttatcttttaataatgataactatgtaattagtgtaattagatttcggaatttatttgtttatcactattataattattgacaatatattttgtttaataattatgtgaggcttagatgatataataataataataataataataataataataatatactacgacttaggctacataacctttttaaagaaggaaaaaaaaaacatatattttaatattttgggcactaaagaggtactagaagaatactgcaattagtacatatttttttggtactaaagaggtagaagagaacttcaatcacaaaaataagtttggttaaatgggagaaagctatcgtataatatggaagagaagagtctacaatgggagccttaatatttcaacaaaacatgatatgcaaatcttttctgtaatacccaatatcaagaaaaatgaaaatgtgccatcgaatttgaaataaatttagttgttataaggagacaaagcaaagaagaacatatttctccaacaacatgggacaatcttatcacatataaagtccttctggtactccttccttcttcttgaacatcaccttctctttcgccttcttaaagtcagcgtgtgtcacctgaaacacataattcaatcatggaaaactattgttagcaactcccatagtaaagaaaccaaccgaatttgagttataagaatcaccttcattcggcgttccctcaatgcaagcaaaccggcttcggtgcaaattgccttgatatcagcaccggaaaactcatccttagtcatgacaaattcttc

SEQ ID NO: 267246 - DNA, 952 bp, Cannabis indica
ttctctgccataagtgaggaattctaattaacttgggaggggtcggtctaagacatatgacatctatttcttcaaaaaaaaaatcatttttctttagaggagaaacaatttttttttttttttgaaaagagaaagaggtcacttagatcggtccccactcaaatttattgacaacctcacttgtggcggagaaaaatcgtggtaacaataatttatagcacaattagctaaatacaaaaactcaaaacaaactttgcacttaatcctagtacgtcaaaatattccattctacataaatctaagaatgaaaaatcctcaaaatgtttagtcttaaaaacccaagaaactatccaaaacctgattttctctcagaaatgtttagaggaaaccatatagacatactaaaagaaaaaggagtacaaaactagaaggaaaattccccacgctaaataaacaaaaatgttcaaaaaaggttaatctaaaagtatattacaagcataatacccgtaatttattttgcatctttcactttaatatggaaatctcacgtcccatttgagcatggtggaaggtttgagtcattttgcaccttttctttatttgaaaaactatgccctatcaaagtgtttggggttgttggcatagagaaaccttcatactcaaaaaaatatccagcataagaaagctttcctatatgttagaatatattagccgaacaatagttgaaaatgagctaattacttagttttctattctcttacttagtttcctagtttagactccctaattttgtataaatacatgtcatttgcttgaataaaagatacaagttcattcaccattttatacatggtatcagagcatctcttaaaattgagattcgaaattcaaaattagagttcatctcaaaattagaattttttttagactttgatattttttagggtttctt

SEQ ID NO: 267247 - DNA, 504 bp, Cannabis indica
aaaaaaaatatacaaagaaattaaattgaaatttcctgtaccaattattttggtttgtggatccgacgtggatatctatatattgataccattaatgacaatataaacgcatattctataatattgttcaccataagaataataatttgtttctaaaactcataaaaatcctaaggctgttgaataacaactcaattcgacatattaaaaaaattaacgtaattatatatttgaactagaaaaaataagtaagaaagctagtctctttatggtattgatgggcttccgtactgaataattgaatgtgatgagttgtctttcatagtaattgcttgtacaaattaaaactacgaaaagataatattcatgaattaaatgtgtgctgctcctcgtgacaagattgtggggaggaatttaatacggtttgcagcaaagtcatatatattttttactcttaaattttaacatgtataaaattatatttttgaactttttttaccgtta

SEQ ID NO: 267248 - DNA, 1281 bp, Cannabis indica
ttttttaaaaaaaaagacattaagaaattaattgtttttgaaaaaataatattaagaaattttatttaaattgcaaacgcgtacataaatttctctttacttttctttcttagctttttttcgagaccaaaacaacactctaaaattttccctagaaaattctttattttctcgggaaaatccaaaattcaaccacaaacaaattcgatttcaagctcaatttccaggctttccaataaaccaagctccgatctcatcactttctaattccatctgccaagctaacatctcagaaatgagttcgttcaaatcctagggtttggttcatcttttggattcttcatattaggtatttggatttagcgatttttttgattctgtttctgatttctcgagtacacgaacatgtatagcaattttaaggaacaagcgattgagtacgtgaaacaagccgtacaggaagacaatgctgggaattacgcgaaggcttttcctttgtatatgaatgcgttagagtacttcagaacgcatttgaagtacgagaagaatcctaagattaaggaagcgattacgcagaagtttaccgagtatttgcggcgtgctgaggagatccgagcggttttggacgatggtggtcctggtccggcttcgaacggagatgctgctgtggcgacgaggccgaagactaagcctaaagatggtagtggggaaggtggtgatggtgaggatccagagcaggctaagcttagggctggacttaattcggcgatcataagggagaaacctaatgtgaagtggaacgatgtggcgggtttggagagtgctaagcaagcattgcaggaggctgttatattgcctgtcaagtttcctcagttctttactggtttgtgcttctttttttcttttctttggtctaaattttcatgctttgattctttgggtaattcgtattgtttagtattttttgtcaaatttgatttaaaaaagcttagatttttagcatcattccaattagactgggatatagttgtgtatatgtgtctatatatatagaaactgggataaagttgtgtgtgtatatatttgggtagatagtggcatgagtaagttgagtttgtaagcggcacaagtatccaatttaattgtaaaattataatttttctccagtttcgtcgtgatatactttgatattgtcttcaacatgacacatataaagcttagattctatattattgggtctggacagaaacatataatgtcagttactttcaaatctttttt

SEQ ID NO: 267249 - DNA, 1432 bp, Cannabis indica
ccattttagcataatttcggtcaatctttgaatttgaggagaaaacatacgtcactatatagatatacctctcttcatattacgatgaccattaatttctgaagtcaaataaaatgaaataggagtcatttcattcatggaaagctctatcataatatatgtaaaaatatacgaagaaaaataattttataatttacaatgatatccctaaatataattatattaaattatatgatatctaatatttaattggatatataatgcttgagtagaggtattaaaaaagactttatgtagagtcattttttttattgttttttttttaaagaaaatgatagtatttcattaacaaataattatatatgtaaaaaaattaaataagaaaataatatttaataaaaataaaataaaataatgactccacataaattcgtttttatacaattaataataatataacaacaaaaaaaaaatattaatagtaccaataatagctttcagcatttctctatcataatatattattaagtactgctttaattaagcatattaatcctcaaacacgccaaactaatagcaagccattgttttactcagacataaatcttattaagtgatcaccatgaaactatatatataaagatttctatatataataatttcctattatatatttctacttttccaggtagtacttctagtatgtttattatctgaattcacgtacatatttggcataaaaaacaatcaattattcaacaatatatcttcttaatttggaaaaatatggaaattttgacagcaacaacagtataaaaagacttgtagagttgttaattttctatatatataaaataattgaatagagctaattatgaaatcaaagtaataataaccatctcactttgtttttagtaagtacaaatatttatttctagtaaagccatgtttttattccttttcttaactttattcaacaatcatgaaataataaaaattaatatcttcgttgtcaaagaaattaaacaattaattatgatctgtatatcaaaaataaataatgaaaaataaaataaaataatggaatagtaaaattcagatgagattaacactatggtcaaaggccatctcatactacgttgaccactttttacaagaggtttagcgcataaatcgctctactctttttacgtatataaatatttattcatatgaattcctctgcatgaaactacgttaagcttaagcttattttgattttgttttttcattacaatcttggctgagggaataaaactttctccctcagcctttttaaatctgaattttgattttagcttttcttctattttttcataaattaatttttttactttattgaatttctgaatatctatttttttctaatcaattattaatggacgacaacaag

SEQ ID NO: 267250 - DNA, 1834 bp, Cannabis indica
tatggtccttcccaattaggcctgagtactcctgctactacatcttttgtattcaagaatacctgttgtaacaccatgtctttaggcttaaatttcctatctttaaccttggatttgtagtgttttgtgaccctttattgatacgacgcctttctaagcttagacctttctctgatctcttcaattccatctaggaatttagccagcagctgatgattagttttttggttgtatgtaagtcttcgatgggatggaggtgtgagctctacgggtatcatggcttcatactcgtaggttagatcgaagggagtctgaccgattgttgtcttttctattgttcaatgggtctatagtactttaagaagttgttcaggccaattctcttttgcttgctctaggcatttctttagcgtatccttaagagttttgtcgactgcttccatttgtccattagcttgtggataggcaactgctgagaaactcttaatgattccatgtctgatacagaaatcaataaagaggtcaatgttaaactgtgttccattgtttgacactatcttctgtgggagtccaaattgacagatgatgttcttgaccacgaacttgagaactttcttcgatgtgatggtagctaagagctctacttcgacccattttgtgaagtaatcaactaccactacggtatattaaactgtgcctttccccttaggtaatgagcctatgaggttgatcccccaaacagtaaatagccagggtgtttgcatactcttgagttcatttagagcagctctaggtattttggagaacttctggcattttctcactttctgatgtagtccattgagtcttcagtcattatcggccaaacgtacccttgtcttaagatcttctttgaaaggctttgcccccagtatggtagccacaaaagccctcatgtacctcgaccatgaggagttcagcttcttccttcgtgatacacctaagagtggcattaagaagcttcttttgtacattactctgtccatgataatgaagtgagctacttttctcataaatctcttagtttcgttccagtcagttggaataataccttgttctaaatactatgcaattggggtcatccatgatggagtgttgtcaaccattagtataggctctgagtcttcattaatactccatttatttacttgaaatatttttattccacaaatagctcatattacattcacacatgctatataattctccgtaattaataaattacgcttatttattcacttaaaacagatttaaaattcatgttgaaatagattagtaggatcattatcccacttattacttgattaacccataataaaaatataaatcctaattatttagcattaggcttattgggatattacacgcagaatcatcaacctcattcttcctcttgctctccaatggagttgactcatcctcatcgtccacgtacacaacctctagatctgaagctcattttgtgcttggacctttgtgagtcataatgacccttgagaagtcagcatgcagaacaatatttccttctacagggcttagtgcatccaaggaagcgaagatgacatccattggcttagttgtagatagaaatggaaaaacatgaggaacacttataaaaaatcataaagataaagacatgcagaaagaacttatccttccagaaggcctaattcttccctagcaagctcataaataatgttgctagtgtcgtcatctagggaaatatataattcataagatgaattgagaaaaaattaatttctaagagaaagaattcttgagtgaaaaatattag

SEQ ID NO: 267251 - DNA, 1525 bp, Cannabis indica
ctgcaaaacacattctcattattgtaatactgaagagagccatagctagaacttataagatttcatccttagtattatctcaagagtgaatacaactaaaaggggagtaggttattaccggatcaaaggggccaaacctctataaatcttaatgtctttacatttattattgtacttctatgacagtcataagtggaatccgatcctagtcagactccatgtcgatcggctgaatcacagtcaatattttggtgctttcagtgagagcctaaaattctcattcaaatagttctctatttccattgtgcatggttgtcacaagatgtgggaattcaactaaaccacgagacccaatggccacagatcctaatgtccaagtgccacttgttgtgaccaacccaaacctggctagccagccaccatgttccggccacctgctcgctaccctaccacgaaagtccggccaggtgagcaagttcctactgggcccactgtccaatcaacaactaaaattcttagcatgggggtttaacctcatttttatgctggtgagactggacttggggttggtaaccctagcattgacgaaccccgcgtggacctaagggatgacactaacttgccagcctgagagatgttgtaggacaagttcagggtcatagtaatctctttcatcatgaccaacaagcaacagatgttgctattagtgatgcttttgcccaatagagacacgaattccaagaatagatagattggcaagctgcgatcctccaagcccaacaagtagagctgaattgccaaaatatcgaggctaatgacctgattaggtcgttcaatgagagggttagttctcaggttgaagagccacccttcataagggatcaccttctaggaaaaggtccctatgtccagagggaactcagtgtcctgtggaacttgggtagacctctaggccaaggggaccaactgcatcccaaacaaggctgccctcttatctgcccaacaatggtgaaatcttgcctgagagaccatatggcaggattgaccagtttcagggcttgcccaaggatgaagggagaaaggaagatctccccctaatgcaaagcgtgagtagtctcgtagtggggagtcctaccttgatcctaacgaggatagtgccactagtcacccaagtggtgagcgcactaactagggaactcaaaatattgggcaaaacaatgacgttccaccccagaatgttcgaacacgttctgaatgaggcacagagattctgtgtttgccagaataggcccccatgtaagcgtagatctttgagctggcttgaactgaaggagaaatgcttaagacaggtacactccaccctaaaacactcaaccaatagggtagaacaggccaaatctgaccaacccatcaggcggctagccagccaaccacctgccaatgatcgaccaggctggccgggcaaggtttcgcaggataaaacctggccggacaaaggaaagatgatgttgatcctctagtgcag

SEQ ID NO: 267252 - DNA, 1701 bp, Cannabis indica
ccctttcctgcacagtagagcacccatgagctaaacctagcaagacagtataaatatcaataatcacagataacttttcacatatataataataataccatttcacttattgtctatttgttatagacctgtatgttacgctcacatgcctatttatgtctatgtgacatagacctacgtgttacgctcacacgtctacatacaataaggccttaaaacggttcatctcggttctaattactgagtccaaccaaattatgccttgaacgcataattcttaatctcaatatatatagcatgacatagtatttaaacaataacaaatactagggtaacaaacccgaatcccggttcttgataactcacaattataatatttaatataaatgccaccgtgcttaactctacatgcaactactgtcttacttgatgtcccgcaaatgtggagattttaaatcccctagtgctcctggccaaatgccggtaatcctagtcacaatttccgggaatcacaaatagggttaatccctaaatctactttcacatacataataaaattggcattcaaatccagaaaaatacatagagctcgaaatgagctttccaatgatactcggaatacccaaaatggagttcggatcacaaagttacgaacattccaatatcacgttcgaatctgcccaaaaacaaggggacgggttgcgacactccccacatggggccgcgacacctagtgagtggggccacgaagcctgggttccaaaccccggaaaccccatttccaacttcgaaactcaaggccgaaacacacctaaaatatcccaaacatacatataacttgaaatcatattccatagattaatagataccatagcagggcataagaacccacaattcaagctaaattctcatccaaacatgcatcctaaaaattagattaacaacactcaaaataagctccaaacattgagctaagatcatcatattttcatacaaagatgttgcactacaaagtcccaaaataatctcaaaaaccaagcatacaattccaacaaacttactttaatttcagtaatccaaaccccaatttcaccctaataaacgcacaacataatccaaatgcaaaacataaaatttccaagtttaatccacatacaaagcaccccaatttcacaatcacaataatcatgtatttaagaacatcatcacaagaaattcatgaacatttgacttcagattagagcacaaaattaaagcaagaaaaaggtggaaagctacctcaaactcttcaccaagactagcacccaaaacttcacaaatcaaacttgaaccaaagttaatatccaaaaatcaagtaggttgagaagatgaataaggagagaaagagaggggtcagtttaaggccaagaaaaaaaattagaaaatgcttctcaatttctctaaaatttatttttgttgaaagtaattcaaatatgcaaaatgactaaaatgcccctagggccataatatagcataagccaactcaagggcataaatgtcattcaatcacacaccacacttaaacaatttttcaaaatattcaaatatcaacaaaatgccaatataaaatcccaaaaatgtatttcggcccgaaatacccaattgtgactataccgcgccaacttatctggaaatacccgcaaaaaggacacagcaagtata

SEQ ID NO: 267253 - DNA, 4173 bp, Cannabis indica
acaataaaataagtagatatttgcatattaaattaaataaatacaaaagactaaaattcccttaaacatagatattttttatctactttattgggttgttaaggccaaattcgcgtgtaaagctgggcacaaaatcttatcaggtccattcctggccagctagttcctacaagaagcaggctggtcggccctagctggtctgtcacttgttgtcctgtttgagcatcgggacccttgttggctaaggcgttaaattgaccttcttgctggtgagttgtactaccacatagcactgattttgtccacataagaatgccacatcaggtgggcaatagtcgggataatattttcccccaagtctctatgtagacatctgtacaaatagggacttactaattaagttggaactgatgtagcctttcctaaatagaagttactgtatttttagccttttgaaatacttgcttttgactgtctaatctcatttgttggagtaaactaactgttgttacatgtccctttgttgagtatgtgtggcaagtacaggagtggtcccacatatactatttaagtgcttttgggggaaaactctcttcacttttcaattttcactctctcactagaaagtaacttttgaagaagctcctccttctctctagagggccaaacccacatagcatcattctcctgagatttttgtgtcgttttgacaatccaagcttcccatcctctttaccaacgatttcttattaggggtaagctttctattttcgctattcacttgatttagttatttttgctatgaaagcatgaacattattctttgctttgaatgtcttttgattcccacattagattgttatccttttggtatttttattcgcatgatagtcttaggatatgtaatgtgtgatttctagacaaaaaaagatcttaaatttgaccttcgttgtgattcttggttctttcagtcacgaagaacgtgtttgagttcttgaaaaaaaaaacataagtttggatccatacacatcctagtcggccaaggaggtcttgtttaagacttggctggccaatgattgccaccatggggtctggccagccaaggggtatacccaataggctgcctggtctatgccagaaaataaggttcttggccggccctaggctgggtcatgggacctggctggcctcttaggcttgggaaccctggccagccagggcctaggttcaaagcgggcagccagttttttgtcctctgttgaccccggctagggtcctatgaaggccttggaggcatatacaactgtagtcttatgtgtggttctccttgggaactctgtatgagacttgatagtgagtccattatagtcgagtgcataacttaggacccactatttgtctaagtaaatgtagttaagacggtacttggtcagtaactgaccttgtacattgtgatttacctagaaggtacccttgagtactgttgactagaatgtgtttgtagctttgtcaggttgctcacctcctcttatctcttctatgcaagtgattttgagtgttggattggggaggtgatagcagcataggtcccctagttatcctatgtaatcatggccaaaacaaaacagacgtgtcgtagagcactaccatgtgatccccatgttgccagggtggcaacaaggggccgagttaaaattgtagaggaggctactcagccccatgctaatgtagatcaataggttgaccagacagagtttcttgaggttgactagggggctgagagtcccgatactaagtctaaagttaaggaggatgcaccagtcaaaagaaggagatatataacttgtattgtcctttccaatcgccccttgggtagttatgacgacaatggggagcctttgaacaagctcggtcagccttcaatgttgggcttagatcacatctttattcagtctgagcccgtgattttggatgccatatcatagggagacaagtgggtctcttctgcctctgtcctccctactgacacttttagcaggatacttgctagtgggctagtgagggttgggagagacccactaaagatcaaagggcgcaatggctttcccttagttggatggcatggtcggagcgttatatagagcaggggcaagttgtcactccacccttactttaaagacatcgctgcttattccaggttgtgtccaacacaaatcaccctgaaaagtattaagtaccttttagcgatgtttgctttgtatatggagctagtctggcctcaacccactccttatgagattggatactattttgatttcaagtttgctccgaagcagaataggattgagtacttttacttttgccagattggccaccagtggttgggtgacactaacagcccacccatatccaaagtaggtgggtacgctcggaactacttcaatacttggggaatttaaaagattagacactacaagttccagtgggtgccattttttagcaatccacccccacactgtagatgagggataggacaaatcacatcctgtctcttcctgtggagaggagaaacataatcagattggccagtgtggccaactttcagaagtacagcctataccctcctacttctagagttatgggagccgcgagtccatcagttgctgtagatggagccccagctgaagagggaccttatcctaatgatagataagtccctaacttggataataacgtgtcggatagcccaaaatctagaaaggagagagagggccctctaccaacgcttggtctatgggggctcagttggtgaggcttctcttcggatcaggcttgaaggccaaagctctgagggacctactcaccccttgcctacatttagaggtaagggcaaggcggttgttaaggattcgaatgattactcttctaaggatgatgatattcgatagttgatagcaccatcttttacattcttgtcttgcattgaatgttattgacttgctttctgactttgctactttcttttagcaaatatgtcttccaggttgagaggtctcgctagggaaccttttgatgagccttcgggtcgtctaagggccaaggtggatcaaaccacccgtggtggaggtgctactggatcatctcttcctcctcctctagggcctgcaccagctgggtagcccacgatcgatgatcattcagctaagagggaactgcattctagcaggggtgtcccaaagcccgattggggagcaagctcggttgtggggtagtgaggcttggaggcagttcacaggcacgtagaaagagttattccttctatggataatgatgagcttcatgggctcgttgacagtgatccagataggctccactctattggccttcaagattttatagtgagttgcacatttaacgttgctcattattctggcatttttataggcttatcagccatagtgatgttgtaggtgctagctggccaagagtttgtcttcgagggatctagccggccatagtaaccttgtgggaaggctggccgaccagtgttgtgtttttgacactgactttgactttattttgctgccaggctttgatgaactgagcatttttctgagggtcctcgagcgctcttcgagagcaggtgaagaccttagaggctgccctcgaggtgaaggaccggactatctctaagatggaggctctcagtctgcaaaaccgaagtatgattttttatttggagaacatgcttggtactaggaaccaagaaaacacctcgcagactgctactatctccaggttggaggctgacctcactgggtctgaggagaagttgagagcagcccttattggccagtaggcaataagagacaagtatgttgacttgtcttcaaaacgcatctatgagttcaagatgagtaactccaatggtgacctatcatacatgggcaatgaggccttcctagagagaacattagcttaagggagagcgttgtttgagagctagttaggagaggaccggaccgccatctagccagggggtcatccttggggcactatcatgaggagatggctggcccacctgcttaggaggtggccagccagggcattgactaggtggtcggccaacccatggaggctatggccggtccacactctaaagatccagatctt

SEQ ID NO: 267254 - DNA, 625 bp, Cannabis indica
tctgccaggcatactgccgtagctgacgttgcgtgaccattgcaagacacacatatgaatcaaatcttccatccaaacatagaatgatggcacaaccaaaaaaccatgaggaaggccttggcatccaaccctcactttattaggctatttgcaacaactagggtagaacaagctaggcctctaagtgaggatgctaaagttgttgaaggggatgttgaggtccaagagattgaggaccagggcgaggtctgtcttgccagtcccgctgaggctgaaagagaaggagcagaagaagaagaggaagaggaagttcaagtacttccctttggcagctacaatgaggctggagaacctgttttggtagcgggccaagactatgttaatgaggaacacacagaggctcaacctctaggcactaaaggtccaaagggtcctcggtgggtctcacccccatccgtgcttactttcaagagattaacgaatctctttgaagaagatctccttgggaaggtggaggccttccttcctaatcctgggcagctagcttcaaatcctagcagtggcatctacgcatgttcaggacctcatgctaagcatgatgaaattctacttttgcatccatatt

SEQ ID NO: 267255 - DNA, 1606 bp, Cannabis indica
cagaaggaggtggatgcagccaagaaggaagctgaggatatgagggcacagcttggcaaggtgaacaaacaagttttgaccgccaacaaacgagttgatgagcttcagaaggagattcaagacatgccatctaccgcccaacttgaagcagatgttgaagccctgaccaaagacatccacaccttgaaggacgagagggaaggtctatggaatctcctttctaagttggaagggagtgtcaggtctgggcaggtggagcaggaagcccttcagaaggaggtggaaaacttggagacgaccgccttgaaagtcttctatgaattctggaaggccaacccagatggtaactttgattacctcaatgaaaccaaagaggcatatcttggtttttgtgcggcccagaaagaaaaggaagaatttgaggcggccaaccccaaagctctaaccgaccaaaatcttgatgctcctaccacagaccacccgactgactcgtacaaagagccaaggactccagtcgtataagaccttctcttttatttttgtttggccgatgggcctttgttcagtataatatggccaaccaagtggcttgtatacttcgttatgtttcattttattttaagacaactagctggtcggccaatccttaatcccagaattatcgtgattttgttatcattttattttaaaatgaataatttcccttgttttagtaattgcacatgcaaactactattttttgagcttattatttacctttatttcgtacgagtatagttgcccccaagtgaccgagcagacttatgactcttggtcatttgtattgcataagttcattttttgtctgttcgatttttttggttcgagtagaccctttgtacacatttcaatgataaatccataacttgctatatagaaaaatacttgacacaattagaatgatgataaatatctttattcatttattggtctgagtaattttgttaccgtagtaacttacatttattgaattatgaaagctatttcataacctaaccgatctttagctaacataaaacaattgtattttttagactagacttttagaaatggtcattcgacctgcgtaccagtcattttatctaaacctttgatcgaggtcaactcagaaggccacctacttaagagtagatgtttaagcatcgtgcacttggaggaggtcattagaccttatgcacttactggtagtattttcttaaatgttccccttctaataccttggtacaagaatgagctccatgttttcgtcataccgtcccagcttgtatgctccagactctgtgacttccactacttgatacggtccttcccagttaggtctgagtacgccagctgcgctgtctttcgtgtttaaaaacactcttctaaggaccatatctccaacaaagaattttcttgccttcacttgcttgttgaaatactgagctagcttttgctgatgagctactagctttaggtttgctgatgtttgtttttctttaatttcgtcaagtgattctgccaggagggcatgattagcttcttaggtgtaggttagtctcctgtgggatggaggttctaactctac

SEQ ID NO: 267256 - DNA, 736 bp, Cannabis indica
agaagaagaagaagagagagaagttgttgatgaaataacaaggtggggacggtcggagacaaaggtgagtgaagaagaaggaaggagtgagaaagagacggcggcagcggccattgaagcgcctgggaatgccgctggtctcaaagtgttcgacaaaagttgtaagagagtgagaagaagacagagttgttgaaaggtttcatttcatattagattgagctttgggctttggggaaagagaagaagagaagagaaaaaggttattggccttttacggattggaagaaaagaagagaaagatgtaagtgttgttgtgtggtgcgactttatacaacacgtaactttttcttttcattttaattcaattttactttttgcctaatttgtaataacttcacctaattaaaaaaaataaataaataaataagagactacacaaaataaaaaatcttctattctttttttttttagtgtagcttaatggtatttcacaatcatttaatagtttaatagcttcaaggtcttaggttcgaacccatgacctttccattttccccatccttccttcaccactaagctaatcttagtggcttaaaaaaaaatatcttctattcaaacaagttcaccatccacattaaatgtacatgcatagctaatctattgaatagataaattaaaaacacataaaaaataagttaattagtaatttttctcctgaactttaacatgtagtaaa

SEQ ID NO: 267257 - DNA, 552 bp, Cannabis indica
aaaattttgatggcagatgagtgatgacaatccttatgttattccggagatggattcaactgttcggaagcaaattcaggaatgcaattggcaggttgtcaattgtactactccggctaattacttccatgttttgaggcgtcaggtaggtggagctaattgattgtgttgtgactttctttttaactagaagtttttctgcattctaacattgtcgtctccccccagatacaccgagaatttaggaagcctcttattgtgatggctcctaaaaacctgctcaggcacaaggattgcaaatcaaatttatctgaatttgatgatgtccaaggacatccaggtttcgacaaacagggaacccggtttaagcgtcttattaaggaccagaatgaccactctgaccttgaggagggtattagacgattagtactttgctctggaaaggtatcatgctgcacagctaaagaaagctgtttttttatcctcttttttctgcctctttgtttctacaaagttacaacaaactgaatcatgaagcataatcagtattga

SEQ ID NO: 267258 - DNA, 535 bp, Cannabis indica
tttatattattttttttttgaaatagagaataacgagtttattacataattatattataatgtttatataaatacagcaggtctcctaacaactaccttcctcttcatatttactgccttggagcatagattgagagagagaaaaagctaaagcaatctcagtactactggcaaatatttgaaactgatgcatatatatctataaatatatcgatctctgatatatatagcaaagctcacagacatatatatatatataataataatatatataatggcacctggaaaagaaagtaatacgagcagcagcagcagcaacaacagtaatagttatcaatgtgagccgtgcaaatcgtttggtcaaaagtgcagccatcttgtgaagaagcagagagccaaattctatatcctcaggcgttgtatagctatgcttgtctgctggcgtgaccgtggagaccattaattagttaattatatatataaatacttattatgattaatttattatatctttagttttagattattgctgtat

SEQ ID NO: 267259 - DNA, 801 bp, Cannabis indica
attccaatagtttaatgcaatcaaacaaagaaatggaatgagaattattttctttccatttcatactatttcattacctctaaccaaatgttaccttagtgtttagttaacaaattaagatgtcagctgcaaatgagttttctcattggagcagaaattggtgttgttgttgacttgttgtgtatgtgttgagtaagaatatgtgcctttttattatgcaggctgcaataagaaatcttcaataagtaaataaaaaataaatctaataagtttgaatttagagagtaatgaaatgttgaaagcagagaaatgtaaaaatcatatagtttccaattattacaaatctacaagtttacaatgcataggcaagaacaaatatacaaaatattctctgacaattacttgaattaatattaaaatgttagagagcaatttcatttctcaacataataaatgacagatgcaactagagttgtaaattcgtcctggcacggcccagctcggcgcgttttggaaaagctcgaaaaatatgagtcgtaccgtgttggcccgtatagaattatgggtcgtgccgtgctggcccatatttccataggtcaagcccagcccagcccatgggcacgaaaaactcgtgctgggcccaggcccaaatcgtgctttaaacgagctttattagactgaccaatatatgtagtatatttataatattaacatttttttaaaagtatacaaataaataaactttaatgaaaattattttttaaaataaaaatatgtatttaaatatcaaaatatataatt

SEQ ID NO: 267260 - DNA, 1624 bp, Cannabis indica
gtatggagcttaaggagaaggcttatagtggtaggagaagaagtggaagaactagcgtcatatgtaaagatggtgttttcatcaggtgggaagactaaagcattagaaacagtattaagaaattcatccattttcaaaaaagagaaatcacaagcatacacagagaagagaactaaagagaaaataagtgggtgaaaaaaataatacctcaatcgcactatataaatgtaaaattatagccctctgagaagctttctcaaacaatccctagtcacatccttagcttgcaccatggtagcatcaatgatgaggaaggacttcttagcttcgggaacccagacgtccgcgcccattttactatctcctagagtggaatgatggtgggaaatttgggaagtcagaattaaaagccaagaagtcgaaaaaagaagatcagaagaaatggaaatcaaagagaaagaaaggggtgagatgggaagagtctggcaattataaatgggatgggataatttgtaataataaatctcagagcaataaatgctctcatcaatgaagaaagaagcaaagatgcgacgacagcaaaggaaagaaaaggacaaaccaccacttgactggttagggtggacgagaaccttcattgacgggactaaggacacatcgcatacctactagaacaccccaaaaagagaaaagattttaatttttttcctattctcaaatctttagctattatttcaagtttcaactatacacaaactccaaatgtcaaatgatgttattacactttaaataataaaaattaattgacaatatgatggtattggtatgtattgcacacctatttagtttagaaaatgctaaagggtatatatagtgattagtattcttatgagatataatagtgttattgatgtaatttaatatcggatcccacttattttattttaataaatattacgaaaaatcgctaattaattataaaatacgtctactcaagacataaatagttaaatacacctagtagcaatactaaaaaaaaggaaatgttggaaagggacactctgccttcctcctttgactcttttcaaaatccatgcaaattaattgactttgactcactacttttccatattcttcccttattttcttattctcattcttttctatggttggctgctcatctctctctctctctacatttctcactaacttatagctacttctatactacttttcaagtgcttctttatttgaagctttccttttttatttatatacacaaatatttaaacaacatatatttttccctcccacatatcaaatcctttaatagccagccaattttcttatctctgtcctacaaaatacttttcaaatctctctctttcctacgttatgtcatacttatcaacccttcacatctattttttgcaccaacccataatatatacatgtcactaattaatgtattcccacacaaataactaatgtcacaaattaaagctaaattaaaatatacaattcttaattcatatacacaacacatacatatacatatatatataataataaaaggtagaattagcatagtactagctaaaactatactagatttcttcaaaga

SEQ ID NO: 267261 - DNA, 1431 bp, Cannabis indica
tcatacatgtatagttatggtaaggccttgtatgtacaaaatgtaagtgattagttatattagaatacaactctttaaaaaaaaaaaaaaatacaagttataaattgacaaaaggacttataatattttgttggataaatgacacttaaataattaaagttcaactaggagcagtctacatgcaatagtcctttaggatacataaatatgtttgctcaagaaattaaattaagtcaccctaatttttcttttcggaataagtggagtttaacattcaaatatgtatatagtaataatgaggagccaaatcagtcttttgacataaatggcttataagtatggagattcttgtagagtccttgaatggcaccagtaccagcagccaaagatagaagaaagcacactaaactgagaagttggaggccaaaccacttggcagttcgtctgtgaatcttgttaatggaaatgtgcatctcgactgggaagaacaccacgattggccaatacccaatagcacccataagtgccaacatatcagtgaagaaaggcaaagctaaggcaactacagttaccatcacaacaaacactgttctccatgttagcctaaacaagtttatactcaacaatgttttcttcttactactcatcatgatggtagggccagcaattgggtaattggtggtaatgaatcttgactcaggccacctttttctagcccacaattccactattcgaaacactggttggattagtacctgcatattatatatataaagattaaattgcatcaaagctagcataactttattattaattaatgcgaatataatatacattaactaaattagtaacgtaatcatcacacctgatatgctccaactaagtgcaccacgatgaagaggttagccaaatcgatgatccaagaagtctcatgaaatccaaagccagcgagtagattctcaggtgcatggtttccaaacgcggcatagccaaagcaaccacacatcagaaaaaatgttgtcatgattgatacgcctatagtactcgctttcttcatcactttgttttcagatggagatgacttcaatgtgtcctgatgaaatcattttattgtacaattatataccatgtttataaatggtgtccaattttacataaatgattaaatttaaaatattaatcaaaattatttaaattaagcaatcataaaaatacatgtcatgagggggtggtatctcatgagtaactaacaatttttttatgagaaatgctaaaaggcgcgagtgttgtctagcaccctcctcgttatcatattgttattagtgtaattaagtatcgggtcctatatatttgcttcatttttttagttgaactacatttattgtttgccttttttcatttggttttgaaatacgaactctctctagttca

SEQ ID NO: 267262 - DNA, 651 bp, Cannabis indica
ttgatagcatcctgaagactctgattagaaacagagcttcgtgaagaagattcttcaaacagagtggagttggagagatcgaaaatactctttttataaacagactttccaggggcccttaaaacatctttatagcttaaaaatggtgggacaggggagacatcacagaattttagaagcttttcacacctattaaaagtgtggtcaagcataccacaataataacaatagttttgaatcccctcatacataaatttgagccatttagtgcatgagagagatctgaacttgatgttcatgcctctacgcaaaggtttagtgacatcaatgagaactctgatacgcatgaagggtaaaatagtgtcataaagagaggcaatatgaacttcaatgagatccccaagttgctcagacaggaacttagcacggtcagttgatattttgccaaaagtgattaggtgaacctgaacccagagaggaacaaagttgacttgagaaggaacaacagagtcaaattcatcagggatagcaaagagaataaggtttcgatcaaaatgccacggttgtccttccataacacgtctccaatctccttcacaaccaaaccgcaccaaaaacatgctagaacggtagtcagagaaggagaaaggg

SEQ ID NO: 267263 - DNA, 1406 bp, Cannabis indica
ttgacatttgtcatttaactatgaagagagtataagagagagtgcaaaagagagtctccttagcactcctcaaaataaaaacatcattttaataatatggtgttggacatgtaaaaataagttataatttttttttacaaatttaatacactctatcattcccatttggtgagatgaagtcaacacaaacagccaaggcgtgaaaatgttacaatggtagtagtccaccaatcaaaattaacaacatttaacaaaggtagatggatcgtcccctaatattaactaaattcatcgttttatgactataataattgctatttccattcttaatctccattattatgatttgcacttttccgggatcggttttcttcttctcctaattatttattcctattcagtatacacgttactaacttttccttaattattctcaaatggactgatttttttaaattgttctcacatggtcacacaattattcatagtctaattgacttcatttaaattttaaaaattagaataaaactttgctaagttttcaaggcaagttttgattttaattatcaagaaataaaataaataaaaatagagaaaagagaagctcaatttcagtacaccacgtagcccaataggcaaggaaagaaaaagaaggtaagagaaagagagcccaaacaagattattattatggttaacaaaatcaatggcagcatagtccgtactactcagcacagagagactaacatcctcatcagatcaccgaaaatgtacggaaaagccgctatagctttcgtcttcgttatccttctggtaatctcctactccatttcgataggcaccgtcgacctcagatcatacttctttcctttgcttcagtcatcctcggttgcaccatctctttgtgctaccaactctcttcttagggtctacatgtacgatcttcctcgtcgcttcaatgttgggatgcttaatcgccggagcttggaacaaacgccggtgactagccggacatggccgccgtggcctgtgaactccggtttgaagaggcaacatagcgttgagtattggatgatgggttcgcttctgtatgaaggggatggtgaagacggtgaggtgagagaggtggttagggtattggatccggaaatggctgacgcattttttgtgccgttcttttcatctttgagttttaatactcatggccataacatgactgatccaaaaactcgggttgatcgtcaattgcaggtatttccatggctgaatttaatagaattaatgaatttaggctgtaattttaggtggaatacatgaacaatctttgcccaattcgaatatatttgtgagatattaggaatagagatttctgttgtggttatatgtagaaacagctacacacacttgc

SEQ ID NO: 267264 - DNA, 714 bp, Cannabis indica
tatctccaaagtttgaaacttggctggggcgtgtctctcatgtatcttaggacaatggctaagcataattgcccataagaagttggtaggaaccaaaactaatgcgagttggcgcacatatgtcaacttaggcacctagaactgatgttagacctaggttgagaaaggcttaagagaagccatgagagaatatttaatacttacctaaactagacattcagatactagctctcaaacaagaagctgtgagttcttactcaactcccagtgcattaagaaaaggaagctacaaactaaaagaaggagatacattctagcctacattcgactagtagatgtagaccagaagacgataatttacatcgttcgctctgggatgtccacgtgacatcctcaacttcatggttctttgttttaggatcatggtgacttgtttattgaatgatatcacttaacaatgactttcttggatcttggtgcttacttaagtgccccaatgtggagctaacactgtcctattttgagatacggggtccccaatgttgttttcttcatgccaaatgtcaaaactagcgtccgcgtcatcaagctaactttttggataaacaaccactataaaaacacaataagtattcttcaggtacactacaaaaaacagctactttaagtgacaatttttcagtcacaacacaaattttttgtcactaaatgtga

SEQ ID NO: 267265 - DNA, 788 bp, Cannabis indica
ttttttatttatttcttttaaaaatttttattgggatgcaaatattgttttgacaaattgagaagaagaactcattcacgttaattccatatatatatacacaaatcacatataatactacttctcaaatttaagattatatcaaaagaaaaaaaaaagtaaaatattaatattctttacaaatattaaagaaaaagaaagaagaaagaagatggccattagaactagctgttgcctcaaccaacttctaccaccatttttttctccatcaaaaactacttctcaacattattcatggtatgtaataaattaaatatcttcaaatactatttcattaatttctcttttcaattttaacatattttccaataatatatatttattttttatagcatgggaagaaataaagaggagactagtacaaaagctataccaattaaaaaaggtatgataattgtgagtttagtcataatgggaatgactaatgaccaatcctatgactattattatgctaatcatcatgatcaagtgcctctaataagcattattacaacaacaagagaagaagctaaggcaatcaaatggagcgagcgaattagaatgtgcccgccatggcatctcaattcgctcgaatccatagtccctgaaaatcttccccggccatcagctcgccggggatccaaagttttaggccacgtgccacatgctccgccgatcaagtttgatcgtgcttatgttagagaagaaaacaccatagattgcttcactatgtaacttttttttttttt

SEQ ID NO: 267266 - DNA, 1635 bp, Cannabis indica
gtttaagtacattgaggtgaatatagtgttgatgcaaagatcctttagattgtgagtctcatcataataagcatacgatacggttcaagcatgcaaggaggaagaaaccgccaattctaacaggataggtgtgttctcacggctaggcagttagtgggtaattagtgaagaatgtaatggcaagttggctgtcttgggatttgtgttttctgttagattgaagtaagagtaaacgcaagggaaaggggccaaatgaggcatgtaattagcgtgcattaatgtgttagaacccaggattaatagggtgaggatgagaagaaaataagaaaggtaatgactaattatattgaggagagttttgagtggaaaatagaataatataagtaggtaagggaatagagagggttaagcatgtaatgaggtttctctccctgaatcatggagtgtctaggcctttcaaaggcgcgcatttgttcttagtgctactgttatttgttctagtgctcagttctattgttttgcttgcaaaaatctgtactctatatgttaaatataaagggatttaagtttgaactaaaattttagggtcttccattagaagaaaacccttcaaaaataagcgtatgccattgaaagtgacgaacacacggtattctttagtaaaaggcgaaagaatagttcgctttgtgctcaacacatggctgcgtgagtattgaagtgtaattgtcacctactatatggttactctttgacaggaatttatgctctttccaatgtgggacaatattacaaaactaattatttctatgattcttgaccacttacatttgaagattatagtagtaatcatatgtaatgatgacagagaaccaagttctggatctggaatttctgctcatcgcatgaatgacacatagaaactatacaatatacacattttatttatattaaaaaaattatctacaaaaatattttatatgacctctaatactggctcaatattatctacaaaatgttaagacctctaacactggctctcctattagaaataaaaatcagtgttcaatcaatcggtcttgctgaaacaagcaattggaatttaacgcatacacaaactcaagtaaaccatattcaggcatgctcagaagcatgctttacacaaataaactgaaggcggtaagagagaaacacacagattttgaacaggttctatcagtattcttattcttgagaaattagtttcctaatgtgaacagcgtgaactgataagaaatctaaagttatttagacactatcaatacatgttgcaaaagatgacatctaacacttgtgaaaacttcctttgtgtcatttcaaaatctattggcatcagaaatggataataaatatcgattaaggaagagaaattccctaataagaataagaataagaatagtcacttaacaaaggttcacataagtgtaagaataaaaacattgctacctgtatggaacaacatatggagcagcaactatgcaacgaactcggaacagttcagcgagactccatccttcctagaccaacaaggaatcttttcaaggatcacataatcatgaatattgtatgacacctctagagcaacgccaatcaactcag

SEQ ID NO: 267267 - DNA, 2507 bp, Cannabis indica
tcattttgttaaaaataaatttattgtaaataataggcaagagtcaaacaaaatgcgaaaaactaaggacaaatgaaaactcaaagtggatggggttccaagaccatagtaggccacatcgtgagcggggtatgatgctgtcagcatattagtctaaaaattcatatattttttaatatatttcaatttttttatattatataaaaatagattgatcccgagacagggaactttccagtgttgtggacacttttgcaaagtttaactgcaaggacaacaaatttcgtgatgaacacacacaataactacatgtatgtaattttatatctttaataaactcgttctatatttaatttctattcatctctaacagtttgttcaaattttttgtaggccaaaatggttgacatttgtgaaacttaaccaacgacgaccaatgtcccccagtagtacaatgtcgaccccacctaattttctaagaatgcctgttatgacacaggtgctggatgagcggccacgccacttgagaggaatgggccagttgtcaagacttagggcggggaaaaagagagaaactcccagggcagttacctctgagtaacctactgtcacctaggaagaatatgaggtcctgagcaaagggtggaagagaaagaagcacagaatgagcagcaggaacaaatgaggcaaactcagaatcaaattattactgcgttttagcaataaaagatgcgtctggccaacgctattcaaggattcaacttgcccccgatgcctctaattccaccgattccacatttttggcctcatgttgttgggtcttctttacagactacccctgctcatgatgacaacgtcgatgacgatgctatggacttgtagttttatttttttagtttgcagtgtaactaatattaatttgtataagctaacgatatttttatttagttttagacaatatatgtacttttgtaattacaatataaattttcgttttataatatattttagattatatttatttattattatcttaagaattttgattttatttttaatttaattttaattttaattttcttattaatatttttttcttaaaaaaatattttgtaggtaaactgtatcttgccgagaaattaaaataattttttattgaggagttttgccggtgaagtacgatgtccagaaactaaaaattttgttgcaaattggcgggaaagttttgttaacataatttttcctaaaaaacgtcgcagggacccctcaactaatagctcattatcggtaggggaacttatgtcagccaattaattcactagcataaatagtttagctgacggggtatggtgtttcacgagcaaaacaacttatgctagcgaattattgttggcaccctttgtcggtgtagaagctcttcgggaaaataatactggcgacttatgcatactttttctagcaagaaaactcatcggtaaaaatctattttcttaaattgtggacaattaattatgaattaattgttggtcttcatttatgtaatttttctttttagctttagactatcttatgtcaagatttttgaggaatatttaattctttattccgtgtgcttgaataaaaaggaaaattggacaagtcttcagggaacacgcagtttggccctttaacatcacggtattggaactgcttccggatacgggttatccttggtagaagctcatctagtcatggagcttaggtaccttcctggaaggtattttctaacttgggcttgacccaaattatctttttaaggcccacttgttggctttagatgctgacgtggaattcacgcgtcctttgtcgaaaatacggataataattagtaaataacaaaaagaggcctccaacgagatcaatccttagcacatctagaaacctaatttcaatttaaacttttcaatagcactagcatgcaaatgagtttccataataaaaagcagggaaggctttatttaattcaccagaatgagatgtttcggaatgccctattacatcctaaaccacgagacatccagcttaggatagttgtaaatctacacgggtgtgctaagaatcactcgcttcaagtaggattcgttgagaatggcagctcttttccaggtatgtttagcaacagtggtaggtgtagtcttgaggaagtgagtttcttgttgtaggttctcttggcccctacactgaaagttaaagagatttatatttgtgctactcattacttgtgtacttataataatattctataaatcaggtgcaaacatgtggtataagatcatatgtttaaaagtagaaagttagaagtcttcgcctagcactattacaaatctaggctttagaggttgttttaaaggcttttcagtgtcagttttacaaaaatttgctaccgatgctgatccaggtgatgctgtaggatctaaaataaccgacgctgaatggtgcccaacagtgtcgattattttatagtaact

SEQ ID NO: 267268 - DNA, 1263 bp, Cannabis indica
aataaatataatttatttattaaaaagtcataacaattttgaaaatgaattacttatgcttattagttattacaaaaaaataaatgaaattgtaattaaatgtgacattaggtataattactatgtttatattattattattaatatttattaattattaatctaatatatttattatgataatatacgctatgattatgatgtgtttattaaaatttaaaatagaaatgtataaatatcacatacatgtttattatttatatttatatgtgttatatgtttattatttattttacaatatatagtttgtatataaaattaagaatatattttcataattaataaaatgtataataaattaaataatataaattatataaatttatagtctttggctaatttttttaatgtaaacttgtcatataataaatataatatacatgcatgcatataaattaatatatatttatatatatgctaattaaggttaaccaaattgttgataccttaatatttcaataataatatacaaggattcgttgaattggcatcaaattaagttcaaaccatgcaggggttacacattgatacatatgcatgaatgattaatattagctttgtttaaatgtaaacaaaagttaggttgtgatcataaaataaagttgtctcctccttttctttttctttcacaatttttattaaaaaagaattaaagaaggttatattgagtcattgaccgctaatttgttaactagtggttaataatatgttaatttaatataagcctggttgttaacatgttgttttaatagtaacaaagacttggtgctctctaatagtcgttcattagtgttgtcaatcctagcatgtatgactatgaacccatcacttcaacttcaagctttctcatataaagctaattaatcttaattaatataaatataattaaattaaccaaaagatgaaaattataaataatcttattaggagggacaattttatgtatttaataatttatgccaagtccttctattcacaacagatagcaaagccataaagatacatctcgagcatctccaactatattctgtaaatatatttttttaactaaataaggagtgagacttgaaaaaataaactccaactatacaaaaaataactctctatgatagagatttgataggaagctctttaaatgtagagaatttccgaattttttttgttaaactttttttaatagtattttaatcaaaaacaatatta

SEQ ID NO: 267269 - DNA, 3041 bp, Cannabis indica
aacacataatacctcataaaccaataataaaaaaaaaaagtggggatcaattttaaatatactaagacataaatttttgttgacgcgatttttcgtcaactgatctaagaagatcgtaaaaatatagaggactacgatgaataaattttgactaataaaatcacaataaataaattggacactagagatttatagtagttcacccccatgtcgcgatagtaatgggactacgtctacttgtatttttattgattagatctgacacaccacaattgtgttcttaagagtgtgttgataaaagtacatcaaatgattttttaggtgaaatcttaatcgagactcacgaacataggactcatgggagactcaatattcataaatttgatcaaagttggtagttgtatggttcttgggaacaataaaccaataaagtagaaaatagagtgtgtatgaatggtgtttgaggtcttggtgtcgattgagtatggtggactcaatgaaaaatatgaaggaatgtgtatggtgttcttggttgccgtcaagtaagtttcaagtagaaggtttcgaagaagaagatccaaaaaggaagaagaagggtctaaaagaaggtcccaaaaagtccctttcctagcctctctacttgatcaatatataacatgtagggtttgttagtgaccccccacatgtcggggtatctcacttacaaatcatgtataccactctttttaatgattaaaatattacaagaaaataaatatctataaaaatctccttgtttctaggctaatatcctacaaatattaacaaactggttatttttgattgaggatgcaccaatttaaaatagagtagtgggatgtcacctctcggctggaaatgcatgattttggtgataagtactgaaaacatgtattttggagtgtcagtgctcgcatacaatgccacatgggcaatagcagtgtcctccaacacccttcacttaaccacattactcaattcccgagtaaaatataccagtcttccttctgagccaattggacccgataactttagaattaggccatgactatgatacacactttgatccgtcttgaaattatctttccaatgcaagttgaactaggtcatttagataaaaattgagagagttatgcccattttactaaaggaagtttatgttgtcttgtcccaattgcgagcactgccatggccaaatggcagtactcgaacatgcatgttctcagaccctcggtgtgtgttttgacttgttttttaatgctgagtcatatttttatgtcttgggacccaaaaacctcatttcgatgtctgaaaccctaacgggaggccactgccactagttggagccagagagtggcagtggtcgcatatgggctttatgagccttaggagacttttatcatttgtatttgatacatgtatgttaaaaatgcaaccactaccattcccttgtggcagtgcccatcaaaattgaagagcactgctatttccttgtgatagtgcccattaatattgattggcactaccatttccatatggcagtgggtgcatatgccttttttcttgagggtttgatgccatgttgattttatgcacaaacctaagttattttatgcccaaataagtaaattccttgttagtttccttagcggattaaggtttctaaggtgaaaacgctcgtgcgggcccatgaaccatagtttgggcacacttgggtgtgtgagtcccggtaccaaatggttgtttgacatttttgagccctctagaagtgccatgggaccctcaagaagaatgtctagtagaattgtgtctcttgctcgattttgggactttttcaaggtttaaaacttgttgcttaagttttttaattcagattagagttaaatctcttgcttgaatttgaaacttttacggagttttaaaatctcttgcttaagttttgagcgttgagtagagttgtatccctttctcaaactcatcattgagtagagttaaatctcttgctcaagttggttggcaagtaaggtctgccgtgaacagagttaaattctcttgttcttcttatacactttttggttgtgcatatatgttgtgacccacatgtgtgggtttgtatatgttcacctgttgtggagtgcttattagttaggattaacaagtctttttcacatctttggaactttttgagcatacataacttagtttattctatatctcgacgactttagaacttaagtttaatatattttttggcgctcattttattccgatgcttattatctttgtaacacgaagttttaaagataacatttaattgttgccaatggtggcttgcatttttgctagttcgagtaagttgttggcatgtgcgttaactctttgggtactcgattttagcacgccacccacttgtcaaagtctcaaatgtaggccatttgagatgtctttcttaagtggaattttctgagttatggctccttagagcaccctcacttgtcttttatctcatctgtaaacttactttgccccctattcgatgtgaaattttgaaaaaatattcatggacttaaagtggcgtctcggtaatgactttgagatttatttatttatttattttttgtgagcacagttatgtccacgctcttttgtcccccagtgtttatatgtaaagtattatcctattttactcttttgtggttttggcatatatgaaaagatctggttattgtagcactcttataaatgtgagtttagctacttacattccaaaaaataaaggtaatagtctattaactaaaaattacacaaaaggtgtctttataaaaaactgttgggttttgtaccctaaataaaatctatttcaatataatcagatttactaattaataaagatcagaaattgcattttatgttgcatggttcacatgatttatttcatgattatgtttaatgtataaattctattaagtccagaacatatatataaatatgtatatatatttgttcatgattatagtgtcgtc

SEQ ID NO: 267270 - DNA, 1521 bp, Cannabis indica
gttgccttttattttttcttacttaaaaaaaagtgttaccataagatatttttgtagtagtgatagtaggattatacaccactaatactatttagtatttctccataccttatcatcaaatgtctatgtaatttattattttgaatagtggagaaattattaatttgtacatctattatgtattattttttttaaaaaaaattattatattatagatttaattattaatttattacataattagtttcaaattaaaactaaataaaagtataatttaacggaagttattgtacaatatgtacaaaagggatttgaattatgctttgttattgttatgtgtgtgaagagaaattaattaagcaaaatgtattattgagttggacttgttacttgtaattattattgtctgatggtagtactagtacatggccctattggaatagatggatataagtgtcgtagtagggtgctagtggtggtggtgggttttaggggtgggacagtgtcgtttagagttacatagaatggtccattagaaggactcaatcaaattgccaaaaggaacaaaagaaacatagccttttttgtaacgaaatgggtctgtgagcacccctctcatagataggactcataggaatggaatattatgttagtaccacaacagcatgcgttgtcgtgttttttcttctttacttatttactattgatcttcatcttttggatttttagcaaaaaaaaaatatcttatttatttatttaattaaagcaaaactcaagttaataggtacaattaatatgctaaaaggcgtgcataacaccatcctcagtgtcatgtcactattagtgcaattaagctacaatcagaggatgtggtagcttctttgagtcagtgtttcaagggctacttggttgactggagggacgttgtgttggactcagaggagttcatgttgggaaaagtattctagtgcggaggcactactccatgggtggttctgaatagcgacagtggcacaaggtctttgatcaagtccaagggtgggcgaacgagatcgtcaccaagagggtggttctacggaggtagagggacaagtgcagacttaggatttaggaaaagcttggggtaagcttatgagtcgagatcaggaagatttgcatgcggtccgtcaatgaggacatcgacatgttgaagtgggggagagtgttacgtgcgtgataagatggcacgttacaagctaagtgatgcccacaagttggccaagtggtggcgtgtggcgcatgctcgtggcatgctggtgcttagtttgtatgcagtggtattttcgtaaatatcttcaatattgttcggaacgggacgggacttggtattcgccatttatttgggtctacaaatagaatggtgcaatcggtttggcaaagctatgtgatttggtatgcagtttggccgtatgtctacagagccaaaattatgtatgttcctggtagaagactaaaaactcagaatgctctttaagggagtac

SEQ ID NO: 267271 - DNA, 1120 bp, Cannabis indica
tgcctcattggctcgggtttgcaaaatgcaaccctattttcattagcaaggaagatattctcatgagtttcattcaactcagtgtataccgaataaattgatacatacttgtcatgtttttctgtctttttgttcttggatgattcttttgagtcatcctttctttttgtgtttgatccaccaggattgtctactttcgtggtgactgtgctcggtgttaccgtacttatgttggatttacctcccgatccagtttttaacagcttcatttcagtcattgcttcctctttatgcacaaagacttgtgctctttcattgaactcattattgttcctcacagaggacccaagagatcatcccataactcacctcctattgtagacaagtcagttgtgattcctgcctgaagtgctcttagttgaatactatcattaaggtttctgagttttgcagcggccatgctgaagcaacttaaatatgccttcagagattcctcaggttgttgttttatgttggttaaggacgacgactcgagtcgacggtctctcggagcttgaaactgctttttaaagtccctcgacaattgttcccaagagattatggaatgatgagtgaatttatcgaaccaactgctcgcatctcctgttaaggaggttggaaataaaatacaacacaaattattggaagcattactggctagcatgatagtattaaagttatttagatgagcaaccgggtctctggtcccatcgtacgcgagacatgtgggttcttaaatccctgaggaaattcagaatttaagatgtcttgatggaatggctcggtttcttcatcagaatcgtaccctaaaaatttgccatgctctccatattgatattttctaaatttatcctctagttgaattattcgtagttgaataggatccactggttgctggtttacattttggttaagttgattacacaaatcaggtgcattttgatttaggtgctcatgaaggtcaggctgccttcgatttaatctctcgcgcaagtcaagttcgcgacgtctttgtgttaggttttatgccctaaataaaactccatttcaatgtaatctattttattcaacatcaataaag

SEQ ID NO: 267272 - DNA, 772 bp, Cannabis indica
atatatatatacttattttatttatacgtacaataaaattgaagtgagatatctcgtgaattattgtgtacccaattgagtagaattgcctaatataaaattattttaagtattttaaatttaaatttaaatttcctaatataaaatataaaatttgtggcataaataccttttttttttacttgttgctaataaatacccgaatcttaaaatttgtagcaaaaataccaatttctattttctatgtaagttcatcttttaacaattttgttaattattttcaaaatgccacatgtcattctctaactggtcttattaacaaaaatttattaaattatattttaaataaaaaactaattaaattaaatgaaaaaataattttaaaattaattaagattaaactttaatatttttttcaattctctctctccccctttctctatcgttttctatgaaggtgcattaaataagaaattgttagttttaatttaattatttttaatttaattttctaaatttatataattagttgtttatttaaatatattttaataatttttctaaattagaccaattagagaatgacactaccatagaggtctacgatagacaataactccccccgaacacaacttacaacttttatcgtactgtgctctccaaagagcaactcttctcaaaatctcaaaaggtgctcagttggaatcccattctaactaaggattcttgtggtttcggaggatctagctgatatttttgctataatccatct

SEQ ID NO: 267273 - DNA, 1299 bp, Cannabis indica
catgctacttgttgttaaaactttcaagaaattcacgagaccaaagaaactcaatattattatggactttcttgttacgttagaatcaaattctccgcaaaatcaccataaccaattcaatcatctcttttgataaggaatcaacatatctatgataaaagtcaccacaatgtaccttcagataacccaacataaattcacagatttttttacaatgcaacaaagaattacacacccaaagagcatgaagagtagtttcttcggccaccccacatataggacataatccatcaaataaaagaccatgtcgcgccagattaactttagtaggaatccaattatagaatgctttccaagcaaaaagtcttaacttgggaggaagattaagagactaaatctttttccaccaactagacattccactagacggggaggcacgagtcaaagccaagttacgaagtgctagccaataaccactcttgaccaaaaaccaacctgagttcttaaaatttcaaattagtttgtaagaaatatcattagtggaccaagaaatagatagaatagcctcaacttcattagccaaaaggctagataaattagctcttcattccaccttcccgagtcatcacgaagcatagaaaccttatctgacccgagccgatgaggagttaataagaggcttggcaacactgatgggatctaactattagtgtaaataacaataccattaccattcccaacccgccgaatcgacctagagtcacaaagttccttaccccaaaggatattttcccaaacaaaggaacctcagttagactttgtaatttcggaaaaatacctctttctgaaatacaaaccttttaacccacgaccagccaaagaattaggaacattgtaaatgcgagaatcttgtttagccaaaagagcttaattaaacagatgaaggtcctggaagcccataccaccatctttcttatgcaagcaaaatttttcttaactacaccagtgcatctttttttaacattatttccaccccaccgaaaatgagcacacatatggtgaatatttttaacaaaagcttttagaagcttaaaaaggttcatagaataagtagggatagactgaatgaccgtttttatgaggatctcacggtccactatagaaaataatttggatctctacccgtttatcttttttcaaagtatttatatatataatataaaaataaataaaataaataaataaaaaagaatttaaaaaatatataatttttagatttttttctttgtaaatttaaaa

SEQ ID NO: 267274 - DNA, 884 bp, Cannabis indica
tgttggcaaattcttctggacgagaagcatgaactaggcaaaaagaagaattacctctttcgtatgtactgacacttagagtgtccccatctgggaagatggtagcgaagcgagattcgagctttatgcctttattcatgggttccggatgtagcctcgcccattcttccagccaacactaatattttttttaatggctttattttcctcatttacaatgatctcaataatggcttctttgacatcagcttggtcagagtatatcttgtgagaattatgatggtctatgctctgatgaggagcaatcaagccaacttgcttgaggttctccgtagtaactagatcttccacttgcaacactttcgaatctatactacagtaaagtttcaccctctcctccaaaaaaggagttagctcaagaaggggaatatcatctgaaaggccacagacaaaggtgccctgattagatttttccaaaattggcaaaatagtcaaagaaaaatagttgggaaaaatttctagtgcttactcgcaacatagaaatccaataaatagttgaatgtctttttaatgggaatttagatgttaagaacccatattctcaaatttcatgagtgtgttttcatgtactggttggacatatcacattagaccgcttcttcagtgagtagaagtcgactttagttttgtccttccgcatgggattcgactccaacttataaaagtagaggatttcattaggatacaggacctctacaaattggctcttgcaaaaaacataccatctcgctagcagttcgtacacctagggttgagcctaagcatatcgggatttagattcttttaatcttaagatcaactactgatattgacttggaaagata

SEQ ID NO: 267275 - DNA, 927 bp, Cannabis indica
attgatttatcaaaaaaaaaaagacaaaaacttgtatttttgctctcaatgaaagcacaaaaatgttgacctcgcttctagccaacgacagtgagtcaagataaagtaattagataaaataaataatagaaaacaaaaataataagtaaaaagaacacatgaatttctagaggttcagcctcgtgagaatggtaacaacatactcccctttttgttgtattgatttgagaacaagaatgaagtgttcttcctctctaaagctcttacaattgatctctgagtaattctctcttagatcgctcttttctctctagagtgttcttcataactaaattttgtctcccctaacagtgaatttatgccactatttatatgagcttattacatgaagaatggcttcccttaatctataataaataaaataggaaactacattaattttataattacaatgcaaagaatgggaaaccaaagaatattacctttattctttgacttaatccacgaatgtagggattatcattgtgtcttagaagcaacgatgcttgcctctgaaatttccaactcacatatcctgcccggtgcatgagagttgatcacgcgattgtactttggtcatatgtcccttgattactctgctaggacatcctgctatatgttgacgacagagatctttacatcaacctttcggggctgctaggagtactttcttttgcctaggtaggaaaatagaagacacgtgtcatccagctcactgccacgtcataatgccaaaaataggatgacaatatgtgccatgagtttaaatttaaattgtaatgttaaaaaaaatattttatgttatatatccacatttaatgtaagagagataagagagatatgtgtagtaactttttatgacactgaaaattgttaggtttattttta

SEQ ID NO: 267276 - DNA, 2434 bp, Cannabis indica
gtatgatcgtgtggagtggggttttctccgtgcaatgatggagaagatgggttttgacttgcactttattaatcttattcctgctacggtgaagacagtgaggtataaaataattcatggtggacatgaattggggccgattatcccagagcgaggaattcgccaaggagaccctttgtctccttacttgtttctaatttgtgctgaaggtttctcctctttgataagaaaacttgagcgggatggaaagcttaaaggttgtaaggttgctaatggtgctcaagtcatatcacacatactttttgcggatgatagaattatgtctattgtcgtgctaatgagagagaggctttgaacgttttatagttgctatagctgtttgaggttgcctcggggcaacaagttaattttagtaagtcttctgtcttttttagcaccaatgttcctagtgatactcgaaaccagttgtgtggcttgctaagaataggttttttttttgagaaatcagcaagtgttcttcattactccaataaacttttaaaaattacaaatctaacagcacccaaatcaggcctgagaataactctatgtatttacaatgtattaaaccaagctgaatcttctaagcatactttgttaggctacactatgtattctgcttttacaagtgttttttaattgttgtacaatggtgttcgggttctcatcactttgctggtaatatttcctatttctagccttccaaatgaggtataccaaggctagaattgcaacagccaataccttctttcggaagccagatcacttccttcgcccaatagatctcaccaggctgtccagccgtgttgctgtggtcttccaccccagccacactttttttttgttgtagccagctcacagcaaaggtgcattcaaagaaaatgtgatcacttgtttcagcacctgtattacatagaagacactgcatatccgctacaatattgaatcgaaatagcctacgttggtctcccttgtgctatgggtagaaacaaagatgctattttaggcttcttaaaagacaaaatgcagaaacgaatacaaaattgggaaggtcgatttccgtctactgctggtcgagaaattctattaaagacaatggtccaagctttgcctagttttgccatgtccgtgtttttattgcctttgaagacttgttctcaccttgaaagtttaatgtcaaaatatgggtggagttcttctactaataactctaaaggtgttagctagtttagttagagaagactgtgcaagaataaaaattctggtagattggggttccgaagtttgcgagactacaatttatctctgctgggaaagcagggatggaaattattactgtatcaagactctcttgtgattcagatttataaagctcggtctttccctcaatgttcttttcttgaggcggagttgggtgccaatccgagtttcatttggcgaagtatttttgagtctcaacaactgatcaaagtgggtgcccggagaagaattggatcaagtgcttcaactgaggtgcttaatacaccctggttgctaaatgatgataatccttgtgttgtttcaacacatcctgcattgaccgattgtaaaatttcccagcttatgaaaaccgattgtaagcaatgggatatggaggttgtttctaatttgtatgagcctcgagatattgaacttattaaacaggtccctttgagtcctaatgtgatggaagacaattggttttagaataaggagccctctggtttctattcagttaaaatctcatatcatcatctacaatctgttaatggaaatcggagttctaatatggaagctagtttttggaaggtgttgtggaagattaaagtccctcctaaggtgttgcactttgcgtggaaagctcttttgggttgtttgccaacttgttctcaactccatcttaagcatgttcatgtggagcttcactgtgttttctgcaatattgcagaggaatcaatattccatgtattagttggttgctcctttgctcattcatgctagaatcgatcttctctggggttggaatttctcctgcaaacaactatgtggactggtttatggagttagcagcaggggcaatttgggtttaatagaagaagttgtgatggttagttgggctatatggaaggctcgcaatgctcggttatggaatggtaaacattgtgtagtagcagatgttgtttggctagctcgaaacactcatcggcaatggagttttgcacagacaaatcgtttaagtcctatttctctggtttctaatcttattgacagcaagaattattggaccaaattagtagctggccagctaaaaattaatgtcgatggggctatttttgaagctacaaatcagattagtacaggctttgtggctcgtgac

SEQ ID NO: 267277 - DNA, 1206 bp, Cannabis indica
gacagggtggaatggcatttttgctataggatgttacttgctatggggtttcctctctccattgttaatctgatttatcgctgcatttctagtgtatcatattcctttctcatcaatggttcaactcatggagatttggttccaactagaggcatacgtcaaggtgacccattatcaccatatttattcatcatatgtgctgaaggactctctcgattgttttagtttgaagaacgcaatggcaatctctcgggtctatgtgttgcacggggggcaccaccaatttcacacttattttttgctgatgacagtctagttctttgcaaagccaatgtccattctgctaaagctattcgacgttctctaacaacttactaccgtgcctctggtcaacaactcaatgcagcaaaatctgtcctctccttttctccaaacacgattccacaagttcaagcgactttccaataaatttcggacatgccaattcaaccatgccatgaatgttacttaggcttaccttcttactctgggagagacaaacaacttttatttgctgatattaaggacaaactctggaaattcttatcctcttggcaagaatagcttttctccattggaggaaaagaggtgcttttaaaggcggtagcgaaatcgattccaacttatgctatgagctgtttcaggctttctaacacgctcattgatcaaattgaagtcatgatgaatatgttctggtggggttctaatttttcgggaactgggatcaattggaagacttggaagtctttatgtcattctaaagtagaagttggaatgggattcaagagttttgttcattttaaccaagctctacttgctaagcaagcttggcgaattttttttgaacccacctccctattaagccgtgttctcaagccaagatacttcaagaataactcttttttggatgctggaattggaaattatccatctctaacttggagaggaataatatgggggaaagagttgctaattaaaggtctgagatggaaggttggtgattgtcacactatcacttgtgcatcggatccatggattccaagctttacttattttaaacctcttctactcaaaggagatgacagaactatcactgtttcagacttgctaactgatgataacagatgggatatccattgctgcaatcctgtttttagcatctgatgt

SEQ ID NO: 267278 - DNA, 1391 bp, Cannabis indica
cctttcatgtctgctctaactttcatacagttttaaagcataaaacttgtatgaaatttctaaacctaaatcaaattccataaacctaaatatatcgtcataagacaacagaatttaactaagagtctcagaccattaacaaaacaatcatgaacagctttcaactctgttcttactcaagactaaacccatctaagtagaagccattgaaatgctcttttcatcaattaaataactgacataatctaagttatggagagtaagaatatccagctataaatggagatacttagtgttacagatcaatggaaaaccgttaacagaatcacaaaacagttcaatcactctgtaatcacaaactaaaataggtaataaacttacgtaggtatattgtaagtaagaggaattagagtattagatggaattccaacaacaggaccagtatatgggtaaacaggaacagcatagatgcctgctcctcgatttatattttcctggttttgagatggattaacaagtgcagggtacatcactggaaacatctgaaaatctccatttgggaaaggaggaaatccagtgaatgctggaacctgagaaatcagagttatcgattacttcaagaaaagctttggaccaaatacttgtacacagtatagcaaccaataaaattaatctgaagatacctaaaagataagcaacagcaataatagacagaattcaaaattgagctgactcctcccccaaaagaaaaaaaaaatgttaattctcaagcttcccaaatggtttgatctccaatatactgatagatcatcagaaaatataatatttctggctctaaacaaagaatttgcaaatagacgcatatacaaaacaaaaataaaataacaattcgcctaaaaaggaaaaggaaaccctaaaatccaaatcttgaagaaaaaaaatagaaattatagcagtggaagaacataaatcgtccaatgaaatagaaaacgcggtagtcgtaagaattgagaacgacatttgtgaaattagtagaaaatgatagaaagacaaaaacctgcggttgcttgggagatacttgtggagatttctgggacgaagaagaagggtgagagctggaggtcagtgcttctggcgtttcccccattagagactctggtttgaggtgaaggtgatcaagttttgtatcttcaatgctctttgcgaagtctattgtctatatattggtcacctttctctggaaattcgtcgtcttttattacgatgagagttagtattcgtggcttgtccaatacattgatgccatgtatcatataaaatagatacatatctaattctacttaatgctaaaaataaaagaaaataataaaacatgatacaattatatatat

SEQ ID NO: 267279 - DNA, 887 bp, Cannabis indica
cgaccatcacacaatcaccattaccaccaccatcacacaaccaccattatcaccacagccaaatgttttactaaaaaaaaaaaaactaaattaagacaaatacaaaaaattgaaacctaccatcataaacaatataaaaaaatgtctaaaccaaatatcaaatcctaactcaaatcaaaatctctctttgttcaaatacatttaaactcgacaaaaataatttaaaaattactcaagtttagaaaaacttgaaaagataaagagagcacaaacatggaagggggatgaagaacctgggaattcgaaagtctcaaaagctcgcggtgagctctatttgagttgacaatggtctgtgacattaatacatgaccttatagatgctcgtgcagcggggagagttggtgtagagagaacccgcgagggaagatatgggctcgaggttcttgggattttcaaggttggtgaagatgtttgtggtctctgtatgcgtcaacaacaatcgcaactgacccatcaagctaagacactgtgagagagaattgaaaaacgtgactaaggtgaatcgatggggctcaggagagagggggatcaagatttgggttttgacggtaggtgaaactcatggtgtggttcgattgggccatctgtggccagagatggtctcgctgggacgacaggggtgtcgcacgagaaaagtgaaaaaagagtaacggaggcagtatatagtggcatgtataccgtagcacttaacagagcctattgaaaggaagggtaaagacaaacatagaagtgcaatttatgtagttatgtcgttaaaaatcagtttatgtggttaagtgtcacaaattgtatagttcagatagttttatcgccaatattcctaatta

SEQ ID NO: 267280 - DNA, 944 bp, Cannabis indica
gtatctaggtttgaccaaatattacatttttccaacaaaaagtatattttagctaatttataaaataaaaccacactacattcctttctatatacatgtgtttgaacacgaaattattatattggcagcccaattaaagtttaattaaagctattatacgttaattaaatgagatttcaatgtatatatatagatcttatttttatgattgttcctacctaaaatctttatcatttacatagctaatagaatcaaattaaacatttacacaattatattcataatggcgagtggcgactcatcgatccggccaaccataagaaaagtttcggcttgtgaaagccttcgaaaggctactcacaagaactcattggtagataataatatccctcaacccgactcgtcctcctcatcatcaattcggccaagcataagaagagtttttgtcggtaaaagtctccgaactactcacaggattcgttgatcctcgaagaagataataatgttcgaggaaaacaacagtccttttccttctaaccctaactcatcatcttcatcatcaattcggccaagcatacgaagagtttcggctagtgatcaaacccatcacaagataaataatgctactactcattataatcatattgaaaatagtggtccacaacatcaagatatattttatttctataatgatgatgatgattatggatctaagttatcatcatcatcatctcattccaaacataactcttcactttcttctcatcatcattcattgccgggaaaagaaaggcacataagagaaaatttggtggacataaaaatagccggatatagtttattgcgcatagataaacattagttgtaataattgtaataataatcaatctcaccttgtcccttaaagtggtcttactgtcattttttatttttaacttttttat

SEQ ID NO: 267281 - DNA, 1383 bp, Cannabis indica
aagcccaagcccaagcccaagctcaaaacaattctaatccaaccagtgaaagtgaacagtgaatagttgtaggcgtgagactgtttagtccactgaggcgcgtgggttgttatttctttttcagcgtggtaggtaacgcacttctaggtaagcatacgtcatcttctcacaaacatgacgtcataactgaatagataagatcaacggttgacaatccttgaatatttgtactgtttggattttaaattctgtttggacggtcccgatgacttggagaagacagaccacagagcccagatcttttgtccacactttatccttgctcgtttggtagtttagcaaataaatggagggtattttggtaattacagatattgtactttgttgcatgcgaaattatcctaattggattaaataaaaagtgttctataccgcatttttcggtgtttctcttctctgccgccgtatttaacacttatttttaaaaataaataaataaatttatgtaattatttttctatcttttaataattattttatatatttttcaaatttattattatttcagtgcaaatctatcaattttgtgatacttatttttgtttatatattgtattttcataggtgaatattattttaaattttatttttttataaaagttattgattgaactttatattttgttaaataacacaataaatcttataattttcaaaatagtacaaataggactataagctcaattttcgatattttttaatataaccaacttgaagatatgttagagagtcccacattgctaatgtgtagaaagataatagaatatataagaggaatgggctactcctcccattgctaattagttttgggatggaacctcattcaccttattcacaaattctaacatggtatcagaacaaaacaaacaaacaaacaaaaaaaatctctagcgactaatgagccaaaaaaagagccctaccatcttgagggggatgttagagagtcccacattgttaatgtgtggaaagataatagaatatataagagtaatgggctactcctcccattgccaattggttttgggatggaaccccattcatcttatcctcaaattctaacaagataatttctaacacgagcaaatacagaaaatttaaccattttttttataacacctctaggtcagattgttattaagttttattttgatgaaaaatcagttcagggtcctacttgtactattttagaatatacaggatctattttatcatttaacaaaatagagagttcaatatataacttttacaaaagacatagtctaaaatagtatttgccctaatttcactcatttagctctttatttaggggtgttcattggaaca

SEQ ID NO: 267282 - DNA, 2338 bp, Cannabis indica
tagtactactacttcaaattaaatcatgtggagaaagattttgccaatacttaattttatcttaaaaaaaaaaaatagaattgtaataaaattaaatttgtaagggtaaggtagtctacaaatatcacaccaacaagcctcataataataagatatacatctatatattattgctaactaattttactaatattagtgagaggaaatttacatatatattactattaatattttatttttttcacaaatgtgatttaatcacataaaagagggatacctcttagtaatctttcatccaaataattaagtttattatacatcttagtaaagacaattagcattaattatgtacgattttattatgttgtgggtcctattcttgaaaatgggtactagctttataattttagattttattaaactctatgagtattagttaagtcaaatattaattgtgcaattttttttataattttgttcggtaatgacgaataatgcaatagatggccgttaaagttacatgaataaatttagaacctattcttagcaggacaaacataagaggtatttagaatgtcaggcttaggtaggattaaggtttggaccattttaccccaaagtttatatgttgcttaactttcaagtcaatggcactttaggaattttacaaaaaggaattaggtgtcacttgtgtgtgtttgcagctcgtttttaattaaagaggggactaatacatcatcccatagtttctctaattagaaaactcaagcatatacaaagaacaaaacctcatgcttgtctctatctctctcttgtactcggctccaaggaaaaatcaagggtaggagcagccaactcagtgaatttcttgaatttccagctagcgtttggagtttctaagctaagggatgggctaagaaaccctattatatgtgttactaaaggttttgttaggttttaatgtttgaattttcgaatttaggttctgtagtgataatttgtgcttaatttcgtgttctggagttatgttgagaatatttgtgatatcttgagttgagtttgttggtagttatggtgtttgagcaaagtatgagtttaaggactcatactttgtcctcttatggtgtttttaatttttgagctatttgttgagttcttttgcttaaattgagtttgttggagtataaacaggtggttcagaagttattgaaaagtttgggattgaattgagatgttaggagtgattttggggtttcctgcgctgaaccggttgaccggttcagggggacttgtgggaactagaattctggttggtccttaagaaaccccaccgaactggtcttctggttgggaaactggtctgccggttgggaaaattttaggaaccctagtttttctggtttttgtgataattaggatattgtaataacgagtaccaatagcagaacccgtagtagtttgggtttccggattagggttttggcgcattatttacttgtttgtgtaaatgtgacttagggcattcatttttgcacgaggttttccgttcaggtcagccaacttacttgaattcagaaatgaggtaagattagcatagaatatattatatatgcatgatgtgtttgtgattgtatatcttttgggtgatatcatagcggcacaaccattgtgtcggttcggcagtacaagcatcgtactggttaagagtgataccctagagagtattaattggagctattataacgacacaaccattgtgtcagttcgacagtacgggcatagtactagttaagagtgatatcatggccaattgtactgttgggtgctattgatgctgtactctgaggctctattgatgctattatagcggtacgaacatagtgctagtcttgtagtgcgatcatagtgctggtagtggatgatatcatggtcaatagcaccaaccattaagaacgttcttaatcatttggtaagccttgtggatatgtgtatgggcgtctaaaaacaggtcgattatttattttgttgtatgcttttcttactgagtctattggctcacagattctactatcatgtgtaggtaaaggaaaggtggaagctgaacaagagtgagtttcgaactcgggtaatgattgtacatgtcaagacggagcgacctggagtgtttggtctcgagacatcttagggcacattttgtagtcgctatgcgacatgttgtaaaaatattttcaaaatgtttataaaagttttagcacggatcccagttatgtaatatatatatatatatacatatgtatgtttataaagtttattaattttattcaaagttttgatttga

SEQ ID NO: 267283 - DNA, 871 bp, Cannabis indica
cagtacttaattgcctttcaatctaacataaatttatctgtacattactattttgtgcatatactaaataattctgtactttgagactcctcaccatcactgatgcccaaagcatctgactgcatctcgagactcttagacgtttcttcaacattcattcctgtcttgttggttttgattggtgttgaagaatctgaaccataatgaagaacaaaaggatgttacaagcaacaaatttcagcataaatttacagtcattattattctatatcattctttttgttgtgttatgacagaaaatcatacccaccatatttatatgtacacatgacagaaatactagagtttcaccttttactgcatctaggaaggaaattatgtattctaataaaaatatcatacttctgagggacatgcttctccagataaagtatgcaatatactgcattaaatgattcattacattgttctacattattggccaaagaactaagaatcattatgagcaacaaaatgtgaaaggctcattatcttttggaatagtttctcagtatggtaaaatcaagttagcataagaaagatttagaaaattactaagttgaagatccttaccacttttcaaccaagaaacatttgagtgaatatcaagattctggccactttcttcaactgtaagtgttgcaacactagcagggtcagggtctaccatagatatggcagtatattaagaatcaatatgcttaaaattacgtactcaactcatctaatatagtaaataagtatagaagttgaccaagtaactttttcatacaaacaactataaagcatgaataacccctcataagcataagtaatgattacttgagaaatt

SEQ ID NO: 267284 - DNA, 594 bp, Cannabis indica
gtttaattttgagcaccacaagttagaagattttcccacttcccatgaaattttgaaagttgtccgaaaacctaacttacattctagtcaaagctgccgataaaactgttgcagagagagttccattattttcttatagcattgaaaatcaacctaggctagtatgacagccatgtatagtttattatcaattgccagtttactatttaccacaataaaaaagcattcatgctagtagttgcgtttggcagatggacatttattctgtttattgctgtttgagacatgctaataagtccttagcattagcaattcatacacatatgagatcaaagatacatctatttcgattacactacacaaaatacatggttgcagctatttgtggcattaacaagctgctctactagaccccattacaaagagaagaacaccaatcaatttaagttacaaaattaactggccaaatgaaaagactaaaccaactttgaatctccataatgcaataaaaaaagaaatgttaatttgtttcgatctctgcctcacacacatggcagtaaggagacagagtcattaccactttgctgagatgat

SEQ ID NO: 267285 - DNA, 703 bp, Cannabis indica
gaaattttaaaaccctaacatatacgtatatcctaacagttctattactataaaaaatttactagtttaaccggaaactatatacttaaatatgatcaagacaaacattactctaaaaactatgacaaatcaaatatcatttaacatcatcagcagaggaggcttcaattcactgcttactgctatgagtagctcttaaataatacgtaaaaaatgaaaaagattatgggtaaacagttacaatattatagtaacagatcccaactaatctagtaacaatattctaactatttctaacaataccaacatacaagactatcagattctactgccgagagagtttctgttggtttttaataaacaaaaacttttgtgagcactctatttatctatgtttctttattcatgaatttaagacgttatagtatgaagagaaaagatacaaagaaaacataaacaaaaaataaaggggtttttacaaatatataaaaaaaattagtaaaagtttataattttactgtcacatgaatttttttacaaaaatattgactttttataaaataactgtaaaacaacaaaatagaataattaaaacaatagtagaacaactaaaaaataatcgttgaacaactgcgaaaacttagcacagtacacagtattttttgccctataataaaaaataaaaaaaaaataaaaatttcag

SEQ ID NO: 267286 - DNA, 1268 bp, Cannabis indica
agaagttacaacctttttttttttcctttctttcttttttaactggaatgaattgtattgtgaaaaacataacgcacttataccatccctcttggggccatagttggtacctggcctttttttgctgtgatatctgtcaaagattctcaaaacaaacaccaatttatttctaatcgtagatataatttttattatttatttcgtaaaaatattaatttaattatggtcactatctataaaacgataaatattttagaagctagtgatataggagcctagttttcagaaaattttagttattggtgtcgaaattataggattctcgccacattaggagtgtctctagcctaatgtgtgctctattaattgcaggctacttgatcacattcactaccctaaattattcgaaatttatataattataatataaaaattaatatataaaataaaatagagttacaacaattcatatacaaaaatgtaaaaaatttccactagtagtaaaaaaaaattactcagctccttacatatttataaatatataacacaattacttgttaggcatggcttaaaaattgatactattgtatgtcatttttcagtttcggcaatttgagaaattatattacaaaatattttatttgatattgtataaatatagtagatattttgccaactttggacaaatttttaataatatatagtttcaaaattatagctctaagtactctattttttatgccgcaaaagaaatttgatacgtgtgccatttgaactttcaattttacggtagattatttaatatttttcttttgaaaagattatttaaatattttgaaaaaaaaacaaaaaagcggaatagcttttccttctagcctagtgtatcatctataattaggttatgaattttttctaaaaaaaagtcggaaacaaaaaacttgacactaataagccaacactcaggaattctctattttttagtattttactaatttaaaaaacattatttattaatacgatcaaaaaagagaagcacgtggcttaggaaattacatactaaacacagtcggtctattatttgtggagatagttacaaaatgtatgatcagaaattgattcccttctgcgggccagtcttaagctgtatgtgttctaaggtaaaattaaatttttgggctctcttatatatagtttaattattataaaatgataattttaatctttttacggctcgtttggtaacgccgtattagttcgtattgtattgt

SEQ ID NO: 267287 - DNA, 3177 bp, Cannabis indica
tttttttttttttttttgagcaacaagaggctgattacaagaaaaacaaggaaaaacagacagccaagaagggggctggaaagaagcctcctagtcttcatctcgcaacctgagggctaacttcgcaagggagtgtgctttgtcattgtgctggcggcatacatgcagcaaagtagcttcagggaacctggagaggaaggttctgatctggtgaacaagagtagaaagaggggagtagtcatgccaattaccattcaccttagagacaaggttgagacaatcagagaagataaatcttggtgtcaaattggaagacaaacaccattgcagcccttcacaaagagcttgagcttcagcaaaaattggagaggatgcccctggtttgtaaatccttgcagactgttgaatgtgagacaaaccctccataaaaaccatcctgatacctgtggctggtgtattagtagtcagggcagcatcaacaaaaagagcagtggttgatggaagcagaatatgatccacaacggcaggggaatgatcattagtcatgctggaaacaaagggatgaattgagcatcctaatcctgcagaaaacttgagacaaaatcttgaacattatcaaatacattaggtttttgaaaaagatgagcatttctgatgttccaaatttgccaaatgataccaaggaacaagggaaggtgagctctgggaattaaagtaaggctatgaaggtaaaaatctctgatatcaagcctacgatagtccacaaaaaactgtttaaaatttgagtgatgccaaatggttttaactctgggacagtgaagaagagaatgagaaaccgactctgcacttcccccacaataagaacagcaagcacttgggatagcatgcttgtggaaaaggtttagagcacaagggagaagatggttgaaagccttccaagtgaagtgcttgattttaggagaaattttcaaagtctaaagagttttccaccaatccttaaaagggttaggatcagaggtggaaggagaagtagtgagggcaatgggctgggctaggtgataggctgagttgactgtaagaatgccagagtggtgaaagccccaaatgagagagtcagtgggtccaagatccaaaggaatattgaggacagcatttgcttgataggaaggaaggaagtggtgaagtttttcagtattccaggttcggtcagggttgacaaaaaaggagacagtggcaagagagggttcaatgggttgaagaatggttggatgggaaatttggggaatccaattaggagcagaaatagggatatcacggccagaacagattttccagatgaggccttttttgagtagttgggaaccccattgaagacttctccaggtaaatgaaggattgtggccttttggggcatggagaaagtcagtatgcttaaagtatcgagctttaagaagagaatggagcagggaatcaggattagaccaaatccgccaagcctgcttagccagaagggcatggttattggaagtaagagaaagaaaacccagacctccaaagaatttagaggcagagagggctgaccagttcctccagtggattttcctcttattcgaagtaaagccccaccagaatttagctgttaagctttgaatagaagcacagatggatttaggaagtctaaaacaagacatagcaaaggaaggaattgcttgaatgacagatttaatgagagtttctttgcccgcccgagagaatagcttttcattccaaacgttgagcttggaggaaactttctgaataaggtagtgaaagatagaatttttgaccctaccaatacaatgaggaactccaaggtatttactaatgaaaccttcaccattgagaaacaaggaggttcggaatctggattgggaatcatgggaagtatttggtgagaaaagaatggaagatttgtccctattgacagattggccagaatcttggaagtgcaaatgcagaattttattaatagcttctgaagattgagatgtaacagggacgaaaaccatactatcatcagcaaaaagaagatgggaaaaagagggagcacctcgacaaattttaatgccaaaaaacagggcaacttcctcatggagacggatagctgcagataaaccttcagccacaattaggaaaagataaggagaaaggggatcgccttgacgaatgccacgggaagaagaaaacacatttgatagattaccatttagagataattggtaggtaacagtggaaagacatttagtgatgagagagataaacttctgaggagccccgatatggtgaaggaagcgagagataaaagaccattctactctatcaaagcccttttccatatccaatttgatagcagcctaacctactttgctggattttctggaatgaatggcatgaacgatttcattggcaataactatattgtcagtaatttgccggcctgtgagaaaagcactttgattggggctaataacacagtgaagcaccgatttaagtcgattagccaggacttttgagaaacatttgtacaaagtattacaaagactaatgggtcgaaaatcacgaacagttttagggttcctccttttggggataaggaccaaaatagtgttgttgattggagtgaagtccccctgattgttaaggatatgaaggagaccctgacagaggtcggatccgagagtgtcccaatttttctgataaaagaaggaattcaaaccatcgggaccaggagatttgtcaccagagagactaaacatggctgttttaatctcatctacagtaaactcctcaacaaaaaaagcagattgggcaggagagagggtactggttacaccctgaagaatggagaaaattgcagaagaagaagttccttgagagcaaaaaatatcagtataataggaatgaaactgagtgaagatagtttgggtatcatgagtgatggaaccatcaggaagggttaaaccacgaatgtagttattgcgtttacgattagaggctttttgatggaaatacctagtgtttttatccccagcctgaagcaaattaactcgagatcgttgtttccaaaagatttcttcttttaggagaagtctgttaagctaagattggaggtgagagatttgttgagtagaatgagga

SEQ ID NO: 267288 - DNA, 1891 bp, Cannabis indica
atttctgatcttatattaattagtaaatctgattatattgaaatgggttttatttaggtcccaaaacctaactgtccaaacatcctcagtcacttcgggggtagtatacctagctatgtgccctcaaaatcaagcgagttccttacttatttttttcctgttcataattacatattttcaaaaatttcaagctattggtcagaaatatcaattgggcttcaatatgtcttcaaccaacttcatggaaggggaatggctttaagtttgttgtatgactggtttaattttcacctttaagtcttagaagtgaacccatctcccgagtcttagtacttcttcaaccctccttcttggaagggggaatcgcttgaagtctgttgaagagtttagaatggtccatgtaattagcacaaccaatgtgcgttcatcatgatccctcaaaaagaacatctcaaggctattacagtcacttcaacctgctggccatattgataagttttccatgagaagtaagaaaataagcacgacaagaaattctttgcgatctagcatctttcccattacaaattcatggaaaatatgtctgaatgttgaatcatccctcgtacttttgattgaagagagacgatcgaaacagtaatacaagtctaaccctatctccctagaaaaaacatgcctaggacgttgtttctcgttggattcccctctctcactaatccaaataacataagtgtgttgtgatatcttacctaaggtagttaaatggggaaaacgtagatgaaaggcaaattttgcaactcctgcaatgatctgggagcacaatttgcaattctttcaggtaaggttaattaaccaaaagcttaaggaaagccacgacaagaactttaacaaaagttgacacctacaagacgtatgaagtttcataattcaaaaggttcaacaagatggtgatcaagttaaagagatcttaaattatcaagtttagactgttggaacaaaaaaattggcaaagtcttaaagatcaatctattagttcgcataaaaagcaaacaaaggcaagaaaaggaagcatgtaataaaccttgaagtaaagcacgcataagtacgacagttatctctaagaacattacaaatggccctatagttagggcatatctaaaattgtttctacaaagttaaaataaaaagacaataggcaaaagttatgagatgagcctcatttctcagtttgggcaatgtgctgctcctagaaatggcttggaaggacttccttggttgaacactgggctgctcctggggtgggacttggaatgcactctaagttagagtcgaagggtctgctgggttgtcttgaggaagaccctgaagatcttaggagagagttactcaaaaaacaaccacctctgttaagtctcctgcctctgtatggctagttgactccctgtctgacttgaaattttctcatcataaaagcacttgtcgagatacgtgttgtttttgacagtaagaacactctgtagaccctcttcctaatatgcctccatgatcttaaggatggaagcctccttcttccataagccatgtagcaacaatgcgtaagacaaattaacaaatttaagacaaagcctttcaacacgagttgctaggtcgatagcatcatggattgactatttagcagtctctctggccccttgcatggctcccaaggcaataaaagctttaatcatgttggctagtttatgggaaattttcctctatagctataggatagtgttcaacaatcattgttgactatgtggacgccatgcgtgactataacttgcaactcatgtttaacacaccaagtgtcttttatcttgtcaagtcctcaacttagtcttctcatctaact

SEQ ID NO: 267289 - DNA, 1241 bp, Cannabis indica
agtgcttgaaaactactttttttctcaatgtatccaatagaaaagtgatgcacaacagctttggctttgtccttgtcaaattttacgatttttttaagataatgagagtgatattttaagataacactaccgagtgtaagggtaagtaaaaactagttaaaatttaacatgaaaagtagaacgtttccaaatttttaattagggggtcatttttaccaaatttaatgcgaaaactatcttcatattcatgtcgtagtagtataaaatcattgtgactagtatggaacaatatttcaagatgagtctgtgccacattttataaagggtaccactatcagaaatgtgagatttttactatttcgattaaaatgattgttagtgcttgaaaactactttttctgcaatcctttgtaatgcactttacaaatctgacttcagaaacaccttcacttgagaaacagtttgagaaagagagatttctaaaaattgaattattattgaactgaataaatttacaagagtgaaaagggagtatatatatatacacctataacaaaccaatagaaaaggaaagaaagaaaagaaaactaactaattttctgaccaactaattaactgttataacaaactctaactgccatgtaacaaactcctgaacatcccccctcaagcttgaaggagggtactcgagagagagcttgtgacaaagaaaattaaacttgggcagagttaatggctttgtgagaagatcagttggttgatcttctgttaaaatgtaggagactgttacttttccttgagccctaggtcacgaacataatgaacatccacttcaatgtgcttagtcctagagtgaaaaactcgattggatgcaagtttctgggcaccttaattatcacaccggatgactggggtgacaggaagagtgattccaagctcttgtaacacagaggaaatccaaaccacttcagtggaagataatgatctatattcagattcagtgcttgaatgggcaactcccgtttgtttctttgagccccaagtgatcagatttgagccaagcattacacagtagccagttgtggactttcgatcatcaatattgcaggcccaatctgcatcagagtatccctccaaagtgagaatgatggctgatttgaagactaaatcgaggttgattgtgcctttgatataccgcagaacacgatttcaagcaagacaatatgcattggtggtttttt

SEQ ID NO: 267290 - DNA, 1162 bp, Cannabis indica
acatgtcatccaatgctcagcccgaggtaaacaatgaggcttcggcaaaagatgaaactctcttaatgatgagagggaaagctttgatcacttttctccaatctggggaccaaagttaatgatctgactgaggacctaagaaaggcctacaagagacccttgattctgagccaacatcttttattgctgaatgggaggtccttcaaaaggaggtacaaagcttggagtcaactgctctagacatcttctatgagttttggagggctaactttgactgcctcaatgagaacaggaggcttgtcttggttctgtgaagcccaaaaaaccaaagaagatgctaaagcagccagcaacaaccctcctaccgaccaagagattgagacttcagttgctgaagatatatctgatctgtataaggaaccaaggactctttctatctgattattcacaacctctttttacttgttcggcatacgagcctatttttaagtacaagtcgtctaagaaaatttgaaactttgaaaatgtttttatttttattttagacaactggctagctaggaaacttttaatcttgaagttatcatgctttgttatcttaaaagatgaatcttttctcttaattccaaattattgcatatatttttattttttcagcttgttatttaccgcttctttgtacgggcgtatagttgccccccaagggactgagcaaacttatgattcatggtcacttatattccacaagttctattttgtatgtcaggctactaggtttaggtaaaccctttgcacacatttttgttggtaattacataacttcctatataaaaaaaaggtaaaatagacacaattagaatgataattaatatctttatttatttaatggtctatatgtgttgttaccattgtaacatacatttattgaattgtaaaagctattacatgatctaactaatctttggctaattaaaacataaaacaattgaacggtacattctgcctaaaagacattgcttaagagcaatgatccctgaacatactatacattaggggtggccatacattaggtttgctgaagctcttttttcttcaattttatcaagtgattctgccagcagggcatgattagtcttctagtcgtaagttaatcttctgtgag

SEQ ID NO: 267291 - DNA, 556 bp, Cannabis indica
ttttaaaaaaaaaaaatttactttcattttgtgattaaaaaattaaaacacaaaagtgttaccaaacagcacctaagataatataattttttaacaaacttttatttatttaaatacaagctgaaattttgtttagatagatttctttcttatcatttatcaactaaatatatttcttgaatttattttattacttatgttatttatattaattgcaaccgtttaatcgttaatttatatttgaaagttaatatattttagattgaattaggattttgtttatttttttcaattcttttatttttgttgtagagataatcatttattaatataaatagtttttatatttaaaatggttatgttgtttagcaatgcgtactttattaatgtaatacttaatatatatttaatactattaatacatatttaatatctcttccgttaccgtaagtgttggtatagacttaaaatttttatagctttattttcaccaactaaataagaattaagataaaaaaaattgcaaatccagcattatcggtaaatgaaaccaatc

SEQ ID NO: 267292 - DNA, 1957 bp, Cannabis indica
gcataaaacccaacaaattggtgggcctgttgctattgggccgtatgcgaatggatcagagcaggccgaattttctatggctaaaggtaaaagcccattacttagttcggtgggtaaggttgtgaatgggccttctctctcgtgtgggccgatctctaataactttaataactcgtgtgggcctactttggtggaatatctggataagtctaatcctacccgtgagctgttggggccgactttagtgggtaataatatggctaatggggttgggcctatcctatcctctcaaggtaatggtgggcttgtggagtctagttcccctttgccaattgtccctctagaagccgtggaccacttcaaagaagaaaaagccttggctcaattttttaatgctcaagaaagtttattgtatgacctcaaacattttgggaagcttgatttgtatgaaatacagaaaataggcggggacattggggtcctggcttcatctgaagtcaatgagagaacgactccctttaagaaaagaaaatttgaagcgtctgcctcgctttgctctagacctcataaagttcagcgcaagtatccagaagttgttcgtgattttccatgggacacaacgaaaaatgcaaatgatgctgatttggtttatgatgaaccttctgaggatagttctagctccccgagctgcttcaaaatttggaagaacgccctggttggttcctttgtaattgatgactctgtctcgagtgggtctgcttactcccacatccctgtggaggagaatgtcgaatctcctccacaggagccatgagaggtattgcctggaactgtagagggttggggcagacctctacagttcgagaactgaagtccctgatctatacccgctctccggattttgtttttcttaccgagctcaaagtggatgttaatcctctggtacgtacacttaagtctttgcacttttactttaatatttgtgttcctcctattggtaatgcaggtggtattattctggcttggaagtcgggttttagttttgaatgtatctcttgttcgcgaaatcatatctcggggcttgtttattcggacccaccctctttcccttggctcctttcgtgtgtttatggccccccttatttgcatgctaagaaaaagttctggtctgagtttctgaaattaggagatagatttggtgggccctggcttattttgggagataccaattttgtcctttgttattctgaacgtgaaggctcgtctggccgggatccgtttattccaatcatttctaatgtgattgagagtagaggacttatcaatatgcctattcaaggggacaagctaacctgggataatcaccggtctgggaggcaccatgtgaaatctgcgctggataaaggcctagtgaatgggacttggattaatttatttccgaaggctattctctgctctgtccaaactagcaattcggaccatagaccgctgtgcctcctctctgggggtctggaacctaaatttaaaaaatgctttaaattcgaagaaggtttgacccgtgatgttcgtagtaagctggtagtagcccatgcttggaaatctgtctatcatgattgggcccctgctcgtatcttcaagaaggttggggccaccagggtggctctcctcaactggaatcgatctcaattcggaaaattggatgtggtcataaaagatcttgaaaaaaagcttaattctcttcagagtctcccggcggggtctcgggactggatccaggaacgtgatacccgtcgagctttgaatgaaatgctagaaagaaaagcgatctactggaagcaaagagccagagtgtcttggcttaaggatggagataagtgctctaagtttttctcctcacggctgctattaaaggtagaagaaatgctattgagagcatcttgaataaagataatgtctg

SEQ ID NO: 267293 - DNA, 682 bp, Cannabis indica
tattattttttttaattatttttgatataataataaaaatatattaaaataaatatagtatattagttattaacatgatcagaatatcacttaaactaaattttacttgaaaagggtcatgtgaaccccagtaattacatttcatatacataaacgtattttatcataatgtaaaataataataagaaaataatagaaaatgttgcaataatctcctacacctatgtaagcaaatactatatacattctcttttcttttaattttaattggttaaattttcttccctataatatagggtaaaaatagtaggatctaccaaataattaccctatatatataaactttaaaggtttatgtcactgttttatatctcaactttatttatatagagattgttaactttgatgtttctttcttataaatatttctaacaattttaattttccacacacataagtattcaataacatttatatatgatataaaaataacatgaaaatgctagaatataacatgattgattgaataaattttttaaatacgaataaaagttaataataaatatttagtacaaataattttcactcaataacttcttaaatttagaaactatttttttttattgtcgcatgcattagattttcatgtaggataaatagtaaatacattaagtatttaata

SEQ ID NO: 267294 - DNA, 869 bp, Cannabis indica
tttgagcttggcttcttcagtccaggaaaatccagtaatcgttatctaggaatttggtacaaaaacatcccaagatctgtcactacggtttgggttgcaaatagatgcaaccccatcaacacttcatctgggaagctttctgtaaacaaccatggcggtattgagctttcagatggaaaaggaagtgtcttttggtcttttaacttaaccaaagaggccaagaaacccaaattagagctcctagattctgggaatcttgttgtgacagatgaggaagactccaacccagaaaattacttgtggcaaagctttgactatcctacagatactttgttaccgggcatgaaattgggatgggacatgaaaacgggtgaaagtgggaattaagtgcatggaaaaacccagatgatccctgttctggagaattatctttggatattggtagggatgaaaaaaatagtaacaatgatgactacccagaattggtttttcataagaaaaaagctgtcttttttcgatctgggccatggaatggtttatatttcagtggtattccttattttcagtctaattcactttttaatttctctgtcacagacaaagatttggaagtttatttcagttacaacttaaagaatagttcaacaatatcaagcatagttttgaatgcagcaaaaagcaccttggcccatttaacatgggttgaaagtgagcaattatgggactcaaatttctcaattccttctgatgcttgtgacatttacaatgtgtgtggagctaatgctaattgcatcataactaaagttccaatctgtgaatgcctaaagggtttcgaacccaagaatttgaaagaatgggatataatggat

SEQ ID NO: 267295 - DNA, 711 bp, Cannabis indica
aattaaagatattaactccatgtaatctttaagaacacatgaaattttgaatagccaagttgagtagctttgccttagaagaatcaaccatctcaatcccatgacaccctccaacaccaaagtgatgttcaacctttatacccattttctcaagcaatttccccaattcaatctgacggtcataaagtgggtcgccatcccatcccgtcaccatcaccttccattccaatgacttgataatcttcaaggcttttgatccaccatccaccgttggattagaatactcgtgatcacggtcagcccccagcggcaaagccaactcccacaacaaatcagtaacgcaaggcggaagaatagcgtcattgactaacctcaactctgacccacatctctggaccccaccaaagaacggctgatgtaatatcaggccacgaatccttatgggccgtagactttgggcctccgccgcggcccgaagcccagtatggtaagctattgatcctccagcactctcccccatgaaggaaacagttagacaaatccagcatgatttctcaaccaatcatcttcggagattctgatacggtacagcgcgtccatggcatcttcgtacgccgccggtaaacggtgctctggagcaagacggtagttagacggaaacttacgatggcagggtatttctgtcagtctaagttgaaaacgtaattatga

SEQ ID NO: 267296 - DNA, 651 bp, Cannabis indica
aaaaccagcaagaacaagttgaatgaactatgttgttttattgataaaatggagaaattacattgagagagagagagaatggaaactgtacaaggctaattctttacaaagaattgaattctaactatttatacaattcgaattagagacaaaaaacaaaaaactaacttgtaactacctaagacagttaatagaaataactgtcaactaattctaacaaattgtgtcaaattttggcatgagatagctcactgtacaatgaatcttccttgatctgtttcatgataacatataaatcaacaacgagttgaaaaacactagatagcttgataggaaaaattagtaacatcatgttatatgaagtagatcaagaccgtgtttaaaaccgtcgcctataagggttcattaaaaaaatcgtattttattaaaaaacgtcgcttattttgtttactacgattttaaaccgtcgaaaatactaaatttttcccgacagttttaaataattgcttaattttcttagcgacggtcccaaaaaaaaaaaaactcgtttttagagaaccgtcgcgaaattctaatatttatagtagtgtaatcacatcaaacaaaattaacaattaataattgaaagtttaaagattagggataattttt

SEQ ID NO: 267297 - DNA, 940 bp, Cannabis indica
aataaaataaataaaaattagtatgctgtttggtggtttcagctgttggaccactcaaaaatatttaaatatttatatcaaaaaaaccaaacaaaacaaaataaaacagctaataattaattttggaacaaaagactatgttgtcacacgtacacaattttctatacgtgtaacacatccaataaatacacactcgaaaagagaaatgctaaagggcactactggcctagcactctgtcaatatcgttattggtgcaactaagtattgagtcccatataatttaatataatagcttttagggagtatcgctggccaatcgtaacgcgatatgtcgagaaagtgctaggtatcactagtgcctaatagcaatgctcactcgaaaatgatgtgaaaggtttagggtgtgtttggcttgatcataataaataaagagtctcatatgaattacaaacttcacttttacaaatgaatacatctcaaataaatatgattcgtttaatttcttgttataaagatttgtgtacgtttgtgtgtgcatgttattagagaatagttaaaagggttcgtttataaggacgtattaatttgtattgtattgtattatattgaattgtattttttataatatttttatataaaattatatgtgatattaacttttatagacacctaaatatataatattttagtataaattaaatttaacatagtattatataaaaatataatatatatataatccaattcaatataatataatacaatacggcttaatacagcgttccaaacaagccctaagtattattggtgcctagcactcttcttggtattatactgctattagtgtaattaagtatcgaatttcatataactttaaaaaaataacttttaaaaaataattgttagctaatcaatcgtgtaacactacttatagattat

SEQ ID NO: 267298 - DNA, 1094 bp, Cannabis indica
gttggtggggatgaaaagcgtgaacatggaatggtgaagaaatcaggacccttgttgtccgggatagcttactgcatttcttcttgcagcatgatattgctgaataaagttgttctatcgggttataacttcaatgccggtatatcattgatgttttatcaagtatgtcactctatgcttttctatgtccttttcattaaaattgttttaagtaatagcgagttctcgcacaaagtttaggctggtattgaacctttcgatgcatgttatcgtgcagaatctgatcagttctttagttgttattctattggggctatcaggagcggtttcggtggaaaagcttaatcccaagttgattagggtttggattcctgtcaatgtaatctttgttggtatgcttgtatcaggaatgtataggtaagattggaaaattgtgtagacttaattactttcttttgttttgttcatccaatggaagtgatctaattaagaaaaaaaacacaaaattagtaaaaaattcttcaaacataatttgatctaccgtttttcgtggcagtttgaaatacataaatattgcaatggtgacaattctgaagaacatgacgaatattttaacagccattggagaattgtatatatttcggaagcatcagaatcagaaagtctggactgcaatgttttttatggtaattgaaactagagttacatagatattgattttttttcatgacaaattatctaataaactttgttatgagttcacaaattttgttgttcgtgtaactattttttcgatgtattgcagattatttctgctatcactggtggtgtcacggacctttcttttgacggagtaggctatacatggcaaatcgcaaattgtatcctaactgcaagttactcggtatgcatacgctacaaacattttgattgctacactttctctttttgtaatctaaatatttttttcgctattttgaaattgcaaatcagttaactctacgacgggtcatggatgaagcaaagaaagctacaaaatctggctctctaaatgaagtttcaatggtgttgcttaacaatctattatctttacc

SEQ ID NO: 267299 - DNA, 605 bp, Cannabis indica
ttattttttatatttttattaaaaattatttattaatattaaattttgtacgtatataagttttaccattgtagaatattatattaaaaatgaggcaaatttatttttgtgtgaaatataagattatgttttttgtaagggattaagatatgctatttaatatttctctttattttcttatatattttttctattttatttctttcttttttttctttttttatgattatgactatacatacatagttgacaaagtgatggggcattttttctaaatgtcgtggtatgaattcggtggtcaactttttgattaggctgtgtgtggcagatggcattgggtagtttgggtgtacaaagattaattatttgtattggcggccgaaagacatgccgacccacaccaaaaaattccaaaggacaataatagaaagggagtactgggacataatctgttgcaaaaagtttgacactggccatattatgatgagcattgtaacaatgaggcactcttgatgtttaggatgaactgttattttataattagttaacgattttttataataggctaataagtaatttttctcccgaactttgacatgcactaa

SEQ ID NO: 267300 - DNA, 1430 bp, Cannabis indica
tggccatcaaaagagtacttgatgcttaccaccgtgcttcaggacagctgctcaatccggataaatcagtcatgtctttttcaccgaacaccactctcggcatacaagtttttttcgcaggtagcttaatatggccatttgtgagtgccatgagacatatcttggactacctgccttctctgggagaaacaaaaaagaactcttcagtggagttaaggagaaaatcttgcgtcttatgcaaaagtggagagagcaactcttttcggctgggggtaaagagattctcttgaaggccgttgttcaatccatcccaacttatgcaatgagttgctttcgattaccagtgactttctgttgccaacttgagtctatgatgtccaatttttggtggggatccaatgaaaacggttcgaagattcattggcggaattggaattatatgtgcaagactaaagttaatggtggcttgggttttcgatcgttcattcacttcaaccaagctttgctcgcaaaacaagcatggcggatcttacaaaatcccgattctctacttagcaagctttttaaatatcggtatcatcctaataattctttcctggaagcccaccatggccattcaccatctttgacatggcaaggcatattatggcgccgagagcttctgccaaatggactgcgctggaagatcggtgaaggtcgttcagttatgattgggcgtgatccttggataccaggtcacaactcatttctcccaatccgatatgatggacctgccaatggagtagttgccaacctcataacagaaattcaagaatggaatagccaattgttacatgctcattttttagtcgtggatgttgaaagaatcatgaccctgcctcgtagtttttttcctaccccagatcgtctcatttggcatcatcataacagcggccaatacactgtcaaatccggctatcacagagcttcttcaatagaggacgcgtctaatccatcggtttccaccacgaaatcatcttggtggcagtttttttggtctctgaatctgcccccgaaactcaaaatctttgcctggcgtttgatacatgatgcacttccagttgcaaagaatttggtgcggaaaaaagtcattactgatgccacttgttcagtctgtcgtcttgcttgggagtcaattgggcatgccatgtttggttgcaaatatgcaagatctgtttggagagctgctggttttagctttgattggtcgaatgctctctgatgaaaaatggggactacatcatccatctttccaccgtccatagcaaagctgaaatggaattgattttttgtaccctttggtgtatttggacggagcgcaatcaggttgttcacggtggtaaggccaaacctgcaattagccttgctggttttgcatctcgatatcttgg

SEQ ID NO: 267301 - DNA, 1428 bp, Cannabis indica
cgtgaggtaagttttacaaagtaattaacacttcacatgtcttatcaacctgttgttctttgttgtctataaagtttctaagcctttacttaagagtatctttatgcaagcgaatcgggaggtgaaagtacagacaccattatcaaagctaatctttatacaatctatagaaaaagtttgtccaatcaatgatttttcttttcaaaagaatactcatttatcttacttctagcctgattgatcttgcaatgtgtcagtaatttgtgtttgtattcttatgtgtttgtaaacttaactgatggccataaatttcttcattactatacagggaaagtatgtcactagtaggaacttgcgtgaccgactataccgtgagcttgagcgtaatttggctatgaaagttgaagatggagaaacagcagatacattcattgttagtggacgtggtaccctacatattacaatattgattgaaaacatgtaagtatatatacatgttgtgtcttgctcttttcattttattctcatgcaattctctaaaattttcgccattcctctaggcgaagggaaggatatgaattcatggttggacctcccaaagttatcaacaaagttgtaaatgacaaagtgttggagccattcgaggtaatgtcaccatatccctgtttgctttactagtagaagaaactattttatacctgttcttatgctaatggtattggttgcagattgccactgtggaagtgccagaagtacacatgggagcagtggttgagcttcttggaaaaaggcgaggtcagatgttcgatatgcaaggggttgggtaagaaatcgtcttcttcacttctctttataccgagtttgttttagtgttacatatgagctgataatgtgatctttcgtgtgctaggtcggaaggcacaacgctgcttaaatacaaaatcccaacccgtggacttctcggtctacgaaatgcaattctaacagcttctcgcggtactgcaatcctcaacacaattttcgatagctatggagcatgggctggtgacattagtactcgggatttgggctcactggtaatttcttttcaatgctcggtttctttactgttaacaacgcaattctctaattcgtgttaaaaacatttgttttcaggttgctttcgaagagggaacaagcacttcttatgccctttctagttcacaagatagaggacaaatgttcattgctcctggaatggatgtctacaaaggtcagattattggcattcatcaaaggcccggggatttgtccctaaatgtctgcaagaaaaaggctgcgactaacattcgatcaaacaaagaacaaacaggtagctttcatgaatcattcttatcgtttattgatctagttcaagttcaaactttcaattcgatcgcctcttattac

SEQ ID NO: 267302 - DNA, 822 bp, Cannabis indica
aaaaaatcgagaaaaaaatgtatatgtattttacttagttacaacatatatttgtattaaaagatgatatttataaacataatagtaaccttggtgtaatggttaaggtagttggtaaataggttagagggtaaaggttcaaatcccattaactacactttatattttctttttaattctgggtccgccactgtgtatgaagaggtgacccatagcataattgatattagtatttgtcaaggggatcagacaccacaataagttaagcgttttattatgtaatactaaatatcataaatattctattaataaaaatcataaataccttttagtaatttttttattttgaaatctcttataatttaatttaataaaatataaatatataatttattaaaaaaaattatatttaataatatagtatgagtattgttggcttaaattttaatttgtttaaatagttaaaatttaagccaattatacgagcattttcattaaaaattagtactaattaatgctacgagttagagttatgtgaatgattgataatttattgtatactaattattaatttagaatatatgaagtctaataataataataataatattatgacatttcattaccacagagatatttggagaaaagaagagcaaatataaaattatcttagaagggccaatttatgcatttttttttaaaaaaaaaaaaaactgtaaaaaaaaggttttcacaaacttcgggaaggacgaaaaattcttcatgcattaacactagtaacatatatttgatagctccattcaaaaaaaaaaaaaaacaaac

SEQ ID NO: 267303 - DNA, 701 bp, Cannabis indica
aaaaaaaaaaacaacaatagaaagattttgactgtcgatggctgggtggtggctagcaaaagaaaaaattaacttttagtacacgtttaccaatttattaaaagaagcttaagttttgttaatcttcaaatatttgagtctattatcataaatattttcaaaattactttgtgatgtaatttcctcaaagtaaaatgtgtcaacacttaatgtgaaaaagtttaaagcttaaataatattgatgcttttgtctatagtctatggtcataacctcttaaacgcgtgtggcgattcaattttgtcaaaagttagtaaagttggattggcaattaattaattataaagtttactcactttttcttgttttaagtttatcttagaaaaaaaaatgtttttgttcaattttagatggataagttttaacatttgggagactttagttagtgccaattgcctttgtgaattatcatttttttaatattatttcgagatatggaaagatttgagacattgtataattataatgtcaaactcaattatagaatgtcgagcaacttgattcccccttagtaatagtgattttattattattattattattattattattattattattattttaaagaaggaattcattttaaggggttaaaaggagatgacaaaatagcgggaacccatgttttataaagagaagcatt

SEQ ID NO: 267304 - DNA, 1403 bp, Cannabis indica
ctttgtcagatgcatttggagaccattaatcatgcttttttctggtgcaatcgggctagacaagtctggaggaattgggaatcaaaaattaattggcatttgtcaaaatcttgctctttctcagactttctagtatatgtttcttctcaattgcaatcggataaggttgaacttttcatcactattctctggtgcatttggacagcaaggaatgctgagactcactcgaagactccaaaatctgctttgcaaattttgcaatttgctaataattatattgctgagtacaggaaggctcaatcttcccaccatcacactgcccacagattcacctgcagatgctcacaatgccactgctgctactggtgcacactctctgcatctttctgctgcaatttctcctgaaccactgcctcatgcctatgttccacatacacaggtgcccccaactaagcctaaatggttggctcctccctcgggcagactcaagttaaatactgatgctgctgttaatgtcaacactggtgtttttggactagctgctattcttcgtgactctaatggtgatgtccttgctgcaatggttaaaccaatgaaaggttgtgttaagacagaggaaatggaggctttagcagtcgcatggagtctcaaattgttactgacactcagactcagtgttgattttgttgagacagattccttaatggttgtaaatggcttaaaatctcaatctaagggtctctctgctttttatgttatacttaatgatattacatttctgttatccaatttcccacgagcacagatctctcatgtttataggtctgctaataacaaagcccacttgttggctaagtttgctcttacggtggattcagattgtacttggttagaggaagttccaccacctctaaggactgttatgtaatttgtttttcaaattaatataatagtcttttctacaaaaaaaaaaaaaaaaaaactaatatgaacaaaacatgtgatcagatatagaaccattttcagttctaataacaaacataactattacatatgagataatatctgtccattaagttttctagtttccgtaatttgattttaaacaaaaattataaatacattaaagatcagtttagttattcaattgcaatttgtttgtcacttaccagtatttttgatttacaatctcattccaccaacagattattttgattttcaatttctgcgaattgtattgcaaaattgacattaaaaaaatgaaataggataaaaaaaaatactaataataatagaaaaaattacaacataaatattttgttagttttgttatttaaaagaatgtcattaagaactgcaacatgcaacataataacaactatcaatgagagagagagagagag

SEQ ID NO: 267305 - DNA, 803 bp, Cannabis indica
cgttcacaccaggagtggaaaataaattggaggtatatatatttgcaactgtatgtcactaaaaaaacatttatgctcacatatctcatatataaataaattatatatacagtaatatagctagcctaattattaattgatctctttaatcattgtattcatttcacatatggtaaccctagctagaaaacaaaacaaaaactaatacagccaaacaggagccgaaaatacagtgcttatataatcattccaagcaaatttggtcacaatttttttggtcgggtttctactcaaaacatccccatcaaggcatgcacacgtacaataataataattaatcatgaaacaaaatgctagggacatcttatggtgttacacaatttaatattgcagtttaaccatttacaacgtgttacatctgtatagtatcactacaaaattttttacttttagtcacaacaatacttgtgattaaaagtaaaaaaaaattgtgactaataattataaattatgattcatatgttgtgacgaaaaggttcgtggctaaaagtattagtcacaaaaattaaaatttgttgtgagacttaatgtatttttagtcacaatacttgttgtggctgaaactaaattagtgacaacttgtaactaaatactatgttttagtcataagtaacattttattgtgactaaaagtcacatttagtcacaaaaaaattatgctgggactaaaatattgtcactaagagtagcaattttttgtagtgtatagtgtttgatacctttaaatatcaaagaccaattcc

SEQ ID NO: 267306 - DNA, 1022 bp, Cannabis indica
ctaatttagaattcttattgattgattaaagctaattaattgagactataaaacaacattatcccagttagtttgggggccatgaccctatgtaatcaagcttccaataagtagatccaacatttaccaaataaatttcttaacttattaattcctcttgactctactatagatttggaattgaactcttaattacatagaacactctattaccaacaatagatgcaatttgaattacccattgtttcaatccaaatagtcagagatcatctatagatgatctatatcgactagggataaatttaccgttctacccttcaatatattttatccttaaaacacttagcttattgtaaactaatataattactgaaatgaggtctcaatcatttatcgtgttcagctaagctcaaaggaaatttcgttttacttctaaattctagtggggaccatatctatgattagttgtactaccatatttccaagatgtactaccatattcccaagaagtaagcattgggccgatccaattggtcagctttaacaacaagtcaaagaacacaaataatacatttaagccagaacctaaccatcttaggattaagatctattgacctaagatcaactaagtgatactgacttagaaagacataatggtaagtttatgatatcttatccaatgccaatataggtccagtctggtgtatactccatacatccgatactagcatactttgtcgatgtcatgaaaggacataccacttccaagatgtaagtaaacttaatcgctgattattatgtcagtgtaaatctagtgtactaacatatcatgaaacttaaactttgaaaaatataatcatgattattttccactgtgtagacaacactataatcatgaatagctatatgtttaggatttaatagaatttatacattaaccatataatcatgaaagcaatcgtgtgaaccatgcaacataaaataatttctgatcttttcataattagtaaatctgattatat

SEQ ID NO: 267307 - DNA, 519 bp, Cannabis indica
ttaacaaaaaaaaaaaaaaaaaaaaaaataagggttgttatgaggatgtatgaggtggggctggtggtcctttaatgaataaatgttttcacttcaatgcagcacatatgtatgagcctctttttctctcctggtgtgggagtaggtagtatgaccttttcatttcatatgtagaagaacaagagaaaagaaaagagatactctttattttttgacacttgactgtacatcccatgtggtagtaacgttaaagcttaaaattaattgtatataaaatgcataaacaaacttaccctcatttccattctcatgctcatcaaagtccatgctaatttctctctctccgctgcaacatgcaagtcttcttctccttctcatcatcatcatcatcattatcctatctttccctacatatatcatcatttttatatttaaaatgcgttttggtttttgcagataatgttagagttattatttttttttttcttcaaggcaaaaagaagaaaaagtaataataat

SEQ ID NO: 267308 - DNA, 790 bp, Cannabis indica
aaatttgatcaattgattaataaaagtggtatttttcaacttaccccttttggctttggtgagatgaaaacccaataagccacataattaaattgctctctattttaatattctttaatttcaatatttaaattgaaatccctaaaaatacataaaattgagattaacacttataaaatgagaaactaaattaaattgataaaatattacaaaattaatctaaaaatactaaaattaatattattacaaaactaaataaaactaagtaaaaattattttaataagctaaaaatgcttgagaacagaactaaattaatgcacaaaaaaaattaaataaatctgctttcatagagttatcaagccttttctctaggaatagaaatatcttctcaacaagtaggtcaataaacgaacacttaaatggtgaaggaactagattgtaccaagtatgagccttgcatttactagtgcctagtaaatgtattatcatttttgaaagatctggaggggtttgagataatagattgttggactttaaatttatcaacaaagtccggctcatacaatttgaagaacaacttttgcttctctggttcatcatagggccaaagtaaaggaatagccttaggaaaattgtgaggtctttgagattgatggacccacgaataagttatttttaaagtttgagcaatggagggctcaatatttgggatttttccatgggggtaagttgaaaaatgcctcttttattaatcaattaattaaatttacctctaattttatatttatt

SEQ ID NO: 267309 - DNA, 1745 bp, Cannabis indica
acaactataaaataataataaaacaaacgtaaaaaacaaacaagtatctccttcaacagccggttaaagatgaggttgttgacattatccatctttaactgtgtaactagctttggcattttaggccaactaagaagctttggaatgcaatgtttgaatacaacataagtttcccaacaacatatggacaacactcaaaaaaaccaaattcacaacactaacagattatccaatgacctataaaaccaccatcttgttccttcttcttaaccttcttaatacaatcatcaattttacccttcaatgattcaattgtcatatcgaaacactattttccccacccataatcattgtaacgactactattcacaacattaatttcttcaatggaaataacctttctaggagaaccacccaacaagtagcactggacaaaatacaatacaatcaacttgattgctagttcatcattatccttaaaattatcaacttggatagaattctttgtaatttctttattggcctttaaacagtgtttaacaagcatattttcatcctacttgtactggaaaatatcagagtaaatatggcaatctatacccataattaacaaaaatttctcgacactaatccttaacaatttgccttgcacagaaattcaaaattccaactcatttggttgttgaacctccctcaacagcagaccatgtactcaggaatacggagaaaatgagcaaagctagttttggaaaatatttcttgttgggttggggtgagaatagtttcaatatcttttataattgaataatacccacaggttattgctctgaaatgatagtattccaaatgagtgtacttgcaagtccaatcctagaaaaacagaataaaaaaactacttaaacaatacaataacaaaagaaaaacaaatgaagcataaataaccactaatagaaaaataaaaaagcacacacctcaacaatcctttttccagtgacctcatcaaacacatcatcagattcaacattcttaactcgatttatccttcccctatgagtaaacaaaaaaacaataaataatactaagacaattgttaatcaacaaatactacattcaaacaaaacaaacacacaaacacaaaaaaaaaataaaaaaataagacatgacagagaaaattaagaaatcccagacaaagatatctgtaagaaaaagaaattgaaacaaaacccttaaagcaacataaaaacaaccaaaaattacctcatcaactttgggcgtctgtaaaaattcaggctcaactcaaaattagagtctgaatcttccgaaatgggacgaggatgtttggatatcctcttcttcgaagtttcaccaactaattttcattaggtaggaactggagaggtagggctaggggatgttctttgaaattcctctttcccatattgagaatcgaggtaagtttttctgaagtttttttgggggattttttacgtacaactggggaagaagagattgatcgggtaacattcatagataatgaacatgcaaagtatttataggagaacaaataaagggggaaaatatagaggaaaacttgtgatttaaaactaaaaaaataacagaataaatttcaaatatgaccaactaatactgcccctaacacaataaccctatgaattttaaaacaaaaataaatataaaaaaagattctcacgaaaaagatgatgaacaaggagagagaataatgg

SEQ ID NO: 267310 - DNA, 933 bp, Cannabis indica
tttttttactaaaaaaaatcaatattttacaccataccatgacatgaacccatcctaccccagattcagaccccggactcggaccaagtccccagaccaagacccaaagctggaccccaacttagacccagagacccgaaccccaaacccagacctaaacacagacccagaccccagacttcggaccaagacctaaacccgtacccgaacttggacctaggtcttgggccgtgttcggggtctgtgtcctggtcccaatctaggtcttggtccaggtttgtgatctaaggtctgtgttagggtcttggtctggctccgacatctaggtttgggttcagggtctggggtcctaggtttggggtccaaggttctagtctaggtcttgggtcttagttcgggtccaaggtctaaggttcgggaataggtctagggtttgagttcagggttcgggtctagggtctggggtttgagtttgggtcttggtctgggtccagggtttgggttgggttcggggtctcgatcttggtctgggttcgggtccagggtctagggttcgagtctgagtcttggtccaggattcggggtctggggttcgggtctagggtctagggtctgggtccaggtctggggtcttaggttcgagtcttagtctaaggtctaagcccgggtctgggtctagggtccaggtccatgtttggggttcaagtccatgtccagggtttgggtcctgggtcctggttcgggtcaggatctaggtatgggttcgggttcgggtcttggtctaggtttgagttcgggtccagggtcttagtctcagtctagggtttagctctggatctaggttcggggtccggggcctaggtatgggtccggggtctaggtcttggtcttggtccgagtctggggtccagtccgagtccggggtccaagtct

SEQ ID NO: 267311 - DNA, 955 bp, Cannabis indica
aaggatcaaacttgaagaagaaggacattcgggctaagatcttgattatactctgctacagaaaggatacaagggttagagatctgagcggaaggagacattaattccactgcatcaatgtaaggttttcttaactttatatgtgtttaatttatcgttttagaaagttcatatttagggtgtttaaacaacatacttgtgagtagatctaagatcctggtaaaataaattccaacacttcaatcacagatgaaccggccaaagggttcttcataattccttcagaatagctaggtgagctcgacatatcctcagaaggttcatcatacactgtcttgtgcgttctgacaattttatgtggcctggtgcacaacgaagcagagccttcaaattttcttttcttgaaaggcgaagtcctctcattagtttctgaagtagtcatcacaccaatatcaccccccaagctctttatctcatacacatccaatgtcccaaattgtttaagatcatgaagtactttctcttgggcttcaaaagaatcagccaaagccctttcttccccaacactatccacgacctcatgcccaataggagggatcaaacaattctcttcagcaactctaggctcctgatggcccaataaattacaaacgtggtccttctcacttaaagtagtttcattattaaccagatctgggcccccaacaaacttagaaatagaggccccattattattagccccatgtggccccactacaccaatagagttagtgacaggcccaatgaaagccaacggcacaatctcatgttgaccatgatccaccacaatgggatccccattgaccaaattcaaaattaactcgttctttgaggcattgagaccttcactcaccaaaataggaatagattcaaatacatttccaccagccacctgacttcccacggccttattaca

SEQ ID NO: 267312 - DNA, 1516 bp, Cannabis indica
cttttattaaaaaatatattaatcggtttaattcgatttattcgggttaattgagtggttttgaataatttgtaaaccacccaatatatttattggacggtttgaattttcattgtattattttgggttgtatttttgttagtttactcagtttggtttgggcagtttattcgggttgggcggtttgtaaattttgttgaacaccactaattctcattatactacccaaaaaattcagtgtactggttttcattctacattttccaaaagtactagaaaataataataatatatgaacaaaactagtgagatatgtgaagcaaccaaataataataactcattaagaaaataattaaatcaaatactaaacaacatcagatttatgtatatataaaactaaattttttgggcaaataagcattgaaagagatctctccttaatagttgatcttcattcatcgactttcatggagatctcttttccttagtcgttgctgtcatagctgaatattaaagcaaagcttctcaccagtatttatggagattgaaaaaagcttttcgctagtgatagatgaccgacaaaagcttctacatcgctgattatgttgttgattttagatctagaattgtttagggaagtttcaccgattatgaagcagcgtacttattttaaggtgaagaagaagccattttaaatttttttgaaaagatcatatttttttttaaaaaaaattattatttaattttgtttatttttcacctaacaataaaaaaagtaattttcagatctaataaagttataatagaaaaaaatcctaaaataaacaggtatgttgcctacttctaaataaaaggtaagttaaaaatattattctttttttaaggagaaaaattaagaggtgaagtgtataaaaatggaaggataaaggcttaactgccagaactatttgaggatagctaaagtgggcataagttcgagtctcaagtaaaacatagttataatatataaacgcttaaattaaaaaaaaaaaaaaaagtttaactgccagtagataaaattttagacgacaagtcgttttagttacgtaaataagacaactctagtaccggcgagtgatgagccacaaggccagaaaatggtattgttatctccaaaatcttaatccactagtctctatgttgtacgtaaaagattgtatgatcaaaattctctctgttaactatttgtatggcaactcttaacaccatcatcagtcatggtggtcatggagttccttcctttcaccattaaaatccaaaaaaggactccagctttactcgagttctcctaccgaccaaactttataccaagttagacgcagaaaccagaagaggggtcttctctactcgtaaaaggagaaactgggtcctccgtgctatcgttgaggaacaagaactggctccggggaagcctaacgagtcaaaaggaggaagataacgccttattgagtgatgggtctgaaaaaagttgagcca

SEQ ID NO: 267313 - DNA, 660 bp, Cannabis indica
tattaatgaaaatttgatgatgtatctcaattgaagtatagtcagggatcatatttgatcttgaggatcggaactaggagaaaaattgatattctcttatcttttgatttctatctttgttttataaaattattaagtgtttgataatttggctagtaaaatctttggttacactgtagattaattttagaatcttggtattgttactttagatttacaataagtaatttatcacataactatgtatcaaattatatataatttgtgtatggatccacgtattattactctaaaatgtacataatgatttatcttgcatcttaacttaaactattcatataccacaaaattgtatgtattcattttagtgcatatatacaaaataagtatatctctagcattttatctaataattcgaaacatatatattttaaaaagcattggtattaaacatcatatgatgtacaacatcatcccaatgcagcatgcaggttcgggcctgagcacaggcggattaggcctgtgcttagggcccacctagtttaggagccaaaaaaaatttatcttcttttaaaattatatatatttttttcaattttgaaaagtaccacatttttttttctaaatgagggcctaaaaatatttttttcctatgaccca

SEQ ID NO: 267314 - DNA, 1442 bp, Cannabis indica
tcacacgctcctgaaaagcatctacagaaccatagagtcatcacgagctgagctcaacttcattagggcctgaaaacagagaaaaacaacagtagtgatttggccgactagtgccctccttagactgctaaggccgaccagacccctatatgaatgcccaaggacagccagtcacatgcaagaagcaccatggctggccaacctatatagtgccaagaagatgaagaaaactaaaagcataactcacttgtcacatgcaaaaagatgaacaaggcaagccagccacatgcaagaaacaccatggttggccgacaagctaaactataggctaccaggtaggtgaaagccctggtgtagggggaggcagtgatggtccactagtatctgcattgtgcgaggttttgaccaccttggccctcactcgtctagtagtctcatccgaaagcccacctacaagacctctcagcctggaagagatgtctgcaaaaggaaagtagcaaagtcagaacgcattcaaaaatattttgtacaagaataaaagtatggtgttatgaacaatcaaataccatcatcatcagaagaagcgctatcagacctcacaactatagccttgtccttgcccctagatgtaggcacagggcatgtaggtctatcagaaattggccctctaggcttgatacgaagggaggcatcacctacttgacccccatagaccaggcgcctacaaacacctctttctttcctctgcagactctgtaaaatatgagacaatggtatttattaatcatccaagttagggccttgcccatctccatggcaggccacatcaatagctggctctctcgcaaccctaggagcaggagcgtataagccatacatctagaagttgtccacattgttcaaccaaataatgtttctctttttagccgacaatgaaaggatgtgattcactctattccttatttccaaagtaggggtggaatgtttgaagagcggcacaaactgaaattcatggtgcatttgcagttagtgtcgcccatccattggtgacctagctggctgaaataaaaatagtcagttctgctctgcttcagccagactaactcaaaataacacccaatctcataaggggtatgcggcgaataacatagctccctatacaagacaaacatcaccgacagatacttaatgctctttggcatgagctgtgttgggcacattctaaagaaagttgtgacgtccaaaaagtattgatggagtggcaacaccgccccatgttctatgtggtggcccgaccatgccaacatgctcaaaaggggcatgtgcactctatagttcctacaaggaatttagtaatggacaccccctagtaggccactagtaaggatcttatcaaagacctcattatagagagcagaggcaggtgaaacccagcttatctt

SEQ ID NO: 267315 - DNA, 1481 bp, Cannabis indica
aactataacatatacgatacaataaaaaaaaaattactaaattttttttctgtatgttgaaacagataaggggtctaccaaaatattcatttaaagagatgcactatagacttgtccatatatactatttttatttaaaaatcatttgtaaagtttactgtgttttctgttagttgtttgttacatgttaaattttatttggtaatttttaaattttaattaatttgcatttctgttggtgatttattagcaagttttgtagctattatttcattgtctgattcaaaattacaattacatacttatactttaaatttaaagaaaatacagaatgcttttggaagttgaggataatgcctttcaaaggataatctcataatttcatactaaaagaccaaaaaagcaactcatatatgaccaacaattaatttagtgaagctagtacaataaaataaaagtttaatttagtcggtttccaatttttactaaaatacaatacccttgcttttagcctcacaatttcattcataggataaaaaaagtacatcatttctcatcccaaccactaaaatttaattgaggagtcacacaccacaaaattcaagtgaggaacttcgtaattagcctatttttaatagtatatataaatatgtatagattaaattgcatcaattatttttacatgtcaatcaatatttaatctgcacaaatataaattttgaatttttcaattcaatccaatccaatctgtataagtacggatatccaaattttacaaattagattggatttgatcatggagattaaattagattgattattttataaacactcctactcaagtttaacttccagttgtatataaatatttaagtttaatttttaacggtaataatacgtaaattatatttttaaaacttccgtaagtatctaaccgttaaatgtcaagttaataactatgtagtaatctctaattagtcaaagtcattatattttaattattttatttaaaaattaatttaaatatactaataaaaaaaatacgtgaataatgacggtatacttagcgatcaattacttatgaaaattttaaaaatataacttatttactattgccaatatttatttgcaactcaaaattaagcctaagcatttaccccataaaaataatagggtgattctacaatgcacccccttaaaagggatgtactggtgcacccttaacttgtttcggcatccaaaaaaaattttttagtctaatttttttcatattcatgtacgttatagctatttaagataccttataaaattttgaaaaattcggaataatttacaatatagaaaacaatacacacgtataaaataaaatagtcacgcgggcaatacactgtttgaacataattttcaacatgttaaacatttctaaattacttaaaattttgcaggatgtcttaaaaaaactataacatacatgacaatga

SEQ ID NO: 267316 - DNA, 2068 bp, Cannabis indica
tttcatgaatagagtattcaagggtttcttagataattgtgtcatagtgtttatcgacgacatccttgtgtactctcaagcagaagaggagcatgagttttatttttgatttgtattacagcaactcaggggtcgtaagctatatgcaagatttaaaaatgtgaattcttattgttggaagtgtcctttctaaggcacattgtccgaaaagatggaatcatggtcgatccaagaaagatcgagtaagtgagtaatttgccaaggccaagaatagtaactgaagtgcgaagttctttgtagggtaacagggtattatcgatattttgtcaaaaggttctctaagatctcaatgtcattaacaaaattaaataaaaagcaccaatgatttgtatggtttgataagtgtgaggtgagtattcaaaggtttaagcagcggttaatatcaacacaggtgttaccctttccatcagatcaataaaatttcgtcattattgtaatgcatttagacagggtctgggatgcgttctgatgcaagctgataaggttatagcttatgcctctcgtcaactaaacgagtgagagacagtggctggaattggttaaggattatgattgcgagattcagaatcatcccgggaaagccaatgtagtggcagacgctctgaggaaaaaaggtccctggaaattttttagaaatgactaaggctggaattgaatttgtgattgagaaattacacaaatggacatttgaattagatttgttggagaggaacagaaagatgcagttggaagatcctgaactagttaaaattcaggaggagttattggccggtcaacctatgaacttttcaaacttgaataatggagtgctatttataaagctcaagtttgtgttccagataatggtgagcttaaaaaggaaatctttgatgaagctcacgccacacattattcgttgcacctgagaaccaccaagatgtatcaggatttgaaaccctattattggtggtgtgggttaatgaaagatttagtgggttacatgattaaacgtttaacatgttagcaaaatcaaagctaaacaccaaaagctgacagggttactacaaccattaacacatcctgagtggaagtgggatgatattgcaatggacttcgtggtgggtttgccttaaaccacgggaatgtatgactcactatgggctgtaatggaacgtttcacaaagtctatacattttccaccggtaaagactacctatacagtggatcagtatgcagagctatatgtgaaagggatagttggtctccatggaccttttaaatccattattttagacagagatcctataagtcttcggaaagctatgggtacgaagttgaaattttgcatagcttttcacccctagactgctggacaatcaaagagaaccattcagatattaaaagatttactacaagcctgtatcatggactttgtgagttcatggagtaaatacttacctttaatagaatcctcctacaacaatagctaccagagtacgataggaatagccccctatgagatgttgtatggcaggaagttttgtttcccaatcaattgggacgaaaatggagaaaggaagtatttggggtcctaaattagtccaaaggaccaataaacaagatcaaggctcgaacgcttgtttcacagagcagacagaaaggttatgctgctccaaagcgcagaaacattacattttaggcaagaaaacatgttttcatgagagttttgtcaatgaagagaattaaacgctttggaaggaagggcaagttaagccctaaattcattgagctatttgaaatactcgaaaaggtcaggtaggtaggctatcagctacccttaccaccatcgttataagttgttcataatgtatttcaaatttcaatgttgaggacatatgtttagactcaactcatgtgttgaattacgaagccctaaaactagtgttagacttatcttatgaggaatagccagttcaaatcctcgataaggaaaaaacgattcctcaaaacaagaccatagtcttggtca

SEQ ID NO: 267317 - DNA, 1072 bp, Cannabis indica
attttcatgttacttttatgttttttttttgttaattttatgttgttttcgtgttagtttttggaaaaccgtaaaaatgtaaaaaaatattctttgaacttaaaaatgtaaatattttacaaaaaaaaaaatggtaccttatgtaattattcctatataatatatcgatagtatttgttaatgctggtaagaatgatttaaaaagtaagtttgattgaaactatctaatagttaacttagaggaaaatctatgcatgtgtgtgtgtttatttttttcatcgtaaaaagaataagatactatatattctcatctttatttgtttcatctaattttaattacagatggtagacgaggcagagaaggaagcagtagcagctgaaacaaataaagatgagaatagtattactattagtagtcatccagaatcatataacatacccacttcaaggctttgaaccgagtttgagtatacatgtatactaattgtatatgcatataaattatgtataatgaatatgattgatgatttatatatataaatatatatagctctaatttcggaataaaaattatcacaaattaatagtagtgtatgtagttaaaacaaaggaaggaaattaaggccttgcatatcatttctgtatatatctataacgaaattaatgataattaaatacaagatattatattaaccaccttcggctgaacatagagatagaaaagattactgatttaatagtgataattaatttgtatcacactaaattgtagatagatgtaggttatctttacacccgcgctctcaagatggaataatgtagatatataagggagtgctgagaatgtcagcgatgtatacaatttttttttttttgaaataaagcgttagatagatattaaaattagactttacggtcattacaaatgatagtatcatgaattgaggagggttccataaaacctgagatgttttgggcgaacgcccaattagccacattatgggcagcaaaattacaacaacgcgaaataaacgaaaaattacaagatacaacgtttttagagagttgatta

SEQ ID NO: 267318 - DNA, 736 bp, Cannabis indica
aagcgggaaaaatagacagatcatgtattctcaataataaatgaaaaaatatacaaagaaaatgttacatacaacgtagatgatgcaaagaactggcagctacccaatttgaaaaatcaaaacccgctctcatttctaaaacactaaaaatcaaaacccgctctcatttcaaaaacacaatactcagagacatctttggccaaactatatgaacttactaaaaaaatccttcttttcatatcattcttgtacaaaactaagcaagtaaacccttgaagaatataatataaaaaaatatattaccaaacaaattggtcagcaattcaaaaccatttgaatagcattcttctgagtctgagtcaagctctgcaatttcattgaggaaaacatcaataaataaaaacctcataaattgaaactatacaagcaaatgcaatcaggctcattaaacactattcaaaaaagcacctggcatagatgttcaaacagctgtttattgcattgtgcaaattttacgaagaattcggcaagatagcttgcaagattgatctgaaatgcacagacaagttaatatagttgtagcattatacatatctagcaagttcattaatttagaacatataagctacctgattaagaggatcagacacacttattaggtcatcttcgtaaccatcttcttgatcctacaaaataatgtcaagcacgtttgattgagagatttcaggaaattaag

SEQ ID NO: 267319 - DNA, 2012 bp, Cannabis indica
aaataaaaatgtattattgtatttcttacaaatgtataaaacaaattaatttaatttattctaaatttacgagcaagaaaaactaataattattttaataataaacaataaattatatatattataataaatataagctattaataataggttggataacatttttaattaatgtgtccataaaaaaagaatatattatgccattatattagtgtataaaaataattatacaataatattgagatgacacgaaaatattgttaaaagtagtggactttcatcgacacccattcaataacattacagaaaatgtcattgaatgattgttatggcacaaattaaaggtcattgaaacacatttttgttgtagtgtattatttttaacttttgtaatttggtttattaaaaaaatatttttaatttttatatggtattcctcattatttataattaatttattccatatttttatttttatttttaaaaaataccacatttttttatatgagaatacaaacaaccaaaagattacaaaggaattggttggtccaagcttagggcttgactagcacaaaaagggttaactcttatccacatagcactaactttattaacaagagcgaaattggctaaacaatgagcagcttaattagtctgtcagtaagtgaaaaccaatccaccaacagtaggatgttgtagaagttctctaatctcctcctgcaggccatcaaactctcgacatccaccatcttgttgttgcacaagctgcactacctccttgcagactgattccactaaaaaagatatccatccacgctcgataccaacatgtagccctgctctaatggccatcaattcagctacaacaggagcatgaacaacaagtagaaacttcaccacatcaaaccttgctcttccattttcaccctaaatgactaaactaatacttgcactctgcagttgataattaaaaccagcatccacattaatcttcaaagtattaggctcaggaggacaccattttacatgcgctcgatccctatccacaccagactcttgtcgtgcctccttaaaatctattataaatttactacaccaatccaacatatccccagctgcaacacttccatgtttgacattgtttctaatatgccatagattccaaaaaaggattagaaacaactcaaacttctccatagtccagtcttcagaaagtctaaccagataagaaaggatatcttccctagaagttcttgtcatttcattccacaaaaccactattcttccaaactggcagcacttctctacattcccatagagcatgatatatatcttcatgtcatttcgaagaacatcttatacagaccgggtccacatttattccccttttagccaagacagaatttgtaagcaaccacatccacattcacatccaaaggaagtgcttgactttgggggtactctaagtttccaaacctttcgccaccaatggttcatagttcgagtagaggaaggtgcaatcttttctttcatattgaaggtcacccgataaccactcttaacataatattcaccattcttgttataatgccatcgtattctatctcgtatagtccagtcaccaccaagaatctgtaaaatcagctcgacatcgtcattattaaacactgcacgaataaactcttcatcccaagtaccatttgcatttttttttaaatcaataacatacatgtgctccagtaacttgggtttgtcaaatatacggaaacttacaggtcgaggtaaccatggatcctcaacaacccaaactgaattcccatccccaatcctccgtctatagccccgtaaaattaattttctttccccaaactaaactccgccacacaaaggaagcatgagatccacatttcgcttctagcaccctttatggaaataactactttaacaccttgctacataatgcttctgggacctagataccgccaaatttgcatagctaagagagcttgatt

SEQ ID NO: 267320 - DNA, 1528 bp, Cannabis indica
tttgtaactctataaatatgtgttttgtgtgagaaaaaaagaaatagtgagttgtgaaaaagagaatgtgtgagtttgttatgtggtgagagtgagtgagaagcaaagggtgtattgggatttgggtagagagattgagatagagagtatatgtaattttgaagtgataagtgaaatatatctctctttgtgggtttggtagttttaccaaactgagtaaattgctttgtttcgtttctttgttatttcgctgcgcttgaagtttatcatttttcccaacacgaggtgattcatcattgctatgtaatacgaggtgatacattactgatatgtaatacgaggagatgcattgttgctgtgtaatatgaggcaatgcattactgattgtgtaatacgaggagatgtaagatctttgtcttacgagcaactacaagttcattatattaggagcatctacaagattcttgtattacaagcaactacaaagtccttatattacgaccatctataaggtccttattgcgagattttgaatatttattgaaatatcgtcccgacaatgctgaaatatctggtcacctcacaggttgagttctgagttttttttacctatggcacaatgtatttgttgtgagaatttaattattatttatgcacagaccattacttatgccacgtggcatacaattttaacttgggaacttttgctctccccagacgtagtataacaagaattttgttctctctcttatgcaaaagagttattacaaagtatttctccatggaattttatcgctgctgatgactctttcttttttttggtatacactatggtaacttaagtaagttaatatatctattgtgctgaatattttgaatgatttcgtattttttcgagtaagctcaaatatattgtactcgttattcattttctacaaaactattttttttgtaatgtttttccatgataaatacttagtttcattgacaaggcttaattgtaataagatgataacaatataataaattattaggtacaaataaaagaatctaaaaatatgacatttgtcatttaattatagtattacacacccactaccattcattctttagtatagaatacacatactaatttttaaattcaatttaatttacatcttaaataagtcgaaatatgtttgcttattagtgtctttgtttaatcatataactgtttttaattaacgtgctataatcacagtgacagggtcaagctttagaaaaagtgagtctaattgtctcaactagtcagtctaccacaattatctcaatttcagttcaaatgaaattacctgaggacggttgatccaagagagagtaattgtagcttcattgtgaaattgggaatggctcatttttatattgccataagatattgacttagaaatctacctaaattgtctctgcattcatataaggatggtctaacaagataatagaaaatcacattaattaacctcaaaaagtcaaaatatgatcaataatcatt

SEQ ID NO: 267321 - DNA, 783 bp, Cannabis indica
ttgaaataaacaactgaaaaatttccatttaatttttctttctcttcatcttcttcttcttttcttcttatatattattttataacacatacttgtttgtagattttttttctcaatgcaattatttcatactattatctatagaatataaacctagccaagtaatatagctttattttttattcttaagcactagtttccttaatctctaagaatacagggagttaaactagtggactaccattggcgttatttggggctactatcttttttgggaggaaaaaaggggtgtttgaatatatataaatagagtgtgcaacaatggagtcctccatccgagaataaattcaagattaatatgacgtgctactatagttcaagagtgctaactcgtaatcatcttggtcaagttgtttgtgcagcttgaggttccttagatgctcttatgctctgattgctgctgaactttagaggagtgtggtttcaagttggttgctaaagctagcttgagtaacatcattactgatccagattgtttgaatgtagtcacattgctaaataaaaaagatagagaaattcgtgatattgatagctttcttgatgataatctagttagttgttgtagtttgggtattctgtagttttgtttggagctaatagatgataaccttttcttcatagtttagctaagatggctttagatattaaaagcgtctatcttatggaatatgggccttccctttgttactaatcatctcactaaatgttcctatgtaattgttt

SEQ ID NO: 267322 - DNA, 1313 bp, Cannabis indica
agtccaggggcccaaaaaaaaatttttgcccttttaaaattatacaatttttttgctgattttgaaaattaccatttttttttctaaataaaggcccaaaaaataatttttaccctatagcccactacatttcagggccggccctgaggacatgggaataaatcccaatgtagaattatttctctaataaattaggttgggtgtatactttaacaataaaaaagtaaaaattaggcattttgaaaaaaaattattaaactaaaaattaattaatgattaaaaaaactatgtaaactaaatttaaaaaaataaataattttttgaatttattatgtgtgtagcgttgacatgacactgacgtacaaattggctaagctgccatgtcatcattttgtttgtcacgtgtgacaaaacctgagagaaaaactaatttacaacactgtgaatagttcatggactatttttaacgggctgaaaagttcaagacacaataatatataagtcatagttaaagggcaaaaaatcttaaatagtcatgtttattaaattaaaatatatgaaagcttttgatgcgtctctctagggtttctcgagggtttgagtttgttgccttgccatcaccagtagtgttttccttcttctctagccatggctcaccgaatctacttcgggtttggttgtggtcatggttgggggttgttgtaagctagcttatttttgttgaatttgatcgatgaacaatttttatatgtaatggactatgtccattctaaaattttatttttcttaaaaaataataaattaaaatatttgagattcaaaacaaaaataattcaatttcaaaatttatttaaataattatttaatcataatttattttgtatcatcttttattaatattcattttattttctctctccttatttaaataaaacaaaataaaataaaattaccaattatttaatatatatttttttatttattcaaaaaataaaaatatttctatatttctaaaaggctaattagtaattttttccccaaactttgacatgtagcaaatcatgccccctaaacttttttggccgttaaaaattccccctgaactattgagattgttagatttaaggacttctgtctaattttagtaaaaaaattctaacatggatgaaagttgaagggacatgatttagtacatatcaaagtttgaggggcatgatttggtagtatcaaagtctgaggagcatgatttagtacataaacaatcacttaaacagtaaaattgaatgaaattagacaaaagtccttaaatttaa

SEQ ID NO: 267323 - DNA, 508 bp, Cannabis indica
tgagttgccaaagctaaaacaatcgccgaaaggaataaagtaaaagtcttcgtcatatcttaatattatatttatttattgaaggtagaaaatatatagtcaattaatgtaagtttgttctaatgtgtaattccttattgaaatctctgtggctgaacaggtatttatagatggatatgcaagagttacgtaattaagcttttctttgattggtcttttcatttttctctttttggtttactttatttttaatttttatgattttttttcctgaaaaagatggtgggaaggattataatgatttgacatatataaatatatatatttacgttaaatattataaacattgcttatatatatttatatataatagtaaaaagttacgtgcgaggcacgtatactaaattttatgctagtttttttttacgttattaaaaagtgatacaattaaaaattaaaaaaaactattattagttattaggttaatatcattaccctgtgttcattt

SEQ ID NO: 267324 - DNA, 747 bp, Cannabis indica
cttcataaattctactgatttctaacaaatataacacaattatcttaattatatatttactctattatatttaagaaatgtctctaattaagacacaattcactacactactcttatagttcttggacgttgaatagactagaaagagagagagagagagagatcagagtcagaacaaattaatgaaaatggctactgataatcataatgcaaaggctatggaaatggaagaagatggaccaagatcaagagacacacctaaaggaacaccaaaaggtatctattttcttaattaatttccaagaaaaccaaactactaattcttactaatctaaaattacatagatatgttttctgaaattttgtttcttgttatgttacttaggaaattcacctttccaaaataaagataagcagcctatgttttcttaatcattctgattttgtcactagcttcttcatctaatcactcatatggagatagtttcactcttcattgcataactaagggtcaggtaataactaataactaatttttgttcattcatattagtaaaaatgaaaattgggaaatgttatttaattatattgaatttattgtgtgttatttttaggacattgtgagcataatgaacagttttgttctgaattatccaccaaattcattattgactgttctttctgctaatgggacagtatcaatagtagacattattaattgtgatgactataccaaataccacagat

SEQ ID NO: 267325 - DNA, 724 bp, Cannabis indica
aatacatacttttccttgttttgatgtaacattcagtttgatcattgttggagaactcatgaagatgatgaggcctcttcaatttacatttctttcctttagcttcacagtgtatgcaatctggtactacttttgaccattccaactcaaattttcttgttgattggaatatttcttgtgggacttgtaaatttttaaacatcctaatgcaagaaactatatccctccagacatcgtatgggtaatatttattagtatcaatagcataaacaaaatttttggaatcacttaaacaaggaactggtaaatacaaatgactattgttggaagagcaattccatagcatagaactatctttgtatggtgaattgaatggagaatttgaaagattgaggaatttgaaattgtttttgtggatgcaattgggattgtatgcactcaatgcttgtttttcatagtcaatttttgttacaagtaatttcaggtgaagatttgggaggtgaagaatggtttgattggaatgttgagtacatgaaagatcaaagctaggattattgtagccacaatgtgttggttgctttcctttgagtctaaaagggaatctgattagtggctcatgtttcccacatctaacttctatgcattcatcatcttcattttgactggctcctctcactcccacaattattagtatgattataatatacacaaaataatagatatt

SEQ ID NO: 267326 - DNA, 1797 bp, Cannabis indica
ccctttgtctcagggtattgattatcacaagttgtcaccaactcttagagcaactattctggccatctcaagccattttgaacctgaatttttcagtcaagcacatggaattctagagtgggataatgctatggacacagaaattgatgcccttgaaaaaaatcacacctggattgttgtttctttaccttaaaatcagcatgttataggttcaaagtaggcatacaaaataaacttaatgttgatggaagtgtagaaagatttaaagctacgctggttgcaaaggggtacagccagcaagagggaatagattacactaacacttttgcacctaatcaaattagttactgtcaagttagttttggctttggctactatgaagggctgggttttacatcaattggatgtaaataatgctttcttacatggagatctaaatgaagatgtgtatatgtctttacctcaagggtatagtcctaagggggagttaccaccaaatgcagtatgaaaattacaaaagtcattttatggcctaaagcaagcttcaaggcagtggtttgccaagttctttagtgccttaactgatgaaggtttttatcaatctacaattgatcattctttgttcatcaaacacttcaatggagatttcattttttttgttggtgtatgtggatgatgtcattctagcaagaaacaacttgcatgaacttcaagccttgaaaatcaaattaaatgatagattcaaattgaaagatttgggaaagctgaaatattttctaagccttgaagttgcaagatcggaacagggaaattttgtatcatagagaccttatgctctgtagttgcttgaggaccttggatacctaggctgtaagccaatgaatacagccatggaagaaaatcacaagcttggacacaatgaaaaagagaagctgggacatcctacattgtacagaagaattattgtcaagttatagtatccaacaatcactaggccagacatttcttactcagttaataagctgagaaaattttttgcaacacctcgagttactcatttacttgctacacaaatagtgcatagtatgtaaagagtagtcctggtcagggtttgttttttgcctcaaaaacagaggtaaagttgcatgcttatacaaactcaaatagggcatcttgtccagatacaagaagatctaccacagggtttttcatattcattggaacctcaatcatttcatggaaaagcaagaaacaacacattgtttcaagatcttcatcaaaagttgagtatagagctatggaaaacactacatgtgaggttgtttggctactatttgaaagaactaaaggtttagcatgagacctactttgctatgttgtgataataaatctgctcaacatatagctgtaaatctagtgtttcacgaaaggaccaaacatatacagatagattttcacttggtgagattgaaggtctaagaaagaattgtcaaaacagtccatgtatcaattaaagatcaacttgctgatatactaaccatgcctcttttttccaatcagttcaagagtttcaaagacaatatgggattgagacacatttagtccatcttgagggggagtatcaagttgttaagtgttagaggttggttagtgtagtagttaatgttgggattttacgccttaaataaaatctatttcagtataatcttatttactatcaatagatcaataaaagattagaagtcatttatatttacatatacttttcatgattatggtttttgttggaaattattt

SEQ ID NO: 267327 - DNA, 1569 bp, Cannabis indica
tgtacctgaaagaaaccatattgttgacaagcgttttcgagggattttaggacttggggtctcttggaactttccataagttcagagaaatcaatgacaggcaacttaataagattcttagtgtctttgggagaagtagtagtagttggagttggagtacttgtaattggttgattatgatgatttttgtgtgtgaaaatgttgggtcgttcttcaagtggtaaaatgtacttatgaggtactttagttatgccactttcgtagagatgcttcactcctttctggtagtactttagtgatcgttgttctcccacttcatcatcatcatgagtagcagcagtagtcttgggcattgctattgctggagacatagtaataatagtagctaggcgcctgaaattatggaataagtagctagtttaaaaccaacacatgttattatttcacatatatatcaaatatatatttataaataataatatatatatgcatgtataaatacttgcctgaaataaaagacagagagagataataaaatgggtggtggggaataataatcttggactaaaaagagggaaaagaatgagcaagttgagttgataatttgggtagtttattgtgcatatatatatatgtatatatatagtggtgtggaggaattgaaggtaagctagaacagaatgaaacagtagcaagttttgattaaaaccggcttcggttttgaaaaataccgttgacataataaattaaatttaattattcagtcagctcacacagcttggttgggtcatttgatcattttggggttatgccatttctataaaaaatttcaactgttatggctttgtcttcttcttaattttattcataggacccctatatagctaactattactgatggtgatcataagttgaattatttttattatatttatactatacatgtatatacttttcaaaatataattaattatattcataattaatgaattagaaattaataatattcaatatatgggaggatgcaacggctgactttattgtttgggcatgcagctcatatatattgatcagaagggtccccttcctttatttggtctttaactattaaatattcatatataaatttctttgcaatcgagaacgtccactactctatgtttttattaaatcgtagatatgccatatatatataaaagtttttatatgtatctattactttaattaaaagatattacatgtggtaaataaagaactactatataatgatcatgagaccctctcatcatcttattatgtatgatgtacaaatatttttaattaattaattattaattttctgaaaagacagcttattatttattacaatttacacaaagatgtgaaaaaatacaaatatattttatttattttagatcatgaacgtgaacagtttttgtcactaggggtctcaataaattataaaatatattaatgatcttaattcaagagtgagtcatatcacattttgggttgctcataattgttcacaccgtttttgactggttgttacaaacttaataattaaaa

SEQ ID NO: 267328 - DNA, 1436 bp, Cannabis indica
ccgtagaatagtagcaattcgaaaggattcctgataccacatataatctcgtgtgttctttatttaatgttcgctttcagtctttgttagctttttgttcaaacatatcttttttctgtttaaataatttctatgtcttgtttaacatctcaataacaatatagtatttaattaattaattagaataattaatatggtaatcatagaaacagaattttaatttgtattagagcggttcactaaactcttagtgagatcttgcggttatttttcaaataatcaagtttgtgtgaaatgtatttctttgtagtaggtagttcgatataccgtcctatacttttcaatgtgctgaccttgcttttagccaacaatattgagtctttaaagcagtgaaattgaatgatcaaatacttataaaaaataattatagcaataagagcataaggattttatagaggttccacccactaataatagcaatagcctactctccttatagttgtattacttagaaaattagtaagatcacaagatccgtccaggtgagtttcttaatattctcgagaaagcctacaaatattgcagcaacgtaataactcttagaaagttgaaaaaaggatccctcttagtcgaatggctacactatttatagagaaaatacaggaggtaataacttgaaaatataggagagatattcaggaaagttgaatgctaaatcccatgattctctcgataaattaaaccccgtaaaataggggctataattaagctacaattgtggagatatttaaaaaaaaatatctatgtaaatcttttacttgttatgtgctctatccagtggcgcttcactaggcgtatttgatctactaagagtattgtagggtatgtgaactgctcgaatagaacttgttgaagaacttatacttaactgatttggcactgaacgaaaccctaaacttgcatacctcatccaggtacaatcattcttgatgcatgtcaccctgttgagtgccacgttacttagtgcaaaaattaggataacatttaccctcaagtccgcgttggacctgttgctcgtatgtggacttctctagattatagaccacctagatgggtgacacacaactaatcccatgtgtcgtggatgtaacataacctacccgtaacatgcgtatcttcccacattgctttagtatctccatcatttaatgctttatttggaaaatcgtacattggagatcgtatagacaattacggggaaacatgcttctaatagttataattcatgatgagctttaattgtccttttttgcgggggaatgaaattttaaaaccaaattaccctccgggtagcatataaaagaaaaacttaattctctttccacctttttagccatttttcaaaaccaaaactaggcacaagaaccttcttcaaa

SEQ ID NO: 267329 - DNA, 2805 bp, Cannabis indica
ttctccagaatgtggaagacattggggactggaaggtgaaagtgctagaggtaattgatacatcaacctacgtccgaatctcttttgatactaaagaccacgcaatagagattcttgaaaaacagccatggctttttaatgggggactacttttgttggaaaaatggccattgactgatcgatggcaggatgcgaggctagaccgggttagctgttgggtgaaattgaaggggtttgagcttaaatcctttactctgaataacgttagacgaatggcacaacttgcaggtgatgttctggagattaaatggagtaatccacaacaggctttcatgaatggatatgttagagttaagattggctttcctctgcataaaaaggtttttgtgggacgatttgtgccagcagggggaacaaggagttgggtccaatttaaatttgaacgtatgccaatgttatgctttaaatgtggtttgtggggacatgaacaaattgattgcaaggaagagccggcaatggaggacatagggaatggactgaaagtgatgaaatatggttcttggttaaaagatgagcatcctactcctaattgtattgttgctcaccaacaacatattcatcaggagagacatgacactgataacaccagtaggccggacgatggggtgccagagacggtagcagggtccgccgatcaactggagattgggagttctagtggtgggatcatggctcctagagatcaggggcacgaaattttgaaagctagtggggtagttatttccgaatttaggggggaggaattgaaggaagtaaatgttagtcataaacccaatgggcctggaactggtgtaagcccaagtgactttcaacatatggtatgtagggaggaggaggcccacggctttaaaaataatgagcccattactaaaagagggatgccaagtcatggagacttagctaggactgaagtgggagttgaacatcatcaaaatacgattgggaaagggggcaaagatggtatcgttgaaaaggaagatgaagcaggtcagaaaaaacgaaagggagcagctgggttcgtggtgagtactgaggatgtggaaaatgggaagaagagtaaaggtaaggaaattttgggttgccaactgagtcctttgattgaggaagagggttctactgtgagtgttattcctttagctgataagataggaaaaaagggagcttttcatggcaataggcggaagatctctattaaaaatcgggcacgcaattctcatcgacagaatgtgggagtgggtaatatatcaatggagcaagtggtgggccgaggaagttcctcgattgctggctgttcccaggcaggaacttttgtgttcggcgcagctatggagaacatcacagcggcacatgaaacaactatggctacgacagaggtgagtatttctgaaacaactgatttctcatctcatgatactgaaattgaagcggcgagccttgccacgcaaggccgccgagcgcaatgaaactcttgagttggaatgtccaaggaattgggaacccttggacagttcgtgcgttgcaatcccatattcgggatcatgacccgagtattatttttttgatggaaagtaaacttactagagttcaagcagaaagactatgttcagtgctacgggttggagggaaattttggacagtggatcgaattggtcttagtgggggattattgttattgtggaaggatgatattcatattcgggttgattcaagttcatcggggcatatcctggttgaggttgcaggaaaagattttatgccttggacattgacatgcttttatggacacccggatgccgctcaacgaaagttttcttgggaattattacggaatataaaagctggggtgcatggtgcttggctgtgtattggggattttaatgaaattgtgagtcttgctgagaagactgggggaagaagaagatgctcggttgctatggaagactttaaagaagttattgatgattgtggattgatagatttttgttcggtaaaaacagagctcacttggtgtaatgaacatgaatctaaccaagttatggagcgattggacagaggattatgtaatgcggagtggttgagaagttttgaaggagcggatatccaagtattggattggtgggagtcggatcatagacctcttattgttgacttaccggtggatgtggaacgagatcgatgtggtcaaactaaaagaaaaactcggttccactttgaagaggcatggtgtgatgatgatgaatgcaaagatatcgtcctcaatgagtggaaagatggtacttttggtggctattctaggggttttaaaaggaaaacgtttcaaataggaagaactttgaaggagtggaataaaaagaagaagaggctgttgaatgaaaaaattgggaagttgaaaaaaactttaaatgaactgtcctcacggcaagagttgggtacttgggctgatgttaaaagagtggaaagtcaattgaatggggctttggaaaaagatgaacagtattggcgtcaaagaagtcgagctttgtggttgaaatggggggatacaaatacgaaatactttcaccataaggcgtctaaaaggaggaaaaaaaatgagattaaaggcttgtttgatagttcgggggtttggcaaagtgatacaaatatcgttgtgaagctggttgaggattatttttcctctctttttcaggtttctttggctagtgatgaccatattcaggaagtattggctgatgtgcaaccgaaggt

SEQ ID NO: 267330 - DNA, 1574 bp, Cannabis indica
cataagtggtcaatttcagctttttacacataggataaaatctaaatctcttatcagtagctgcaagttggaatcgacgagacaagtactccataatcaacacaaataacaaaggagatattggatctccttgtctcagaccctgctctcctttaaaggatccctgaagtcttccattcataactagagtataagaagtgtttctcacacaaatcataatccaagttatgaatttagcaggaaaacgatagagattcagcagcttctcaagaaaataccaattaaccgtgtcataagccttgcttatatcaatcttgaccgtgcatctaggggaacaattcttcctcttatagttcttcaaaagatcctggagaatgagaatattataagctattgaacgaccttttacaaaagcatcttggttttgattaataaagaaggaagcactttagctaatcgagaacacaaaagcttggcgatacatttgtaaagagtcatacaacacgctataggcctgtagtcaacagcttttgaagggttttcccctttaggaacaagagatagagccgtgttatgaaggtcaacaagaaattgatttgttttaaaaaaaacaaatgattaataactctatgaatttcctttcccacttctagccacatagatttaaagaaccccgatccaaagccattaggccctggagatttagtactaggaataccaaacatcgcagtcttaacctttgcaagagaaaaaggtttaaaaagagatacctgtaggtccaaagtgagaatggaacccatgtctatacaatcctgctgaaccggcctgaaagttggtttctctttgcccatgatgtttctaaaatgattaaggaagtgttgaaccacttctggaaagtgatcattcaatctcccttgctctgtggtaaaagagacaatcctgttatcctctcatcttttcttgagcatcgaatggaaataggcagtgttagaatcaccctgctggatccatttgatcttactcctctgacttaaaaagctcaaatacaacttttcatgatgctgaaactaactagctgctatcttctctctttcaactctagaactgtccatgggggtattggaaatattttaccaggatctagatttactaccttgtatgtttcattaaaattccaatatgaattctaaaacaatgaaataaacacatataaagtttagggaaccttacattgggtgcagcggaatataatgactcattccgttcagatctctagcccttgattcctttctgtaccagaacatagtcaagatatgaacctgaatctctttctctcattcctttgatgttgattctccttcttgttgtttggaatctcgtacagtcttacacactatgattgagataacacttgatgtgtgtgggcactactctatcactcaaggatttctaaattgaagaagaaaagaagagagaaggtggcggccagaagattttctctgaaggaatgagatgcatcatctatttcctgaagccatcactacctatttataggtaaccacctaggtttaggt

SEQ ID NO: 267331 - DNA, 3512 bp, Cannabis indica
aaaaaaagatgataagatgatatatcaattgtaaaaaaattaattttaatctataggtagactctttaagcttgcacatattcaccaccatcagaggaaaatcttatagttgtttgtataccttctcctctagttcacagtttcagaattgatgaatgaattcgaatgagcaacaaaagtcaatgttacttatataaagacaaatgagaatgtaaatctcttggtaattggttctttcttttaaatgaatctcttagcaatgagtcttgttttatatctttatatttctccatgttccaaatgagattttattggcgaaaaagttatgattaatgtcctcccccccattaggaaaatttactaaagatagacttcgttgctctttaaaaaatttatttattcattcatagtatattgtaccacaatttcaattctttgcactccacagtttagtttgtgtctcaaattaatattgtaattgaactcttattgtacataatgtaatcactagaaactatttgatcttattgttctaataagttatcttaaggatggaccaacaaactcttaaaaaagcaaatagtttaacatgtatgttgattagcaattgtaagaaattactaaataacatgacttattaaaattttatcaatgacttgtggattattaatgattagttatggattcttagtaaccatttaaacttaagggttgttataaatcacaatcaatttaatacttgaggtagaagtttaaaaattatgaatgatctttctcaaaaataatgttcctggatcgatcactctcattgatcaagtcaattcttaatttcacaattctagtgttgtaacatggataaaaaaaatatgtaacccttaaaccttgtagaatttctaatgaaatgcttatttattgtgttttggctcagttctatcctttgacaattgtactctaactgtatacatgtatttctaaaatgtgtccatgttataaattcggtttctaaccttattacaactcaaaatatgtttgagaaagaacgttggttaggacacaattcgatacgcacactatcgttgaagagtgtcaaccgacaaagatttaagaaagtttggagttttctatgcaggctccaccccatgtctaacagtgcttagtttcttaagcctatcacacactattatttaggtgtaccaggcatatgtattgggcaacgaacccatgcttttcaagaaactttgcaaatggattgagagttcatctactctcactatcttaacatgcaaattgtattatttctttatttaaaatttaaatgtctttaaaatatataattttttacttttgtagagatataatttactttgttttttatctttgaactttatgttagataaatataaaactatatgcatatgaagaatcctatgtatgtatgcaaaataaatttatgaattgaacatacaaataaatgatcgaatatgtgtatctccaactattgataaatgtaaatctcactaatatgttaatcaaatcttcaaaactgcaaaataagagagagaataaattagtggggtatatgtttctttcaagctctctctagctctctttgatggttatttgatagaaactgaaatgagtagtaagcttgaggaccaatacttatatttatataggtgatatatttcatcaaaatctctcccacaattaattattagagtattatgacaattaaatagaaaagaaaatatttaacaaaattaaatgttgatcaccataaattagaatattttagtcaatgaaatttttaactttgatatattaaatcaattaattaattatcaaatataaatattctaacacttcatacttgcatacttgcataagactatagtacatgaaaatgtcacttttgtcagcatagttttgtgttggtaaaaatttggtattacgctggtaaaatggaatttacttctgatgtgttagcaaaagaaattagcaaattaacgttggtattagaactttttccaacacaaaatgaaaagcgttggcaaaaatgacttttcccagcgcgtaaatgggttggtaaaagttagattttagtcactcaaatgtgcactagtaaaactttaacttttttgccagcacagtttgcgaaatgcgctggtaaaaattacttttactagtgcaatagcgaactgtgctggtaaaagtaacatttcttgtagtgactaggggtgcacaaaatatgagtcaaaccatttaatccggccaacccaacccattttttgtagtaaagggttatgttaagagtaggccatggctcattgggttgaaaagtgataagccctataattatgggttggttatgggttggacacattttaactctatataaatcaaaccaacccatttttttggaagatgttccaaatttgagacaactttcatgcataaaatatatattttttttttatgaatcagcatttcattgctccaacaaacagttaatacaatctaaagactattcaaagtctgtacaggatctatacaatctctcctctctttttttcctttaaacttgtatgcactatctaatttcaaagaaataaaccactcatagtctattttcgctactgttttaggcatcacacaagtgatcctagttttgacttgccactttacttcttggatcaattgttgcacttggttgctacttccctgcaaaattttataatttctagttttccatatgtggtatactaaggctgcaatggcagcagcataaacagctttccaaaacttacttatcttagctctgttaatccagcggagcacattctgcaaggatgtggttgcagccctccaacaaagccatgccttgatttgttcgaggcattcttgtgaaaatctgtagtagaaaaataggtgaggagatgtttcttctgaatcttcacagagaatgcattgagcatctgctgtaatttaaaacttgaccaacctctgtttggtctttaatctgtccaacattgctagccaaaggagaaagctatgtttaggaatgttcatcctcgaccatacttgtttactccaatgacataaatcatctgctgctgttagcactttgtatacttcagaaactttgcaattttgagcagtatactggatgtggttgactttccctttccattcatcttcgagttcaacaattttcctccaatatcagctgctttgaatgggggccttgtactcccaccaagattctttgttaatgtagacattatgcacccacttcacccatagattatctttttttgatgcaattgcccaaatattttttatgacagcagctttgttccattcatgaatactcaagaaaccgattccaccagctttcttaggcttgcataagttccccctgcaacatttccagggcctgccatttcactttgacctttccataagaaactcctacaaacagcttcaatatcagcaatcactcttttgggtag

SEQ ID NO: 267332 - DNA, 680 bp, Cannabis indica
gtgttttaggttcgaattcatgtctttttttttttttcattcttcactcatcactgagctagttactaagtggcttgtacaagttaaattgtaatataaaaaattggatagtaaattataccaatcaacccatgcatgttgagtaatgcctagcttgtaacaatattcaatttacatatataggaaactatagtacttgtgcactttcaattaataagcttttatggaaagtttggaaaattatgaaggcaatttgtgtcttttttttgctctagcttatctgattagaatttatagttgggaacttcaaagtttttattaatttactatcctatcttctagcttgcaagttgcaaatatgtatatattgttattattttatgttgagccaaattttgtaataaaataacaatatgatttggtatatagttttctgaaatacattataatataatagaatagaatagaagagaatggtgggtcaatggtcaaggttttgtctaactcatatattttctgggaagttcaccagtaacgcgtttcaagtattaattataagattgaatattgaccatttaggcattcactacttggcttaggtgagagtaggtaatatatatagggaaatttcaatttttgaccctaataaaataccccatttcaaaatatataccctccac

SEQ ID NO: 267333 - DNA, 565 bp, Cannabis indica
gtttaataaaattagttagccattttttttataaataaatttaaaattaaagtaaattttatagatttaaaaaatataattgaattgtattaggtttaattattaatataattacaactgcatgaaaacaccattgtggattgatgtttgccttgtgttttttctttttattttataggagatagagaagatgatggatccatctctaagagagaaaaagaacaataaaaacgaaaccgccagtgtaatttttagcaaagcacacgcaaatttattgaaagaaggagaatcatggatgaagaaaacggccgaatcttgtacaatagtagcagccctaattgcaacggtagtattcactgtagctttcagtgttcctggtggtaacaacagcgatacaggacttcctattcacataaaacacaatgcatacacatttttttcgctatcaaatggaatagccatgttctcatcttcgacatccatactcatgttcttatccattctcacatctcgttatgctgagagtgactttcttaggtctttacccaagaggttgattattgga

SEQ ID NO: 267334 - DNA, 2192 bp, Cannabis indica
gattaattgattaataaagggtatttttcaacttaccccatctatatatatatatcgatggtgattggcgcacgtgagtcatcattaggagttcttggaaaaaattgggtcagaagagtgcttgtgccaatctccaagaatattgtacattttgatcacaatcctctcttcatgttggtagataagtttaactaccgagttccttgagatgatgtccaaaagatgacttgtttgtctcgatccccatagatggttaatccagattcttcctagttggtcagcgttcccaaacatgtcctccaagctcacctctaagggaaaatatataacaccctactaatttaggcataaggatcatcgtttgaatatccaagggcttgaacttgctccattgataaactattcgcgtcatcttggcctctatcataagagtgaggccctcaacacaacttacatatcactagagccttttgcacttgaataatcatcatcttggttaaggcttctacttggacggttaacttagtaattgcataaatttcatgtaaacccgctactctcttcggttggcttttctcatttggccatttttgattattcatggccatctccttaagtaaatcataagcctcgttagtacttttcctcataaataccccaccagaagcggcatctacgagtgtgtaggtattagcagtcatccctttgtaaaagttgtggacttgcatccacttctcaatctcgtgatgaggacactttctaatcaggtttttgaatctctcccatgcttcattaagagactcattgtcttgctaaatgaagttattatttttgatctcagtttggcaaccttaacaagaggaaagaacttggagatatatttcagggccaattcctcccaagtgttgatagaatttggtggcaaagataccaactaactcatggctcgatcccttaaggagaatgggaacaacctgaatcggattgcatcatcactaaccccattcatattaaatgtttggcataactcctcaaaatttgcaagatgcatgttgggatcttctgatggcagtctcccaaactagattgtggattgaaccatctatagtatgaatggcttgatttcaaagttgttagcttcgatggcaggtggccttatacaagatatctaacccctatcaggttgggtaggacatagtccctcaagctatagttaggtggattaagatcattagcctggtcgtctatgacacctccattattgtcattattggccatctctacttcttgcttagccacttccactgctctttccaatctcttccttcttctgttctgtctacaaatcttctctatttcaggatcaataagaaatctggcaattggtccttgacgtcccataaacaagttgttcttgagaaaagaggaaaaaaattgacacaaacataattattacaaaaattgaaaaaaaaaaccaaattagaacaaaagttaattttattaatattaactaacaatcctcaacaacagcggcaaaaacttgttgtggtattttcaacacgaaagtatacgtatcgttaacaagtaatagactgacaagagtgaggtcgaacccacaaggattgaagttaagtactataaaattaaagtgatacttttatttagaaataaaaaatttttaaagagaaaattagaactaaaagcaataaaagcagaaagcaagtaaattagattgcaaattgacaatgattagagttagggttattgatttcaattatatttatcttatatggcataatataattcaatttctagtaccaatttctatgtaatagcaagtttactcaagtaatttatagttttctcagatatataaatcttaattacatgcaaattttctactctcgtgataaatttaaacatgtaaaaggcattaagcatagaaaccctaaaagctatccaaatcatataggtactctcgtcctatatcaaaatttgttcttatttcattatagcataatcgatactcacttctcagatctcttatcgaaatcataaacatttaattgatggtcagacaattaaaagaattaagaacaaatgatatagagcacatagaaaattggataaagaattaaatcatattaaaactataaatagatgtcaaacaatctccatcaacaccctaataa

SEQ ID NO: 267335 - DNA, 1004 bp, Cannabis indica
cactcgttcaggtgggaaaatctacggcgatcaatcaatacctgggaagaattaaaatctatgctcattaggcgatttcgtccagggatctaagggacgatttatgatcgtttcctcaatcttcaataagtatctacggtccaagaatatcgttgccagtttgaatctctggccgcttcaatagggacgattgatgaggctatattagagttaacttttttaaaagggctccaaatggaaatccaaggcccatcacgtattttgaagcccaatgggctcgtccaaactatggaacttgctgaatccatagaagccaatcaatctttggttagatctcacaaatttgggtctactaaagtaaactcatctgtaactcgacccattagtacatatccaacagaggaatacaagggcacgattagaaacaatggtaagacaaatttttccactcataaatcatactcttctccacctacatctacaatttcttctacaggaaaaatgataggatgccgtaagatgattgagactgaattgaaggagaagagaagtcggagtgtgtgttacaagtgcgatgagaagtggcactaaggccatgagtgtaaagcggcagaactacaaatttttctcatccaagaagacgaacccgatcctcttgaagataatcccatcgaggaagctttgggcattctgtcgtcaaccacaaccaaagcgcaattggtagaggtcttccttgaattcaattgttggattaacttctccaaaaactatgaagttactcagcaaaattcacgagcaggaagtggtggtattgattgatagtggtgtcacccataacttcatcatagcagagttggtttctaagttggctctcccaatttcttccaccgaaacttatggggtacaaatgggcaatgtttaaaaaaacgcaaatgagccttaaaggcgttctttttttggtaagacgaggcgtacaaggcgtaagcctcaaaaattaatggaat

SEQ ID NO: 267336 - DNA, 692 bp, Cannabis indica
tatccagaagattatgtatcctagataaaatattgcatgtatcttgaagattatgcgtctttaataaaatcttgcatatatatattttgacttccacttgcacttgcatcaaccattctgcacatacaagctacgaataaataattaatcaaactattaacaaaagagacatgtatttaaagtaattaacaatgggtttaaacattacaatactttaaagtctacaagtcatcataaccatcatcatcatcattaacaagtacattatttttattatcactatcactagtgtcttcatcatcattataaataatgaaactatctaaatcttcacggttaggttgctcacggtccttgttggtcatttcaattgggtcaacatcatcacgaacatattcgacattgtccatttgtgcaagttgaatgaataacgggattcctgaagagtttctttcttgtatagtcatggtctcatcatcatcctcatttgagaagtcccagacattgcgaggggtgtaaacattgacaagcttccaatcaactccattcttcaggtcaggaatgtaatatattaaatttgcttgggatgtaagtatgaatggttcattttagtaccattcacgggcaacgcagatactagtgaaaaattggattatattttactaggacctagatttactaataagtatgtt

SEQ ID NO: 267337 - DNA, 2382 bp, Cannabis indica
agaagaagaagaagaagaagaagaagaagaagaagaagaagaagaagaagaagaagaagaccttacaaacatcaattgaacgacaatggtggcttgagaagaggcttttgcgtgatgacgagaagctacatatggtgattgtgcgaagacgagtgtgaaagctcgataagcttgatgagagagtaagagatgatttgttgaacctatatctgaatgaggttagatatgaggaagaagaacaaaaggtaaatatgtaattataaaacttttaaaaagtattaaagaaaattttaaaaagtaaaaatgttaaaaattagaaagaataatataaatgttaaaaattggtcaaaatagtcattttgtgtaaaaatctcataaataaaggtcaaaatccccaattactttccctaaaatcattaattaataaatcaattccctctctctctctacttctcaccttctcacccacacagcttctccgctcagccccggacgtatttttcgtcaccggcggtccaatcggaccccaccacaagatttcccggtccctaaaacccgcaaccgcgaacgtctctctccgtcgaatcttagtcggccatttcgtgctgtcgacggcgcagggagaccgcagccccaaggtactatatatatgtgtgatgtaattataatttaattgtgttgtttttctgacctctacatctctacctgaatattctgataaatatcttgtctcagaactgccattgttgggccaattgtatctgcacaaaaaagcttgaattattagtttgtgtccgcatgatgcatctgtctgtcagaaggtagcaaatgtcgagtttattttgtaatttttatagttcataataataatgtatgttctcttttatcttttcatatgtaatatgtaatctagaaaagaaaaatataagcaacaaaagaggccgtgttttattatttgctgaatgttagttcatacaaattaattttggaaacatgagtccttaagctctgattatttgcagggatttgtatttgttaattggttaagagatggtgttgttcccacattaaaatactctcattattcagatcttttgcgggaggcataaaactatcagctactagtaagtggagtccaatactattttttgttagcttgaggatattgctttggtatttgtatacgtagacactctcaccattatatttatttggtctattttcatctgattttgcttaatgtgtagtttcttctgtcttaagtatttttcacatttaacaagacgggttttcaattttaagatgattgagattttatgaagtactgatgatgttagtgttcacaaagtaaattttattctgtttatttgcatagatcatgatcttttagatttgtaattttttatttcattgtgtatgcttaggccagagtttgggatattgtgttgtggagatagaattgaaagtgtttaatttgcaataatcgggctcgaggtatgtatctctcagctctctctgtatttttattttattttattttgtatgtgagtgtaatatatgaaacaaactgtaggcaaccataaaataagtttcaggtccaaagagagtatgtctcaatgtcattcttccttttctgcaaacttattaaaactgttcagttcatatagacatttcagctagcacatagagaatatttaccataaaacatattaaaaatctaagtaaattagttgaaacgtattgggccaaatcacaatggcatagcagtctagatcttgaatatcttcatcgaaaaatgaaggttttgagtgttctgtaaaaaatagtttttatgaaaaaaatttattaggcaaaataacttcctaaaaaaattattagtaaaataacatgcttagtggcacaagctaccataaaataccccatgtgaccataaaacgaccatattttacactgcccaactgttggttgcacaatgtaaagtcaatgcaattattttgctaattttacattttcatgttgttagtttggtaaacttccttgaaagtctcaagaacaagacatcagactaaccctaaatctagttatacctgtccctaaatcacttatcttttaatggcatagtagtctagatctcgaatccctcctttagttaggagatttgatgttgtactttccatcattagctgggtgagtcaattattgaatgcaacatatttatcgaactctttatacatctagcaaatacctacatgatggatacatatatatatatatatagatatatgaaatcgggtgtgatctgtgtcaacaaacccgtctgtgaaggtttggttttaagtaatattattttctattgttgagtcgcttgagcaacttaaaaaa

SEQ ID NO: 267338 - DNA, 1525 bp, Cannabis indica
ggttttcatggcccaaatcagagttgaaaattgaagcaaatttttagaaaataattttagataatactgattcagaatcataagtcccaaatctcaacacaattccttaaattaaatctaaattaggtgaaaagaattttgaccacttaataaatacattatagatggatagattatgacagattgtttttttttcattaaatgtgaatatagcacttttaactgtgattttttttttggttcaaaaaagaataaatggtcatttacattttaagaattactatttctttttgttaaggcttttaagaattactattaattttgataaagctttcaaaaatttccaattggtatcaatatttcctcaaatatttcaaaaaaatctaggagtaaaaaataaattcataaacacagcatttacaactgttgttttattttctattagatctacagatactgctaacaaaataaaatggtgtcttatttttcaggtttttactttcactaagttcgcgcagacaaacttgatattgcactgtaaactctcattttgctacactaaaggcaattgaagacaagctatgcatatttcaccaacatttattcgcaagggctatgagctacttcgaaaatgtttcactttacgcaataggcacttgaggctggcctaaattcacaaaagccatagcgcgggccatgcgagccattgccatgttccatgagacgaggtggttcataaacacatcaacatacttccctcgatcattctattaagagatgcagaaaaagggtcacacagagaaaatcatactgttcagagaaggacttagacatggcggtttcacttaccttgtaatccagatagtatgcatgctgcatgagagaaaagatacaatcaataccatcaaactatagagaataagtaatcttaaacataaaataatctagagagagaaagcgtacctcccacatatccaaactgattatgggctgcataagaagagatgaaaaaatgattcttaagttttaatttttgcaagacaataatgtgtaaggaatcgacatagaaatggtgacttactatatcatccaacacaagtggggtaactgcatttgatgatttggtaatttgaagtcgcttctcattcctcttcactaaagtgatcaaacaaacaaggacatgtaaataataagtaaccaaaagatgagtgtatcaacataacaccagcagaattaggttttggtgacagaacattcccatgatggtaatgataacgatcccttaaaacataactcacttgaaataggaaaaaaaacataaaagaggagaaatgtaaaatgcaagcactcattagtatttctggtttatgattctcagataaaacagattgtgctagagatgagattcattttaacacataaaactaacacaaaattcagttaatgtaatatgttaaccttttgtcacaaaactcaaaaacaaaataaatcacaaaaaagtggtaaaagacttacagacaagcca

SEQ ID NO: 267339 - DNA, 1272 bp, Cannabis indica
gaaccaaataacacattgaacaactaatggaattaaatctttttttattgataattgaatagaaaaaattacattgaaatagagttttatttagggcacaaagcccaacactttggtcaatagatcttaatcctgagatggttaggttttagcttgaatgtatgatttttgttctttgagttattcgttaaagctgaccaattggatcggcctaatacttacatattgggaacatgatagtgcaattgagtgagagcgctaatcatagatatggagtctatagcttctataattattagaagtgaaacgataatttccttcaagcttggcttaacgcagtaaatgattgaggcctcatttcagtaattaaaaaagtgtccctcaaactatcctttacaattgatatcacctttatatagggtttcatcgaggactctcttggagtttaaaatctctttacctaagatgcaccttcccctaactatagccgagttaggcttaaaatataaaatgataagaaaattatatttcaaaataaatatctaagaaaatggtattgaaaatatctttaatgcacatatcctaggttattttcatcacaaggagcacatctcgagatcatgatgctaatgagttgtgagaagcacgtgctgaggtaaggagcatctcagcttagggtcgagatgatgcactaatagtgtgcatcttgggccaagatggtgcttgttggtgagcttcgagatgttgcttggtgaggctcttcccaactagggccgagatgatatgttggagttatcatctcggtttaggtcgaagtagcatgttgggtttgccatcttgatttgggttgagatgatgacttggtgttgtcatcttggctagggtcgagatgatgtcctagtattgtgatctcagcctgggccaagatgaggcctttggaggtggtgatctcggctagggccaagataattccttggtgttgcaaagtaggtgagtctgagatgatggtgtggtggggagctcctttgtcagggccaaaatggtcctgatggtgtgcatctccactagggccgagataatgcactaacaatgtacatctcgactagggccgagatgatgcaccatcgctatgctagggcgatgaactgatgaagcttgaccaaagttctcaaaatggtgttcaggtgatatgacttcctttgtatacagaagaaaaattaacgccatcatcctttgatttcgaggaataacataaataaaaaatgtaaaaaa

SEQ ID NO: 267340 - DNA, 618 bp, Cannabis indica
taaaagtattgacatttaattacgtttttcacatgttattaaataacatattataatattattttgatgtcatatattataaatacttaacattaatttagtgtgttatggtcctttatgttgtattcattaataagattttcaaaatgtaatcatataagttttttgggtaaatcagtcatttatattgctcgctaataacaaattacaacaaattaatctcctttacaaatattcttaaaccgacttctatctatatccgccatctttctaatatcaagactatatattctatttacaaccacctttttaactgttttgacagaatttaacacaatgagcacttcatgataccaaagacacctattccttattttccacactgagtaaacacaagaattaaaaatcaaagtataaatctctttccttaacttgctacctttgcatctccgaatccagttgactaattaatcctctgaacttacattgatatgatcccatacccgcctaatgaagtatttcctgaagacactgcttgctgaagttgcattggaagaaaagatgttcatgtatttcattctctaaaccacaaatcacacatattgactccacttacat

SEQ ID NO: 267341 - DNA, 874 bp, Cannabis indica
aattactcttacaaatattggattttgttaaactctgattgataattttgtatgcttataaatatcaataagttcatttttcaagaaatgatcgtggttggcaaagtagtattttttttttagtattgaaaatgttgataatttacctgaatttgttgagaatttgctaataagtgccaaaattaaattaaattattaattttaagaaaacaaaatggtataatagagcaacttatattcttatatttttaatacaaaaatgacattttttcagtgctagatcataatttacaggtaatatgtgaatacaatatattattcaattatactgttttttttgctgtacttttcttcaatcatctaagaaaattgaaattaaaggagaatgcagaaactattggttatatcattttgagcgattgatgtctcttttaaaactaaatcaaagaatgagaaactagaagcatcacactaaataatgagcaatatgcagattatgaagaaaacaaaatgatatataaaagaaggatgaagtttatttacccttgtccatattgcatttttacattacactcaagacttgttacccattataatatgaaccataactcaaacgctcagtagtattaagccaatatatattatataaagctaccactgttctcaatagcaacttaaaagtaaagttcgaaagtatttatccaacatcataataaactcttcaaaataccaaaatgatacataaataacttgcattgacatgtaggcttgcgcaaagaaattgatcgaagcgacattttagttcctggctctcgttccagagatcagaaccagttgaacagccccagcagtaggttgttcttcgagcaaagct

SEQ ID NO: 267342 - DNA, 1176 bp, Cannabis indica
ttcataatttaaaaaaaaaaaaatcttaaaataataatatacgtattcacaaattttatttaaacaatataaactggacgtaatactgttttctaaaaaactaattaagagattttttttcttctgaattttaagatgtaccaagttatgtctctcgaaccttttaggtcgttaaaagttatctttgaactattgaaattgttagattttaagatttctgctcaattttactagcgtgacgattatctatgtaccaaatcgtacccttaaattttgatatgtactaaatcgtgctccctgaatttttattcacgttgggtgtctattagtaaaattgaaaggaagttcttgaatccaataatttcagtagttcgggaaaaaaatttaacaacctaaaaaatttaaggagaataatttgatatttgtcaaagttcagggacaaaaatcatattttatctttatgaatcttaattttgataaatgtgataaatttaataaactattttgttattgggtataatatttaggtccacatctcattactcactgaaactatctctcaaactattttgtcgtgttaatggatgtgaccttttttttaagtaacttttatctaaggttatgaatttaaattcttctaatagcttgtatttagttgagaaaattacatagaactatttttaaaaaaagaattactaaaattaagatacatattattatttatattatatattgagaataatagtaagaaattgctaattaatagtattcattcatttatttattaaaaaaaaaaacctccaaaaatagagaagagattgcaaagcaaaacattttatataatttcaacatcagagcaactgttattgtgttcttttcattgtgaacatggtgattgtacatggcatgtagatataaaatggaagattctttactgtgtttgtgtataactttttattttcttctcattcttctaatggaaaaaacacaaggttgagaatttctaccataaaaataaaatatatattatttatgcttgataactaaataaaggaaggttctttgaagtttcatacaaataggaataatttgatatatataatgacacgtttactatacagtattcagaatcggaataaattaaaggagaaatgtaacggaataaatgaaaaataa

SEQ ID NO: 267343 - DNA, 1114 bp, Cannabis indica
tatgtggagattccaaacctctgggtgttcctgggcaagcaatggtaatcctagtcacaattttgggatttcaaatatagggttaatcccaaaattcaatttcagataatcatataatttgcattccaattatagataagcatatagagctcaaaatgagctttccaacgatataaagatcgtccaaaatggagtcccaaatcaatagttatggcaaaaaaaaaaacctaaaaattctcgaggaaaatagggccttgccgcgccgagtaaggccacggccgcgccgaggggccctgtaacccaaaaaaaaactgtcattttcccaactttgaattcacacctaaaactcataccaatcatttcaaaaatatgcataacatacattttaaatcaacacaacccaactaactttgatatcaattttgagcatcaaaccaagttcaaaacaacaccaaagatacacaaattggacataccataaaatctcactataaccaacaagttgaactataaacaacaaaacattcacaccaacaatacttgcccaaaaaattagagtcaaaacccaaaaatcaaaccccattttcaaccctaaaaatcacacaaaacactcaagttgcaatccaaatagtctcaatggctcaaacacatcaaaaattactaatatctcactcaaaaataacaacatgcatcatcacttcaagaacatcatgaacaacaaatagaaagcttcaaaaaataagaattcaacttaagtaaaaaaaaataaagagcttaccaccaaatccacaagctccaaacacaaaaaatcttccaaagatacaccaatccaagccttaatttttccaaaattaatcaaaaattgaagaaggtgagaaagggagagagagaggggttcaactagggctgagaataaaccaaaaaatgggtttctaattcccaaaattagtttttttttgttgaaaatgaaataattggtcaaatgaccaaaataccccaaggccaatatatccacatatatgcaaggaaggtcaaaatagtcatactaagcacacacatggaaaacaacaatttcagatttctcatttatcataataataccataaataaatcc

SEQ ID NO: 267344 - DNA, 2283 bp, Cannabis indica
aaattaacgataagatttatttaaacttagacaagcaaaatgtctttccatgtattattcatgtttccgaagaagacacacatggcataaagtagagtagaatcacccaattaattactgtctgagtcttcttgatccccaaaagataaatacaaaccttaaataggcccaggtacagtgaaggcacaatgccttgccgcaagatgcactattccttccatgaccgaaagcctcctaaaccttctgggacgcggaaggtacaaaacactctaagctcataggggaacgcatggtgtcttgttgaagaatcaaagccagatgtttgcaacaaggagaatgttagatgcttatcgtaaagtggaaattggatgtgtcctgtgacgtgtctgccttactgacacaggatcagatcttgtcccctatggtaggtcatggtagtgcgtgcacctcctctacgtacactcgatttgtctgacgatcctctgaggactttgttcgctaggcgtgatttctactttacatgtgccctgcgccaaaagttgtcacggctgtacgaaactgtcatcacacgagggagaacctcctaatgggccctctaataaagtatattgtgtattatgtctcaatagtgagcctgcttttacctaataacctaaacagctaacaggtatgcctgaacatgaactctagcctatatacaccccaaaaccctttcatgtaggggacgagaaaaaaaaaccttgccaaaacttagcataaatactttctaagctttcctcttcctcaaaagaaaccttgagagtttgcctcacaactagagttagggttttcattttatgtccatatttaattatattttcttatttattttttttataattatttgtcaaaaatactcatatttaccaaaaaaattattttttggtggatatgatctgagagaagagatatgtacaaattttttttgcattgttctttgactttgccattagagaattttcgagtcttaacctctatttttcatttcaaaaaatatcaaagttcttagttttgattctttgataagtaactattaataacttttagagaaaaaggaggaaaagaagagagaagtgaatgatatattaatttttttttttggttaaaaatgaatgatagtatttttaacaaataattatatagtgtaaaaaaaataaataaggaaatattatttaataattatttaatggacataaaataaaataatcacacatattaaaaaactaaaaattgcataaaatgtgggaaaattttaattctttacttttttacggcatatttttttaatgcattcttggacgataacaagactatccatctccactgtgacgttggagatatttgaattttttttatccaacttagagcttctttcactcctaacgcctcagcataaccaggatcaacccttccttgccaagaatcggtcctagcatggatgaaacaacctgtagcgtcccgaagcacccaaccaaaaccaaatcggttcttatctgcaaacgtagcagcgtccacattaatcttgagataaccaacatgaggggcactccaatgctcatctccttctccaatttcaatcgatgaggagaagggtgaaaaagttttttcttgagcacaaagccattgttcaagatcatttcttgctaacgccacaatattcttgacagaacaagacttgccattccataccttgttgtttctgtcttgccaaattgcccaacagagcatggctcccaattgtttatcattgttgttccatctttgaaaatggtgttgaaaccagtccccaaaagagttgtcaccaatgctaccattgtaaagagcaacatacttccagccagcagccgcaaaagaatagcctacaatgcaatgggcagttgactccggcatacgatcacacttagggcaagaggaggcaatttgaacatgtctttgaatgagttgcacacgagtaggaaggcaattagataaagatctccataccatttccttcacttttgggggcacctttaagctccaaaattcagtctgaaaagccgagatagacgtggaaacatgaggagtcttaaagtgttgaatcaaattgtatgttgattttacagtataggtacctgaggtctccttattccaataccaagtgtccatcgaattggaagaagaaaaagggatagaaaggatcaagtccttgtctctatcattgaacaagtcagaaaaaatttctacatcccaattttttccatccat

SEQ ID NO: 267345 - DNA, 644 bp, Cannabis indica
tgaaaaatgtaaaagttaaaaatagtttaaaaaaccgtgtaaggataaaaatgtaaaaaaggtgtcaattttgacatgaggtgtaaaaatctctatatttaactcactttaatataatatatgaaaaaagaaattaattgattatttaatattttattaaaaatatagcaaaatattagtttttattcttttattatataaataatagtaatatagtaatgttcagtggtattatagtaaataaaaaaatagtatttattatgggctaaatttaatgtaataatatattttgtattaaatttgagacaaattttagtatttaccaaagttagcacactttttagaacatcattcattagaatattattttttggctattagaattttcgcccactaaattttgacatgtatcaaatcatgtcttctaaacttttctaaccgttaaaaattctatttgaactattgagattgttgaatttaaggatcttgttcaattatattcaattttactagttctatgatacttcatatactaaatcacgctctttaaagtttgatatctccaaatcatgtgtctcgaactttaacatatatcaaattatgtctcttgaattttcattaatgttagatttttttttttacta

SEQ ID NO: 267346 - DNA, 979 bp, Cannabis indica
tcaatctaagcagaattttgaggaaatacacagatcctaaggaaatcatcaatcaaaataatggcatacagtaagagtgagtcagtgtaaatctcagtgtaaaacaaaagaatggcatacagtaagagtgagtcaagtttaatgtataaaacctctccaaagcaaaaattgctttccatctctaaaacctttcgaacaacaagagcaccaatgtcacgtcctctttgttcaacaggctgacctctttctattaatgtaacatctgccccaaattctgcaagaacgagacacgcaaatagacctgatggtccactacccacaactgcaatttttggttttctggacgacgctattaaagatcccttagccacagaattatctttatttccaccatctcctgaaatggtatcttcagagatccttgtacaatctcttataatattgatcaagtccccagttactttttcctcagacaaatgttctataagcccaactttaggctccatctgagaaatgaagtcccaagtacgaggctccagactcaaaagtttctcaacgtccatgtccactacgtatacaaatttcggctcctttagcatctaaaataataacaaagcatattagtaaagttccttaactaacttcaagttctatcatacatatttgttttggctgttttagcagctcatacttttcaaacaaaaaactgatttttaagattccatttctgacatgattaacgcacaaaaataaaaaaatggtagcataattctgcacaattgaacaaaccttccgtgcatcaaaagatttccgaatcactgagaatgcttctgcaggcaacatcgaagccacctaaagtcaccaccaaaacaaattcataaactaggaatcagaatcatgtacattttcccacaatatataagccaatgaggaactattctgaaaagctcaatcagcctaaaagggtcaataaaacttt

SEQ ID NO: 267347 - DNA, 879 bp, Cannabis indica
gcagagccgcaaaacgtcttaaaaaaaagtgacattgtccgtgactcggccagatttttctatcggtaatttgttccaatttcattatttttaatttcggtctaacaaattcaaatactaagactaaggtagccccttctagtctcaaaatataattaaggaattcactacactaggtcgatccaatattttattcttaacactcttttcattgcaaattaataccaatgaattcacaaaatgctagcttgagaagactttttgtagttgaaaataatctatcagatacgtacctctgtgaacactccattataatacagcttactaattatctggataataagctgacatcaataaaaaaaaaaactttcaagagtttgttttgcaaattaactttctgcaatgcaagatattagctctgtcatgggcataaatttaaattactagaggagtagtcgtttagggatatgactcatggtaccaggataaataaaataatgatttcatctccaattaaatcattataaatcttctttataatttaatatttttatatttgatttaagtggtataatgttgtccaaaagtccacaattctatgataaatgaaattaaaatagaaaatcattgagataaataaggtaactaattaaaatcgttttgtgacgtgtgaaagcaaaatttgaaattttcaacaaaaatattaaataaaatacttacatatagtaaagaattttcttaataaataaatatctttatcccgtttcaaaaaagaaaaagaaaatcttttattatatgtgtcaccaaaataacacaaaataattacaaaattgtacatcatcaatgagcttaccgaccaacctaagtcgtcaacgaaaa

SEQ ID NO: 267348 - DNA, 1178 bp, Cannabis indica
gccagcttagagaggctgtttgccaagctggcctaactgaaaaaccatgcactgctgattgcgatgtattcgctcagttgagatgtaaatccctgagatggatggatgaacaagagtacatccttcaatctcaccaggcaaagcgggattgtcgtaatagagaagccaatgacctgataaggtcgttcaataagagaattgatggaagaggccaagatctcatcagagatccactctaacgaagactagttgatagatcagggagggtctatgagcaatctgacaaactaggttctttaagagccaggatagaccttcccttacccaaaggaggacacgtgttcccactaaggtttaatggcaagaactgccagatcccgacaaccagcagtctggggggtcggccagggatctcaagctcaacaatagtccccatcaaccaacctttggttggctagccagctgcaagaatacctctagcctaccaggggagtacgctccctccccaaggggagcgaacaaaggccaatcttcaaccaactaggactgggagcatgtggaaacacccaaagcaaaaatttgagaagtgaaattgatcaattgaggcatttagatccacctaactctagcaattggtgcgatctacctcctatcaacacaataataacatcagccaactggggagtcacgggcggccatgccctacctaatacaaggttggctgaccatggacagctgccaagtgtaggcgtggccagtcagagccaacatccctacatgggagtggccggccaaggcctacaacataacacaggtttggtcgacctccaccacacactctctcaaagtatggccagacagaacctagcacatcagagcctacaacccctccaaggagggccagtcagtcaaattcctacaacaatagatccttctgtgcaagcattattggaccaactaagagacatgatcaagggcttagctagtccaaaacctgcagatcttgagctagaacggttaaggggatcaccattctaggcatacataaatgccttacccttgtccaaactcaagatgttggtatggaagatgtatactgggcttgcagacccactgacgcacatcaaatactttgatatgtagctcgatctccaaaagattattggtgatgtgcgcta

SEQ ID NO: 267349 - DNA, 1528 bp, Cannabis indica
tgtgcttgtgcttatttctttttgcacgcatacatctgaatgtttgaacgttatttttgatgtttatattcgaaaacatatgataaaactttcttgatttgcacatgcatttaagattggttctaacaaaattactcatgtgcacatgctatattttgtatccttttttctaaaatgctttagatgtttttctaattttcaggctcatccttggctaactgactctgagagggaacaaatttgcaggcttatgaattgccaaaagctctcattagaagcgagcacacacgtagcgcagaacgaaaggctaccgctgcgagttatagtccaagttctatttttcgagcaacttaggcttcgaacctcggttgctggatggttctttgtctctgacagccttgacaatgtgcaaaatcaaagtgggaatcttgcacttgcccgaaccggagcatcaaatcgcggtgcaacgggcataggcgcaagcacaagtgcacaaggtcaagttggtgtggttgatgacatgagggacagagtttctgagctagagaaagagtgtttgggcatgaaagaagagcttgaaaagttggttaagaataaagggagctggaatatgatatttagaaagcttggatttagatcaaagtagtattattattattaataatagttctatgatggagttgaaggttaagaataaaatatgcaaaagaaaagagatataaagttgaaaaaagaaatcatatttttttggggtatttgaattagcttttggaaggttaattatatttggtttagtcaataaggtaagcttgttgtattcattgtagtactactaattaggttcctacaaggctttctcttaacatttttttttttttggtgtgggaagtcgaatttaatcaatattatatttgttattttttaatttaaattgatctctgaggaaattccactgaattgtcacaaaaagctacttaggatttttatttagttatacatagagaatttgtacaaatattatcatgtggtggagataatctaattacaacaaattaggcacaaagcttttataattaagcaatggttctccaaaccgaattagcacaattacacaaaagtgaagtattgaagagaaagatgaaacaaacaagcataaactaaggtcccaaaagacactaaaatatggtgataaacaccattattccaacttaaaactaaacaaaactaacatacataaacaaaaaagcaaccccaccaccatcaccaccgttcgaaccccgcaaccccaatgccaagagagcaagggactataccatcatatacaggcaacaaccatgagatatggtctcacctaaggtagaaatttacacaaatacacctgaaaatagatttttccttcgaggaaattacattttataccctttttatattgtcctcttttatttttatcctcttttttaaagtctatcatttttacctcttttttaaaacattgtaccaattttgtccctatcacttcaagatactc

SEQ ID NO: 267350 - DNA, 1493 bp, Cannabis indica
actcaaccaaactttccagacctgctaattagaccccaatgaacatatttcaagtgataaaacaaagcttcatgcacaaaatcaaaaatcaccattaaagctccaagctttgagttcaaaactcaaacttggttaaatctaataaacatgcatcaaaccttgcttgaatctactcaaacaagcatataaaagcttcagaaaatgaactcaagcacaaacaatctctacagcaactaatttcacattttctctttgaaaaaccatagcttttgaactaaaattcacaactttaaacaacaccactaacatgcatcacaagcagctctaatctactcaaataatcatgaataaacttctgcaaacatcatcaaaaattaacagcaacaacacaaccaaatcaagcatgcaaatcctcattttcttccaaaaattccaagaaacttaaaagagagctatagaaatcataccaacaacttgtgatcaccaactcttgctaaaattagcttgaaaatcaagagagaagccaagaatccttgctgctcaaggaggccgaaaatagagagagagtttgagagaaaatgatttttcctttaactttgattttttctcacttttgaaactttgaataaaaaatgaaataaacttaattccttattatttcagccaaaacaaatgccacatagtcacatattcaaatcacactaagtccacaaaaggacaaaataacaatggggcaaaatgaccattttgcccctccacactaaaataacatacaagggtactaaagggtattttgggaaattctaaattcccgaccactcccgacattcccaatgtctaataaaccgtcccacaatactgacatactaagttgtgattttactgagccaaacaccgagttccatgttaccaggcaccggaaatgcaaaattatgaaattcactatatgacataaaatgcacttcagaattcaataataacagcataaacaattatttaaatatctataaataattttccataattaaccgctaatttccaaattaaactaagcggtctttacactcctgatttagtgacttcagttatttggtatggtccttccaaattttgtctgagcacacctgttgcactatctttggtgttaagaaacactcttcgatgtaccatgtcccccaggagcaaagtcctttgcttcacttgtttattgaagtactgagctactttcgctaatgagcttgtagctttaggtgtgttaggtctctttgttcttcaatttcatcaagttactctgctaagagcgaatgattggtctcattgttgtacatcaaccttttgtgggatggaggttttaattccacgggaagcattacttcatagctataggccattgtaaaaggcgtttgtccagtgataatcctttctattatttggtaagacaagagaaactcgaccaactcttaaggccagcttggcttcttcaagatgtttct

SEQ ID NO: 267351 - DNA, 982 bp, Cannabis indica
acatttagtcacaaaaatatatatagtccaaattaaggtggcctttggttgaaagtaatgaaataaaaaaaaaaaattatttcatttctttgtttagttacatttaaaattattgaaatatcattccgatggaatggtctttttattattttggtggaataactattctattttacaataaaaggaaagatcattctaatacaagatttgataaaatttaataatattttttattaatttatttattcatttaaaattttatttcatttcattcatattttaattcttatttttatttttatttttatatttttattcctccaaattaaactaaacgtgacttaaaaattcaatatgaatccaacttttatatgtaaaacaaattaacttatgaatgttccaattccgagcatactaaatgattgaaatgaaaatgatagaatattaagttaaaactttattttatttatccgtacgattttgtttggcagtttgctaatctagcatttttactttggcaatcacacatctttcaatcgatatgtttttttttttggacaaaaaatccaaaaaaattttttgaataaaaaaatccaagacataaaatattaatataggataaataatgacataagtattaaaattttaattaagtttgtaagtgggataaaactaatgtttatttttagcggcacaaatactcaatatttataaaaactgtaatttatttctaattttgtctgtcttatacaggacatacataaggataagattctaaatcattaggtctagacaggatcatgcagaagaaaaatgacagtttttacaaacattattgaatacttatgcagctaaaaataaacattaaattaccctatcaatatattttaattttttgaaaaaaaaatagtactatagtgtaataaataaataaataaaacacacacaaatattaaatatataattaagttagatctaacat

SEQ ID NO: 267352 - DNA, 440 bp, Cannabis indica
accaagtttattattatttgtttgtttttttttttttttttactctcggcagccacaacaaaagtgccctgcttcttttcaattcgacactactccagcaacaataccaaaacttctaacaatgatccgtctaaaagccaccacactgccaatactacactaaatttccaatacaactcaaataatgataaccaggcagttcattgttcaaaaccacaggagaacttcaatatcccaccacaattgattaccaattcaaagtgaaaattctcacaccaacactcagcatctattcatcatggcaccctttttaatgcacaaaaagcacataaaaaattgttttcaacattactccactcagctgaaccctcccaacaactccaaaatatcaatattacccaaattgcaacatccacacctcaaactatatacggcagcca

SEQ ID NO: 267353 - DNA, 785 bp, Cannabis indica
catttagttttgtttttgtttttttttgtttttttgaattttacacttgtatagtgtatgggagggatatatatatatttatatatatagatagagaggaatgtgataattaattccctatcaatatattatttttgtgttttaaagggttacctaattaaatgatgaaaaaatgctggcactataagctaaccccaacttccatccaatgaagttgtttactagaaattttactgttgggatcaatttataaaaattaataatgttgatacttatgaaaaaacacaagttgttaatatcccatatctatacttatcatagtaggagaattgacactatagtagtttgtggatctcgaagaaccaatgcgagttttatgaagaatgtatcattaaaaaaagaatattagctactaatcctagttgattagttggcgcttttttttattctaattctcattatgtttttaagatgtcctaattaagttgtagatttattattaaaattgtatatattttttagaaaaaaaagggtatttatacatttgataccctttgttttatccacatatagattttgtatagtgtactttaataatacttagtactttatattttaaagtcataaatatttagttccttaaactcgaatttaattgataaaattttatcaatacgatcaaattgtcttcaatttatgaattttgaattcaaatctaatatttaattacatattattaaaaatcgattggtcaaattgataaaactatattgattaattatttt

SEQ ID NO: 267354 - DNA, 876 bp, Cannabis indica
gagtgtatttttctcttggaaataatggtgggtaaggcaagaatggaagagatagctagactactaggatattctacagtggactgtttgcctgcgataggattagcaagaggttttttgcttgatgtggaatgcgtaaattaatttaaataccgttgataaaagctatagacttttcgaggcattaatttgggatggtcaagacaactcttgcggtggagtctttttgctacttgtggcaccccctatgaatgtgagaagaggccttttctggagtaatttggccaataaaattagttcatgcgattatccttgggtggctttaggtgacttaaattgtatcacgaattttaaaatgtgggaggaaaaaaagtcatagagaatgatacaaaatgactcttaggttttctcgactatacgggaggaatggatctttgatacaaaggatgcaagttcacttggcacaacaaaagattcaatggtattgattagagaacgcctggacatggccattgactctcatgattgggtctctgtctttcctaatgcgggagttcttaaccttccaataatagtgtcggatcatgcgacaattattttgaattcttgtatgtatgttagaaagggctatattccttttcgcttttttgacgcatggacaaggaaagattattgtaaaatcattattgtgaaggcttggggtgcatcgactctttcttcggatttagatgctagtaaattacttttgcaaaagttggttggacaataccagaagggttcttcacatttggaagaagaacaattttggtgatattgaggggacaattcgaatcttgaaaaattgattagcttagatacagaaacaacaacttttgg

SEQ ID NO: 267355 - DNA, 1139 bp, Cannabis indica
cagtattttgaaaaatttccgtgtcacagtattttgtaaaaattaacacaaattccagtattttgtaaatttcccttattaatatagttcttctttctgcgataggcccaaaaaatcttagcccacacggagtgatgttgggctttcactactttgaaaagcccaaaagtttttagagcatcataacaagtcaaaaagagggagagaagagtcctaaaacaaacctcatttttcttgtggattgaacgataaaaaaaccataatttattagttataaaaaaacacttgagtggcttgactttgtttccctcgacattctaaattttaatttagttatgcctaataagaactcattgtaattcaatgttagactagtttgccaaaaatgaaggtgccattatcatcatagggaaatttacatgatatactaacttttgtcattttcttacaaaaatactaccaggcggtattttttatttttttactgtgttttttaataagtttcatactgcagaatactgtgttaagttttcactggtgttcaactggtgttttactggtatttatactgctttgtgttttactagtattttataaaaacacagtattttttaaaaaaaatccgtatgacagtatttttgtaaaaattaatccaaattccagtatttttataaatttctcttatcataagcaaccctaactgcccaactgcgagctaaagaggttaagacccgttttagaacccactcaaatttagaattcaaagattttagataaaaacaatcttgggcccattaatggtcaaagtcggcccataaggtgatttggataatgtaaagagtatgtgttcatcctatttaatttgcattgttttgtttatatcgtatttgatgctcattaaatacggattttatatttttgatccagtccacttcgcataacttaaattcattctacaaaaatacgaattaaatcaagttattttagattaattattttttaatattgaattatttaatatttattaaaaaaaaatattttttttacataactaacaacaaaataaaataaattatcgttattgtgtgtttacaacaataaactaaaataaataaaataaaaagaagaaatttaaaaaa

SEQ ID NO: 267356 - DNA, 642 bp, Cannabis indica
aatcctcagagcataaaatcacacgacatacaaattataaccctaaatcatattaggcgtataagcatatgaatcctcatagatcaaagcacaaaaagtcaagtgtcaattcagataaatgtacctcgaacagaagagaatggtgagaccaagcgcccgaacgagactaccagaccgaaacgtgagaaacgtctgaaacgggcgtggcagaggaatgcgaggccgagcgtccaagcgagatgcgagagactggtgaaagtctggaagccaggtcctagactgggtcagggagatcaaccagagccctaggcgcggcgatacggcggtcgaaggagataattaccgtggtttgtgacggcacggaagaaggaactcgaatagaagggaatgtgaagagaaaaggatttagagagtgataaaaccctagaaattagaatgggaatttcctttcacagaaatacgaccactaagaaataaggaaatgatttcaaaaaaaataaataaataaatatagggaaatggaaattttccatttaccaaaatcttggaaagtatccattctctattctatataaagtgtgcctatataactgaattatggtttatgaaaaattcttttatttatatttaataaataataaa

SEQ ID NO: 267357 - DNA, 959 bp, Cannabis indica
aaataactgtgtgcttaattctcttaactctttggattagtttggatgcttagaaacatgggtaagaatgcaatttgatgatctgtgaaatatgttataattgttttactatggtttgtggtaagattgactggatagcttagaacttgcatgtcttattcttttgaggcgaaatccttgacaacattcaataggaatatgatttaggcatttgttggatagtttgagcctttcaagcctaccatgaaatgattatccttagttaaccctcttgagcctaaacttgttttgttcttcacctgttgaaccgaaatatgtatccacactgttaattttgtcctcactattttatcaatgatatcataagctatataattagtttgggggagcaaaatacatggtgtgagagaagatgaaaaaaaaaaaaagaaaacttgcaagattgagaaaaaaacagatatttggtaagatcaatatcactgaaaaaaaaataagaaaaaaacaaaataatatttttacgtgattgaaatattaatgagttttagtctaattttattaactattggctatagaatgtattctctcgttatgaaccactaaattttcgaaccgtttacatagacgagatacgtaatacttatagatagacatatatgctgggtcggatagatctaggttgttttaagattttgagtgattaaacttcaaagcctactaatagggaagttacattatttaataatataatttgaattatttgacgtggtaggtgagccccgattctaaggatttgccttctgtatggtgtagtattattgacagtgacaagtttgaggcgcaagctatcattaggaaagaaatgttagagtagtgggtgtctcttttaaaaggtgatctcctctttgtcgtgtgcatttctaaggtctgacagaaggcacagtcacgagatttctcgatat

SEQ ID NO: 267358 - DNA, 630 bp, Cannabis indica
aaaaacgaaaacaattcagcaaccaatttccaccaatccaaaaaaagaaaactttaacaacccagataacccaaaaaaaaacctcaattatgaacaacccgctgtggaaacgctcacattgatctctcaaacatttcaacaaacactttacaaacagtaaaaaagaaacatacccagtacttgaaaacagtggataaggaccaacaactcagttagtcagagtctcagagagattatcaacacagactagttctttgtttctttctttcttgtatgaaaaataacaaagagggagagagataaagagtaagcggtggtatttagattggacggcagagagatgagagagaaacccatttaagaaaaatgaatatgaaaattgtatatacaggtagcagagcagctggttttggtttggtgggtttgagttgatgagaaagatctgcataaaactgcccatggtttttttgagtctttcccaactttgcttagctttgctttgggttcaattaagagaaataattagatccttaattagacccacaggttttcgttaaaactgggagcttcttcttataattctttctactacgaccgctacactacacactcaatttctatgataattat

SEQ ID NO: 267359 - DNA, 1257 bp, Cannabis indica
ttaacttttccattattttagaaatacgccctacttatttacatacattaacaaattaacaaagtaaaaaaaaagtacaaaattaccattttttaaaaagaaatttgaacgaagaaaaaaaaatctttctacaccctctattttataaaaacagtaatattaattgctagcaaaaagatatagtaataataaaaaagaaaatatgataatatataatttgtttgaagaaatgatgtaattttattaatagtaattatctaaaataaaacgaaaaacgaatcaactaatcgactgtttgattttcggatggtttgactaaaaaaattaacataaaatcgtacgaaaaagattgcagcatcacagttaactttaagaataattatattcagtttcctccatcactaagaagacacaataatatctcttgccgcattcattcaactccttatcttgaacatttaactattgtgcataggtacgtaattgtaccactaataactcatttagccgaagagaacttgttattctcaactaatagcaatatgatgactagatatcaaagaataaataagatggaccaacaacaaaataaaattatgtaagagacaaaactaatggtaataacaaaaacctaattgataactaatttctgttaagtatgtataaatcatacaatacaatatacttcaaaaaaaatatattagtaggtattcatgtagaatataataggaatgattctaacaaaaaaggaaaagaaatagggtaaatactattttgaaccttgtgttttgcagaagttatcaattagactctctattttgttaaatgacaaaatagaccttatattttctaaactaggggaaaataggatgctgagctcaattttacaaaatattattttttaatataatcaactataagaaaatttcgaacacgaacaaatatagaaattgtaattaattttttcataagatcacttaatcagattattattaaattttactttgacataaaatcagttcaggccctatttatacaattttagaaaatataagatttattttgttatttaataaaatacaaggttcaattaataacttttataaaatacatgatccacataatacttagcaaaaaatatatgcgaattgaagcacatttaaaagttcctttaaaagaatgctttcatagttccccacaaatctcacattttttctccctatgcccacacatctcgcgggggtctcgccatcaaac

SEQ ID NO: 267360 - DNA, 1177 bp, Cannabis indica
aggagatcacctattggaataaaagactcagaaaattctcgtctcttttctattttctttctctaaattataatattacataatactaatatttcataataataattgatttgctgttatagtcaccatttaattccctaatataattagtttaatgtgtggtttatgttattagttatgatgacattgtagtatgacgtcataaaatgaatgtatagacaatgcgttcgggcttttcccatatgataatcttatgataccttaactctttctaagtctactcttttaatacaaaattttattgaagtttctcacttagattaactcaatgagttgttttaatcttcaatttgtaattgatcgatgacaatcattttagtaataattgatcacaccattttcgtttatcctaaacttataaacaaataccaatttccactgttatttgtgtttttagggagggagacatgtggcagtccaattcaatgttaattaactaaggcatgctcaaaagtcctaacaagataatgggccaagaccactcaaaaagatgggcctcaagaccatccgaaagggcacctcgccaaaataagaagcaacaaggatcctccggatgagcgtctatcataaatttagaagggatttcccagacacatccctcaagctaagctgaagctgaagtggcgatcctctgacaccaaatctcattgtatcagggagttgtcccctgtgtcagaccttgagagtacaagtaccacaaaatggaacatctcttttgtcctacgaccactactctgacattgcagtatgcacaggtggtgcacgcacaacacatgtcaacttcaagtggtcacttgtcatacagaaaataacaacctcacaggttgggccttagttcgtgggcccagtcagtgtggacccaaagtcagtgtattttatgtatttactatattagtaggtcatgttacatgcaaactctagcgagtcacaggtatgtccatacctaaatccaagcttataaatactacattataccctcatgaaagggttggaaattcattatgcactatagcaaagatttaggattcttaaacttgtcaagaatatcagtgtaatactctaagcactacaagaaaaaagacttttttcggagaaaatttgtgatgttgcccaatta

SEQ ID NO: 267361 - DNA, 1377 bp, Cannabis indica
aaatatttaaaattccgtgaaactgtatttttgttgtttttgggaatttgtgaaattatccctttaattaatcacaacataagaataataatttgtaattaatcacaagttttgtaatgactaaaagtaaaaatatttatagtattttttctattacccttctaattctattatagtgaaccaaacacgacctccttataatatcagaaagcataagaagagatgtctttctctttcttctttttctctctctcccgcacctccggttcccgtaccctaaatttcgaacctatagatatggtgatttgtaattaatcactaagttttattgtaaactaaaaaagtaaaaaaaaaattatagtaatttttccattattcttctaattctattacagtgaaccgaacacgatctctttatagtatcagaaagcataaaaagagaaggcatcgtctttctctttctctttctctttctcttttccgcaccccggtccccggaccccgaaccccgaacccatagtagaggagaggagagcgtgcaaataagagcatggtgtttggtgcatgttagggtttttgaatttcaaagtgagttttggtactgacacctaaacatgtgttcccttttgctttgccctttcattcttttcaaataccaaaaaaccaaaacccccttttctttttctttcttttatttattatttattaactctaacaataatccatcattaatttcaacgcatgctttctcattctctatgtatttttttcatcacttctaggaaacccttttcttatctatttaattaattaattaaattattaattctaaaccaatcatatgtgagaatgtcagttttaattagacattaattaatatataaaattatctttagctcttgaaagaattcaatggacatgaaagcttttgtttttatctccaattttttttactatttatttagtgtacttttttactataataagataaggtatagtggaatatagacttatatatgtacatattttatttattaatttcactaatcaacaactagctagagctatatcgtaatttgtaaaggctgatagttctgacgtgtgttaattaagattgtaattaattaaataaaattattaattacctttaacatagagagacttaactttttatgcttgtttgattatatacataccttgttggaaaaaaatttagtttatttttttatagtatatattatactaaaattttgaataatttataatattaaaaaataaaatttaaatagttatttactacacttaaaaaaaaacagttacatatacaatgaaatatgtaaatgtaaattactgaattttttgtgaaaatttacagac

SEQ ID NO: 267362 - DNA, 1539 bp, Cannabis indica
aaaaacttactaaattaattaaaatcttaataaccaaaccacttttagcttatataatgtgataaaataactctaatttttagatttatcatacccaaacatagaattttgctagtccttaagcaaaagaaaaaaaaaacacacatgaaaaaaaagttaaaaaataacaaatgggtaattccttttttttttttgttttttatttggtgatataaaaaatatcatcaaaaattacacattgaaaatagtttataaaaaattatgaatacaaattaagcttatgtaattaatttaatagtcagttttgttttaaaaatatattttaaaaatataatcaatactattcatcaagttattatgtgaattttgaaaatattgttgtattaaagtatttatttccatatcaaggtgaataattttttccaaaattttttattttgaagcaaaattgacccaagaattaaacacaaaacttaagaaggactcatattttataaactaaaatcaaactcaatcaaggttattatcataagaaaaaagaatatcaccaaaaggtttttttaaaaaaaaattacaaaacacaatataaaagcgcacacatatatatactgtatatatttactagaaagacaataatataaatattttttttataactaatatataaaatagatactctaccatccaaaaaatatttttttaacgaaaaataatctaccatttttaagaaaatgaagtaaataaccatagaaactcactatccctaaatttaacttatgcattatcctcaatgtatcaaaatataaatataaatagaaaagtaaaagtacaagtatttactgaaatttttaaaaaactaactataagaaattagagctgaaaaaataaataattgaaagaaagaaattagaacaacacacaaagtttttacgttgttaggggtgttaacgagccttatagtccacgagttaattttattatgtattttgagctagaaaagcctttaagaatacaatgagtataagtttttccgtgtttgcctgaggaagtattgcaaaaaaattcaacccttaatctgaaggattcattaggtatttatagtgtttataggaattatacttagtttcccttttacctctaatggagagtttacatgaaaatgcataaaattggtctgatgctaactaggcagataggaatacaattagattgtcagtaccgtgtcctataattttggatatttcattaggaattaattacttgatctctagtttaggtagttttttttatttttttttattttttatttttttatttttttatcttgatacgatcttatatctgagatttaaggaaagttaatttcttaatttgtgcgcttgaataaaaagagaaattggactagtcttctaggaacacgttgtctatgttcaaacactgtaaatctaaatttagccataattaattcgtgaaaaatttaactatataattaaagattagcggaagcgtactagaatctatataatcgtcttagaatgg

SEQ ID NO: 267363 - DNA, 589 bp, Cannabis indica
catcaaaccactctaaatcagctcaactaacatcaatataacctcaaaattcaaaattaaacaacttaaacaaccacagaaccctaattaacaaatcatgcaacgaacccaacttgaactttaagaaaaataaaaagaaaggagctagggaaaataccttggattgaaacctacaaaatcctactaaacactcttaattaggctgaagaaacccttaaatggatactggtttttatagagagagagagcttgaagagaaaatgacttcttgattaatctaatttctaattaataaaagaataaaacttattaatataattctctaataaatcataacttaaactcagatcaattacctgacaaatatttcaaatggcaaaaagaccacttgcttttgcctaagccaaaggtattcttaccacctaggggtattttagtcatttcaaaaacctcaaatagttctgacattcaatgtatatctaagttgcccagctattactaaaatactaattcataaggagatgtgattttatcggccgaacatcgcgttccgatgttgtcgggcataaaatatgaaaaatataaaatt

SEQ ID NO: 267364 - DNA, 970 bp, Cannabis indica
tgctgctgctgcatatcatatgtaattttattaactggttagtgtggttggtgaaattttgcaatcgagattccaaacttcaaaatttcccttgacgaaatcatagtgtgctcctttgatagatacagcattgtttgtcaaggcatctttcacaaatggatatgtcaataaatttgacaatgaaacattcacagcttcctgcacaacattatttccacacccaaaaaaagttaatcttaattaggagacagaataagaagatcacacacaatcatatcaaaagggttataataaaatgtaataataatttaccttttcacagttgctgcattggtcaccgaagcttaagtcactgaactctgatttgaccttggattttgctggtgcacatatttgtacccaattctcaatgaagtcactgaatcccagtaaaaaaaaagaagaataaagtcaaatatatattcaaaattctaattataaagtcactgtaaaagcatttgtacgacacataccaactacaaaaaatagcagtactttatttcactttgtatatattcggttcaactttaggtgacctggaatgaatctatactatactatctcctattacaagtattaagtaacatttgttttatttacttcctctaacgtggatacataatagtttatgtttaagattctaaatatatactagcagtgcatgcacttttgatagttttaactttcccatcaaaaattcaaagagtgaattattggtcagttttaggtacctagctgtggtcccatcgtctgggatagacatgagcccctttattccaccacagcaactgtgtccaatcaccacaatattctccacctgaaaattcaataataaactccagtttcaaaacagaaggaaccttctacacttcttttatatatcttttagttttcctcttctatatataatacattctttaattgaaatgtt

SEQ ID NO: 267365 - DNA, 1570 bp, Cannabis indica
tttggagctccctaaacatgccgaagcacagattcatcttttggcaagcaatcaattctcagcttttaacttcgagaaaagtttgctcaatttctaattactcttgacagcatcaactgtctggtgtgtgatgcagcaactgagagcacctctctcatatttttttttacttattgattctctcaacaggtaatggatcatgtgagtaagtggttggaaatcaagaggtggccgactggtttccatagttggcagcagtggctgctgcagaacagtagggacaagaagcatcatatccatgtttcgatattggcagccatgatttacagcctttggagcaataggaacagttgcctcttcaacagttactcgagtacagaaacaaagattacacagaaaattaaaaaatagtgtattatagattacaaatagttaaaaaaaaagtttaaaaattcatgagaagagatatatagagagaatttttatgtaaaagctggtttgctaccaagttttttggtttgattagctgtataattatttgtgattaatgaaatttgttccatcttgaacaaaagaacaaaaataattaattatacatatgctttgattaagaaattacttcattatgtgactaacgtaatagtatatatggccttatgaggatggatataaacgagtttatttgatgaaagctctgcaccaaaggagcaggggtcagttttttttataggaatgaataaagatgaaatcttgagttcttagttaaggtgattagttaatgtaattattcggtcccatttacagagagaagatataaatgaattgaagatttgataagattgtgtggtccattttgtttatttaaagctagagatcttaatctatagacaacgaaataacatttggggacctcaaaataatttccggatttcctgatctcaacattgccacggtaccattagtaataaagaaatttggaactatatatatgtaataatttatgtatcacattgtttatacgtactcttcatattcatgaagattaatcatctaattaatgtgtcggtaacatcactagctaacaatttataaaactatatgacaaatatatacacatctttatatagtactagatgaaaattagcatcgtgcttaatttatttagttctgtatacatggaaaatttattgctgttcgatataaatgagaatgactagtgtagcacttgtttcaaacaattttttttcctttgtaaggggtttcaaacattattgatttgtactcaatttctcaacgggaagattattaataaaagtgtgaaaatattgttgttggtcgattaatactgttgaccgcgccaacttgtcatgtatatatatattattattattattaggaaatttctctgccataattatcttaaatttcaattatttgtgtgtggagagatgtacatgttcttaacttattgaaatttgaaactaatgtacatgcactgttcaatgaataattctaatagcatcatgtatatatgtatttgttgtgtgtatacatattatccttaatatta

SEQ ID NO: 267366 - DNA, 871 bp, Cannabis indica
tgataatgctctgctacagaaaagaatcaagagctagagatcttgaacggaggagtcattatattctgctgcaatcaatgtaagattttcttaaacccttatgtgtttatattcattgttttagagaattcatatttaggatgttaatcaacatacttgttagtaaatctagatcctggtaaaatattcccaacaaaaacccatacgaagcatcatagccttgagaaagccccattcaatacgatcataggccttactgaggtcaagtttgagttccataaaaccagtcatacctttactcttacgctttagataatgcatcacctcaaacgcaatcataatattatcagagataagacgcctaggaataaacgcagattgattctcagaaatgacactaggtaacaccactttcaatcggttggcaagcacttttgaaataactttatacaataaattacacagtgaaattggtcgtaaatcacccatggtagtaacatgtttctttttaggaataaggacaatgttggtttgattcctacctacgggtaaggaacaagaattgaagaaattagtgacttggcatataacatcattgccaacaacatcccaatatttttggtagaagccaaagtcattccgccggtctcggggacttgtcgggatgcatttgaaacatagcttttttacctcctcgggcgagacatgctgcaataaactagcattttaagagctggtaacagttggtgaaatgccatctaccacacaatgataattggcacttgaagaagtaaataaatcatcgaagtagtagacaattacattagccaaacccccttcccaatcaacccaaacaccagaattgttcttc

SEQ ID NO: 267367 - DNA, 995 bp, Cannabis indica
ggtccatgacctcagggctgacctaaacagaagaagaggtaaggacgaacaatacgtttaaccagctactcaaccaggtatgacacaggtcggtcaagaggctgaactggttcatccttttgtgcaagcacagttggattaattgaaaaatatggtacaaggcctgaccagcccaaaactcactgatctcgagctagaccgagcacgtgaatcacccttcaccccagagatcgatgtccttgaattacccttaaaattcaagatgctgacctgaaagatgtatacagggaaagaagatcccttatcacatcttaaatattttgagatgcaaatggacttacaaggagtgtgaggtgatgtgcggtgtaggatattcccagctacacttgtagaagccgccctacagtggtacttcaagttatcatcagggaggcttaattcatggaaagccttctcctcaaaattccacgcacagttctcctcctctagttaactcccctcacatctagaagacctggttgaggtaaaacaaataccaagagaacccttcagagcctacataagtaggttcatgacagaggctacaaaggttgcaaggttaaccgaggagggaaggctggccgccatattggggggcattgagccactcgaagaactatggaaaaacattaaaagatgtggccccgtagggtctatggcagaatttctagactgagcagatgggtttattaagctcaaggaggctattcggtgagtggacatcgtcaaacctaagcaaggctagccacatatctcctcgattggagcacttactcaaagtccacaatatcccagcagctcaactctgagcaggaaaaggtccaacaatattggtagataaggcaatagaaaaaaggggaagttcacaggcaataccgaacacacccctagagaaaaatgcctccaagttcattgccttctctgtcctaactaacgaccgagagaatctacgcaac

SEQ ID NO: 267368 - DNA, 539 bp, Cannabis indica
ttcttcttcttctttttctgccgaccccttctttttctgccgaccctcagctcctacaatgaattgaagattggggataacgtgtgggaggtcagtcaccattacgttagcacagagtgtcgcagcggcggagattcccaataaatcggttccggaaccgagctcgaggattttgagaggggggagatatgggccatcggatgagcgcgatcgtagggctggggagagtgggcttttgttagggttacaacggtggtcgtcgaggagcgtgacaagcgttgtgggttctggccaaagctggaaggacaagccctgagatgggagttgtctggtgagcaaggttgtgttaatggaggtgatgtagtggtggtttaacttaggctgtcctggagtagagtgacccacctttgtcttggtatcgccatttttgtctcctaaatctaataaaagcattgtgaataattggtttatgtcttctggactattatcattgatttttagccgccatattgcttctacaatgcataagagcaatacac

SEQ ID NO: 267369 - DNA, 1137 bp, Cannabis indica
aattttcagtcgagcttcgagttctggctcctccacctcgagccatgatgaagaagaagaagaagaaacagaaggaaacgaaaacggatcttacacagagtctggctctgataccattttaccaaacaatcaagaaagagaggaaaacagaactctgtgtttattgatcaatgaatgaacagagtacaaagaaatgaacttatatacagtgatgaattgagagaacttaaccaactgtaactaactgaattctaacaaactttaactaactccaccagctgtcataacaaccttcctaaccaaccgtggacacaactaactcatcttgatagtttactaagtatttcatgtaaagtgattgtatgatttgatttttttatctatcattagattttttttttatcagttattgtatacaggttcggttcaattgattttcatgctgttcatggaaaatgaatgagaataaaaaaaaaatttagagaaataatcctctgcattcttccttacacaataaaatgactctccactaattttgaccaatcagaacacacacaaaaaagccacactggtgagtagagatagaaaatgggcggttaatgcatggagaatgcaatccccgtccccatccccgccccatccccgtctaataacttacggattcggggtaaaggaatacccatcggctatggggaacccatcgggtatccattaaggcaaaatgaaaaaaaattaaaataattgaaaaaaaaaaattaaaccaatattctcacaaatatttattatgcattcataatcaatagaagataaaagacaaatctacctaaaaaagtataacctagtagaaaatataaactaaatatgtctcaaagtttaaaaaaaaaacaaaaaaaaatcataattcaagtatagtatcatagtttcatacctctcaagcctcccaacaaattaaaaagtaaacaaagatgaaactaagaatcgagcagaaaatatctttacatatgtaatccataatgatcatcagtttactatcgtcattagatcttcataatttaagcatatgatatataattttaattatggatgataatcaaaataattttgattatcaaagatatatatatgttggaaattatt

SEQ ID NO: 267370 - DNA, 873 bp, Cannabis indica
atgaattctcataagaagttgattggtgaattaagaagaagggcttacggcacaaatcttgactcaaaaaagtccatttatattttattatttttaactttcttttaagacattcttctctccatattaaatgattaaaccttttgtcaaaaattaaaataaataaaactagcacgtgcaaggtgcgacacacgtgcctgccctcccctcctaactgtataactgtaactgtcatcttcttgttctttgttcttgttcttgttgagcttcaaactcaaaaccattctctgctctgctctgaatctatgatcataatcgtttctttccaaggaaacaccaacaatccaagtaagcaacgatgaaccaatccattctttcttttcttttatgccttacaaattgttttcttcaatccatttcattttttttttcaaattttaacatcattatcatttattacattaatggattattggggtttgtttttctttgctgttacagtcctcattcagaacttccatggctgaaaatgacagcagtctccgtctggcggagaagatacagaaaataacattatcatcatcatcatcatctgatgaggaggatcatgaggacagaatatctaaattacctgatgatctcattgtacacattctctcgtttcttccaactgtggatgccgtttcaacaagctttctttcaaatcgttggatactcatttggtatttagtccccaacctctctttctccattactactgctaattacaaatcttcaaaagaccagcaaaaattctgcaattatatcacccgttgtttggaacaacgcgagagaggtatgtttttcatccgcgattcactcgtaaatagttta

SEQ ID NO: 267371 - DNA, 813 bp, Cannabis indica
ttattaggcccttaattatgattcaaaatacatgtacagtatactgtaaagctatatatatacatataaataataagcagccaaaaaaaagttaagcatatctttatagattattgcatgcatgcatgccttacgtgcatatatacgtatacttacgtgtagcttaaagatgagacgtttagctgatttttatattaaagatgagacgtttagccccgatatacattataaaatacattaataatttttcaaaaaaatgaactaaaaattatttagaattttttaaaaatttacaggttaaataattagaacatacacaatctttgaaaaaaaaatgaactaaaaaacttttctaacatatattgaaacacataagagagatcaaccggaacactggtgtcactacacaaaatctacatttaatgataattttttaatcacaacataaattttttgtgactaaatgtgatttttttttttgaattaagcgtttatatattacaacatgttttacctgggactcgaacccaggacctccaacactcacacacccacctatcgccacttgagctaaccccaagtggttgactaaatgtgacttttaatcacaacaaaaattctttcaaaaaaaaaatcacaacaaaaattttataactaaaatattatatatatttagatacaagttatcattaatttagctttagtcacaacaagtatattgtgactaaaagcatattttgtcacaataaattatagttttgtaagtaataatattgagtcacaaattttttagttacaatataagaatgataa

SEQ ID NO: 267372 - DNA, 870 bp, Cannabis indica
gactgatcttactaaacaaaatttataatttttgtttttaaggaaaaattgtagtttatttctgtcaaatgtttgagaattaaatatactatttagattgagaaatgctaaaggatatgtggtcctagcactcttctatgtgtcagtatcgctattggtcgaactaatatcgggtctcatataatttaatataatagtttttaggaagtattgctaactaatcaaaacgtgacatgtcaagaagatactaaacactactggtgctttataacaatgctcatttagattgtgctaaaataacactgacaaatattatatgagaacaaacggtcaaactttaaggaataaatgttactttttcatagtataataacattgacaactggggcggcaaggagaagatagaaaagattgacatattcaattaatttatttacttagttttttttttttaataaatcatgcaattttatttagtttaatttaattaggataagtttttttttttgaaatcatttaattaggatccctttcaaaaaaaaaaaagaatcatttaattaggataagttaaaatgaagaattgttcaaacactcaatctattaatgggtcacattttccaatagcatgattatctaacaaaatacgtacatatgtataagaacaataactaagatatgaaagtgatgttatttggtgctattagtgtttgatttttctaattgtattttagggaagttagattaattggtaaggtgacaatgtggcacggtactcgacaagataactcaatttgaaaacaatataatttgaaaaaattaggtgggtagaaaaaactgtcaaatccatttgtccttattattttggaatat

SEQ ID NO: 267373 - DNA, 858 bp, Cannabis indica
catgcccccgaactttaatatctactaaatcatacccctcaactttaatattgtaccgaattgtgcctcctaaatttttatccacgtcagacttttgtttagtaaaattagacaaaagtacttaattccaacaatctcaatagtttagttccgaagaatttttaacgacatgaaaaattcaaaagacataatttggtatatgtcaaagtttagcggcaaaaatccaaattagcccaaaaaaaaaatgagtgaaacatttcatcaaacacttaccgtcatgtaaataggtccacgatacccacaaacttcagtgaagtaaggaagagcgccaacgtgatccaaatgactaccaaaacccaaaaaacaacaaaaaatcatcataatcccaatacgtttatgctaaacttggaatttgaaattggggaaagaagaaagctaagttttttatcttacaaatgagtgataatgatgcaatcaatggcgtggtcgaaggcggagccagaggagcgtccttgatcatagtttgggatgcgagagaaatcggggtatcggcgatgatcgagatagcccatgtgcataccacaatcgaacatgattcgttttccattgatggagaccacaacacagctcttccccacctcttgtcctgcgcctgaaaccagagtgttgaaggattatgatgagttcgtaaccaaactaaaatctccataactgtagatgatacagaagttatcggtggaactttccttaccaaggatgagacagtcgatcgccatgtccaaatttttttggcggcaaatttggttttatcaatttgttttttttaagttacctcttcctaaattttttttttttttt

SEQ ID NO: 267374 - DNA, 519 bp, Cannabis indica
aaatattattaattattactctacaaccagacgaaagaatagagaaaaataattgaattgcatcccatatatccaagctccgacctaaacaaatactctaattttaatttaatccactaaaattcaaaaacaaaacaagacaaaaacaaaaatacattaacactaaaaaaaaatcaattttatgtacggtgaattttttatctacaaatatacatttttcagtaaaaataataactacttcatattcattttttgttgttttatataatttatttatatttgttttctcgttattattttgttgttttacagatggcgatttttcattgttctttacttcttttacacttttttttttatctttttttttgttgagaaaatgtctgttttgaaattttcttgattgtttttttatttttcttttttacactttttatcgattagttgtttttagttgataaaggagagggagtgatacaaagggtattctcttcatttatggattctacttttggcgtt

SEQ ID NO: 267375 - DNA, 687 bp, Cannabis indica
ggcgacagtgacttttccggtgacttttctgacgacgatgatttttctgacgacttctctggcgtcggtgacttctccggcgacttctacgacgccagtgacttttccaacgacttctccgacgccagtgactttttcggggacttctccggcgctggtgacttttccatcaaaacttattattgtttacaaatatgggatttccatttttttacaaaaatatagcataaaaaaaacttatataaatgtaaaaaaacaaaaaaaactcataaacacttaactttatttatttatgccataaaaaaaactcttaaaatttttctatattttgagtaatttctactatttttactatttgtaagctcttgtaattagtcgagggattgtgcccttttgcttgtaaatggcttgtttgattaatagaaaatttaatcttgattaaaagaaatgtgaaaaaataaaataaaaaataaataaataaaggaaacaaaaataagattagcatattcctgtagcagcaactaaacggttcttccatctgagtctctcattcgaaaccccacaaaaccctagaattacaaattccccaatttctttcaattagctccatttttctctcgaatttctagggtttttgataaaccctatccgaactacatagtatagaattcgaaagcacacgtagtg

SEQ ID NO: 267376 - DNA, 2188 bp, Cannabis indica
tttttttttagtttttttttaagaataataggttaacggcgttaataaaatcgttaaaaaaaataaaaaggatcgttaaaccaagaattgccgttagatacaaacttttaatatataaagatatatatatatataaatatataattaaaataaataaatatagtgtataaaaaagatggacaaaactcatccaactaagtttttaatccaccttgagtagatgcataactaattcataaaataacatgaactaagtgatacttcaagaaaactagatagcaaacttgaaatatcaaaaaatgataaataaaaaacaagataatacttggagaaaacatttaatgcactaaacaaacaaagacttcgaaagaaaatggaggcagtgtggaataaatctttcctccaactctagcattaagcaaagtgcaacataatgaacaatttaaaaacacacaaaaagaaaaaaataataaatagaggtaaaatatactttttcttacataaaaataataagaaataaaaaattaaaaagtaaaattttaatataataattgaaagtggaacaaaaacttagctcaacattaaatcattcttaaaaaatcttttaaaattgtcacatctctataaacttacaaaaatataagttaacaaaacgcaacatgaacaaaataaaaatattaaaatatgaaagaaaactatttttaaaagacactaataaaaaatataactgtcatattttatattatattacttgttggataaaaatatttagtaacttaaaaaaattacaattaaccgtacgtaacgcatattagttctctatttcacttataaacttaaacaaattttaaataaaaatcaaaaaaagaaatacaaatgacaattttttttttaattttgctcaaacaagtgaccaacttaaaaaataaaataaaagatgaacaatatgaagaatatttcgatatttaataaatacattatgttgaagttatgggctatgctaagtatgctaagtatgtttttttaaaaaaaaaaactaaaaataaaatgtattataacttttaatctttacaataaatagcgttttatataatttagacagcattattttaaaaataaaaataaatatttaatataaaatggtaaaaatatatacaagagtaatttaaaaataaaattaaaaaaaaataacatctaaaaaatttcaaaaaaaaaatacataattataatttgaaaagaaaattaaaagctacctaaagttttaaaaattaaatacttaattattattatttataattgaagataactacggaatatgttactattctggtgtcacttcaacaaggagtagtaaaatttttcattaatcatttttcttttcaaaccgacttataattagattaaatatattttttttaacaatttcccaataagattttgactcagtaagatattgaataaattcgtgatgtttctacaaaatctaaacaattttactaaatttatacaaaaaaaatgttttttttttttaaaaaaaaaagagtaaaaaagaatttgtactaatcaacctatgcataagtgcatgagaaattaaaatttatgctaatcaaccgatatttagtaaaataaattctattttttaaaaaataaaaaagaaataaataaaattgtttctaataaaataaatcaattaaaggaaaaaaaaaataatgaaaggcctaataatttttttttttaactaaaagataggtgttttatgttggtttttttttttttttgttataaaggtgtttatgtggttgggataggaatatcttttatttttggtaactcgctatataaagtctcccctaatttttatcccttcttcattctctctctcgctcgttcgctccctcgctcgctcgctcccttcctcgcttagattctctattttctgcatcgtattaggtattgttctcttcttactctttcgtcgtaagatcgggttttgctataatattaatgttctttattttttattaattttgattttcactctttcaatctgtgttttggataccatcttttagggtttttttttttcttgtcggtgttggttgttcttttcttttcttttaggacttctttagggtgtttgtattatattcgttcagtattatgaatctaagaattggattgcagatcg

SEQ ID NO: 267377 - DNA, 1274 bp, Cannabis indica
gacttaatttttcttctcttctcctctttgttacccttcgtgaggagcgtaggttttaggatttatctcggccctttttgaggtttgtgtccaccacaatgaaggtgtgttatctcgctgagctttctcaacctcttatgggttattcgcggggtataagggagcttatggctccttaggatgcgctcaaccttttcataaatttaagacgatcttgagggaacatgtggccttttaggcaacagtcaatcccttacattatatccatggtacttagagcgcattttgggtgctagaaaatcggtattccttttagagaggcattcttcttagattcatatttgattactctttttcttttaataatttaagggacacgatagttctgcaaactgactcgaccttttgcttttgatattttaagagagatgatggttccgtgaactgactcgaccttttttttttatattttaagggagatgatggttccgtgagctaacttaaccttttattttttatattttaagagagatgatggttccatgaaccgactcgagcttttgcttatttaacttttattcgtttccctacacatgatgctttagggctaactttgaagagcatcctcctcattattgtgagtgctctttcttgtggaactccttcaggctttcattctctcttggtgcaccgtcctcctgatagcaatcgatcaagacactcttatcgcaggataaaacttgatgcgcccctcctagacaaggctcgcaagccaactgcacccaatgcagcaccaagtgcactctttttggaaaattctaaattattaatagtgccaaaaataagattcaaatattcagttgcacgcatacctattttattttactcaagtgcaatagattattttgaactttattttttatgttgtaaaaagtatttaaaatttcttgaaaatggacacaacaacacgatgcttattataattacaatatacaacgtactataaaaaattgggatataatttattaaaatgcgaaaataactagaacaaaagtaatcccctatcctaagaatctacctatagatatatagctcctatttatataattctcatgtttcaaagtgattaaggtgaagaaattgagaaaaatagattatttatccattaactttgaatcgttttcaagtttagacaaatttaagtaaattactttttgtagatacacaaatttattttgtacactcattaatattaggtctaattaagatttttg

SEQ ID NO: 267378 - DNA, 1032 bp, Cannabis indica
tttattgtaaaacggttctatagtcaatcagtgatgtataactagaaggatatacttgctttttatataaaggtgtgatccaagatgaataaactaagcaaaaatcacttgcaacagtggactaagcagaccgtgatctgactgaaccactatatttctctgtgttcattttatttttccaattgttctattatcttgataattttctttgaatactcgctattctaagtagagtattcactgtttctcttatatttatttattatttgcatacgttctagtattttttaaattctttctacaatattgttttattaattttacatttttgtatatcattatatatgtttcatatcataaatataaatttttaatagatgcatcatatttttaccagaaaaaaatatattcttaccactgtaaaagctaaaagcaaaattattcaaagtggagttagatattcaaatctccataaaagccgtacccacctcgtttggttagaaatttttcattgcatttgatcatgaatgggtatctatatataggtctattgcaaaagatcacacgcatatatatatagatactatatatatatattatatatattaatcatctaatgtgtaattaccaatatatatttatttcggtgtgtctgctttgtcccaagaacgacaatggccaatgggtcagcttgcattaattgatgcatgtaatattaatgtaacctttgactccataccttcacttttcactatggattatggacgtggattcaatactatatttgattatttagtagtgtgcattgttcatgtgataaatttatacttattgatgtggttattgttacaatattatatatacggtaataaattaatgatttaatttataaaatataattaactagtaaacaacccgcgatttgcggcgaacgtttaagaaattttagatcaatataaatatataaaggaatattttagagaggtgatgtggcatcttatgtgaattttctttgctttttctttttttttt

SEQ ID NO: 267379 - DNA, 1149 bp, Cannabis indica
taaaaggtaccactggtgcctagtattctctttggtgtcatactactattgatgcaattaagtagtggatctcatataacttaataacataacttttttactgaatatcgctaaccaatcttaaggtgccacctatggaagatgttaagcaatattggtgcacaatatcaatactcttataaaaaaaatcactaggatgtcactaaagttataaatacattgagagttttttgatacaacatgaaaccggcacaagcctgaaaggtacgagcacgatccgacatgaaaaatatgagtttaggtacgacacacaacaatattgcaaattaacacgtcaggatacgactaaaatagacttaagcacaacacgacatgataagcttgaaagcacgtcacgtaagcatgaataaactagcccaaaaatacaacacattaaaaaatttataataataataataatcgacatattgggtgaaactcattggtttaagcagtcaatattgggagaccaattgtcttagtgctctagtaagtacaattgggactccaattatggttgataacataacaaaggaaagaacacaaataaaatttgctagggtccttgtagatgtggagatacaagatgagctaccatcggttcccattcaatatgaatgcctcctaacaaaaggcctaattgtggcggctacggtcatagggtggatttatgaaaagctggtcagaattggcaaccgaaagtcaccaaaaatgattcgattgctcctgctgcagaggataaaatcactatagccacataggcaattgagaaatatccttcgctagctcctgcaattactgaaataggaactacctcttcaattccttttcaggaaaagagttcaactccagtaaaaggaaggagttagtttagtattgattggtaatgttctggaggtgattaactctacaataggtagcataaaagtggaacaggccaaatttgaggaggacaaagagggacagtgggtaatccgaaagagaaaaagggaaagaattctaaaaaggttggctaagcagcaggaaaataagtttagtgtgctataagaatctttaattcatcatggaaaactgcaacatactgagctggaacattagaggtttcaatca

SEQ ID NO: 267380 - DNA, 1297 bp, Cannabis indica
cattaaatgatataattacattatattaggtggttcatattctactgcaagacacgtgtcactctctgaagtgtagccgaattttgagtataacaaaaagtatacctttaatttatattagtttgtcatacccaattttcacaaaaaaataaagtaataataaatatatattatcattctcccatgagggtccataagacaatattacacattgaggatatgaagtcaactgaagaaaatttgcccaagcgacaaaagataaaacgaagtactatgtgcacaaaagggaaacatgcgagtactgacactcccaaggtgtcagtagtcatcctttgggtttatcttttgaacaaatccgagaaagagttactcattctgaaactctactctgaaaagaaaatccaataaggggctaaaatgcttaacttgttgggattgcaagtgtacaaagaacaagatgccatcaccaaatgctaagggaaatagtcatacacgactcatgacacttccctagtgtcaacagttgcgtattaaggaaaccccaaagggaattgcccttcgagtaaaattactcatgatgcactaagacttggaaccctaaagtcaagattgcacaagaaaaagaaaaaaatggtggtacacaacccttgacactccccaagtagcattaatcgcataacatagagtactaacactcccaaggtgtcaatactcgccacgaagaagaatgaaggggtttggtggtcaatggttctttctaaaatcaatggtcacacaacaaatgagaaaagtccattaaggggaaaaattagctcacatgaatactgatactctcttggtggcagtactcatgtataggggtgttcatctaatccaatccgcactattttcctcatagtgcatttgatctacactaagtgcggatttcaatttttagattcaatccaatccgcacaatagctcaaatccgatatcggttattttggattggttactttttaatattaaattatttaatatttatgaaaaaaaattgttcttcacataactagcaacaaaataaaacaaattatagttattttatgtcttcaacaacacattaaaatttaataaaataataaataacaaattcaaaagaaaaaaaaaacttgtaatgtatagaaatatttaattttattttaaattgtatgtagaaaaaaaaattatatataagaacagaatacacatttgatttattaaattttgaaatttaagtgtattatatatgtattacacttttaaattactattttcttta

SEQ ID NO: 267381 - DNA, 623 bp, Cannabis indica
aaaattcagagacaaaaatattaattattctaataataataactctttgaaattgattgatgtggtggatcatgtataaaataagaggagtgttatattgtctaactttttaatttattacaatcttttagttaattttcatgtttaaaaatagatattggaatatttattttcaattttttatggtatattccttatagttatattatataaatcatttctttaaatttttaaatttttttgaatagtttacaatgttaaaaataaatttgaaactttttacacatacgtcgtagattgaaatatcaggaactctattaattttagtactataaactatttaaaatatttcaaaaatttataaaaataatgttgtaacttataatgaatactacgaacatgaaaattaactaaaataaaatattgtaattagtacttcatatatttgttcacgtaaataatatttaaactgaattgtcactccattagttaaccaagagatacatttcattaattaaatagaagatgaaaaatataaaagtagatatgatctgtaacctatatatttgtatataggctgtaaatatatacggccagagctatgattacttactagatatagt

SEQ ID NO: 267382 - DNA, 1397 bp, Cannabis indica
ggggggactttagatattccatgaataacatccatgttacttgttttaccctttttgataaatggttttgtggacttaaaatcacaacttttgatgaatctacccaaatttttttttgatcaaaagtacttatttttttggaattctgttaagggagaaaagaagaagaaaaaattgaatccggataagttaaacctattgttttgttgttttgtatttctttgttttttgttcagctataacctatattagttcttgtaatgtgtgttacttaattgtagaggagggggagggtgtttaatatcattgtatattctgttttgttaggatggtaaaacttttgatacactggagggtgcggatccatctagtttggccaataaagttgctaaagttgctgggttcatacatcctggagaacctgctgctccggccagccttgggatggctgcaggatctactgttcttgaagctgtgaaagatattgcgaaagataatggatcttcccatgttggcaaccaaggaaaaactggcactaatgatgctttgaataagcggttgcagcagttgattgactctaacacagttatgatattcataaaaggaactccagaggagcctaggtgtggatttagccgaaaagttgttgacatcttgaaggaagagaagattaattttggaagctttgatattctgtcagacaatgaagttcgtgaggggttaaagaagtactccaactggccaacctttcctcagctctattgcaaaggtgagcttcttggtgggtgtgacattgtaatcgcaatgcacgaaagtggtgaactaaaggatgtttttagagaccatggaattcagtcaactgaatccgaaatggttaaagaagctggaactggaaagggtggcatctcggaatctactggcttgagtgcaacccttaattctcggctcaaaagtatagttaattcaagcccagttatggtgtttataaagggaaaacctgatgaacccaaatgcggtttcagtcataaggcagttgaaatcctcaagcaagaaaaggtggattttggatctttcgacattctttccgatgaagaagtccgtcaagggcttaaggtttattcaaactggtccagttatcctcaaatatatgttaagggtgaactgattggtggatcagacatcttattagagatgcagaaaagtggggaactcaggaaagtgttagccgagaaagggatcatccagaaagagagtcttgaagatcggttaaagaaattggttacttcttcaccagtaatgctcttcatgaaaggtacaccagatgctcccaaatgcggtttcagctccaaagtagttaatgcccttaaggaggagggtgtgcctttcgggtcttttga

SEQ ID NO: 267383 - DNA, 1401 bp, Cannabis indica
ggcataaaacccaacaaagactaggtccttacaggaaaaagggtcgtctaactgagcattgtccactgaatctattcgctaccctcgctatcagcctcatcttccacctcatgatctggaagctaaaagtgttcgcccatctctttgacctccgtgcctaggcaatccgtggatacgcaaaatttccttgggcaaatattgtggagtcgctgtctcacacctctaagatgactagttctactagttcttgcactattacatctatttcgtcactagacaacaaaccttctcaagccctagctataggagtctcttattcagatagggaggttggtatgaagctatcactcttttgagactcatatatgaaagccccctcctagagtcgtatctcttgctgtctgataggtcgctcatctgaaagacaaatcttttcagcgtggtgcgagtgcaatttgaacaaaaaagtgttctcacccaaattataagagttcaaattataagttcatagaattgatcgtataccttaagaaatggctgggcgtttcctagtatcctaagggccatgcaataacatgaacattatatcacagggagacacccaccatttcaagaattcaataagttctgacagtgaataaaaatgcaagaaaatgaaaacttaccacacgtctcaagaaatggttgggcatgtcacagtatccgaaggggcattcgatttcgtgaacattaagttaatctgacactctcaccatttcgagaactcacatagtttttcataatagattaaagtgtaatgtaacctaaagctagatatgacttaagagttacaactctaaaacaaggttgccctgggttaactaaaagtgcgagtatgcaagaggatattatcatgaaaatgcaagcattcaataagttcatcttggaacctgcgagtattcaagaagttcatcttgaaactcgtgagtattcaagatgttcttcctgaaactcgcgaatgttcaagtttcaagcacatattttctagaaaaataccctattttgcctaaattgtagaaatcaatttataggccctatcatttcatacacttgctacccctaagaactcaaaatgcatgcaaatattcaaggaagcgacaatgattatagaaaagaaagttacttgccttgaatatgattcttcctggatgtttttgtttgtgatcaaaccttcaaaattttcctgagttggaaggaatttgaaacttcagaaaaatctcaaggattttgaaattttgaataaggggaagagaatgtcaaaaatgagagggaaacaagtgaaggttatttcgtgtccgtgggatttaaatacaaatagtcctcatttattgggatgaaaacacgtggcaagggaatgcctaa

SEQ ID NO: 267384 - DNA, 825 bp, Cannabis indica
gattggggtataaaaatatttttgatggtatagaccagaattaattttggttatattttctatatatgaactaaattggtggaagtggtagaatccctcctctttttgagttggacttcttttcaagtcacaaaggaagttgattttgtggggagttaggatcggccaatttctcaagtagtagaatatgaagaaggtagacatgattctatagccattaggatttatttaataggaacaaactcaaaagaaatcctctattaatataaaccacgggtgtgagggcaagtaagcacccacgttcatatggagcttcgactaggaactgcaacaagaattctgggagctagtaggacatttagatcttggcttccgaatgacagttttgggaaggagatagtcatctcttattaattgtgtttggtattcagtgatggtgctaaatgtaagaactctcaacttaaaggccaggtctctcgggtcattactctcaatggcaactttgagaagtttagttgccattactttccaaccacgcgccttgtctaggttcttagacttgggcataatcagtttagctctaatgaactgagccacatgaggatcatattcatctgacaatcttctgcttctcttcatcggaggcacagtgacttcaaaattttgttccttgcaactcttggaaagtctttttggctttggaaagacaaactcaaggtgatttcgaaagaaggaattcgcaactcacaaggattgtgtcttggaattttgaaggcctcatataaggtatttttggattttagggagttctaaaatccttgatgc

SEQ ID NO: 267385 - DNA, 2134 bp, Cannabis indica
taccttttcaatcaaataataactttactttggcaaattttgatcttgtccatatggacatttggggaccatattcaatcccttcaatagaaggctataaatatttcttaaccatagtggatgatcattcaagacacacttggttatattttttacgttcaaaatcggatgccactttggcgattcctaccttttttgaactcatacatacacaattccaaacgaatattaaagctgtgcgtacagacaatgccaaagagctcacacttactaatttctatgctcttaaaggcacaatacactacacttcatgtgtaggaagaccacaacaaaacgctgtggtcgaaagaaaacatcagcatatattaaacgttgcccgagctctaaccttacaatcaaatgtaccactgcaatactggtcttttatcattgccactgccgtataccttttaaacagaactccttctgttcttttaaaagatcaaacctcatttcagatattacacaacaaactacctcagtactcacacttgaggaatttcggctgtcttgcctatgcatcacatgtcaagaccaccactaaactttctcctcgagctagagcttgtgcttttttaggctatcccccaacatgaaagcatatactcttttagatctccaaacaaaacaaattttccaatcaagagatgtactcttctatgagcaaatttatccttttggccgtgtgtcccacacagcacccattgacaatttcttctctacatattctgagactcatcatcctcaacttgactcaattcctttaagttctactgagaacacttcatctcagcaacaacaagtcaacaatcccccatcctcacccattctcgaggatatatcacaaaattccaatccctcctcactggtttcacctcccaggcagaataaaacacgcaccaaatcaggtcgtgtacaacatcccccaagttatctcaaggattatcaatgtgactctatcacaaacactagcaccgatcatcctttactcaattacatttcataccataaattctctcctgagtttcgagcagctattctttcactcagccttacaccagaacctacatcctacaaacaagcctccaaattcaaggtttggaacaatgccatggatgtagaaatagatgctcttgaaaagaatcatacatggatagttgttccacttccacccaaccaacatgtaattgacaataaatgggtatataaaaagaaactaaatccagatggtactcttcaacgttgcaaagcacgtttagtagctaaaggttacactcaaatacctggcatcgattacttcgacacctatgctcccgtggccaaattcaatactttaaaacttatttttgcattggcagccattcgcaattggcatttacatcacttagacataaacaatgcgtttctacatggggatctcaatgaggaagtttacatgaaacttccccaaggatatcaacccaaacatcccatccctcccaatgccgtttgcaaactccaaaaaagcatctacggccttaaacaatcctctcgccaatggtatgcaaaattgagtaccacattacttcaacataacttcatccaatctccaaatgatcactctctattcattagaaaccaatctggtatattcatggctctactcatctatgttgatgacatagtcattgccaccaacaacatccctgccatgaacacattcattactacactcgacaccagatttaaactcaaggacttaggcccccttcgctttttccttggattagagattgctcgatgttcaaaaggaatatcagtttcacaaagacccttcactctacagctcctacaagattcaggctgtcttggttccaaaccggtttctacccccatggaacccaacaccaaactaagtaatgattcaggggatttactgcctaaccctaccccttatcgaagtctcatagggaaacttctctacctgactattacacggcctgatcttagtttcgccgtgaataaacttagtcaatatcttcaaacccctcgacttcctcatatgcaagctgccacacgcattctccattacttaaagaactcaccaggccaaggt

SEQ ID NO: 267386 - DNA, 2401 bp, Cannabis indica
gaaattacaaacggattgggggggagaatactaatcctttagtaatttagtgactgaaagtgacattattttctctcattcctgtcttcacacatctagccagaatggtcgtgcagagcgcaaacacaggcacattgttgaaatgggtctcaccctccttgctcagacacacatgcctttgaaattttggtgtgatgcttttcaaagctcagtctttctaattaaccgattaccaacaccagtgcttggtaataaatccccacttgaagtgttgtttgataaaaaaccagattacaccttcctaaaggtgtttggctctgcatgttacccttgtcttaagccttaccaatctcacaaattccagtaccattccactagatgtgtcaacctcggctatagtgacttccataaagggtacaaatatttaagctctaatggtagattgtatatctctaggcatgtcacttttaatgaaaaggagtttcctttcaaggcaggatttctcaacaattaccaaaaggaatctgaggttactgttccatctccaaatgactggttccaacttccctttgcctctcctgaaactgaaactcatcctgaaaacacactcaatgccacaccagaacctgaaattcagccacacaactctgcatcttaagctgatataaatcgttccgagcagtcccatgatacacaactgtcatcgatgccaagtcctacacacacggatcaggtagatatttctaacaacctctttgttgacttagatttctctaagtttgctgctactgacagtgtaccaccagagattgaaactctttccaatcctgaaactcaacatcagaaaaagagtactgttcctgctccaacacactaaatgatcactagatcaaaggcggggtcttcaaacccaaagcttactcaactcaaagcaaagtgcagcaaagaactgttgaaccacttacagttcaagaggcactcctgcatcaggggtggaacaaagctatgacagaggaattttttgccttgatcagaaataatacttggatcttagttccaagaagagatggcatgaacatagtgggtaacaagtgggtgttcaaggaaaacctcaatgctgatgggagtttccaaaggctaaaagctcgtcttgtggcaaaggggtttcaccaaagacctggtcttgactttggagaaactttcagtcatgtgattaaggcctccactatcagaatcgtgctcactattgctgttgcaaacaactgggatgtcaggcaactcgacatcaataatgcgtttctaaatggagaacttgaggaggaggtttacatggaacaacctcaagggtttgaagacaaggataaacccaatcatgtgtgtaagttggtcaagtctctctatggtctaaagcaggcacctcgggcatggtatgaacaactgaaacaaactttactcaagtggaattttgtcaattcccgtacagatacttctctgtttttgctcaagacacaaaaatttgtcattatggtactgatttatgttgatgacattgttatcacaggaaatgacacacaagagatgaacaatttcattgagaaacttaacagagccttctccttgaaggatctaggaacactgaattttttccttggcattgaggtgtttcgtgatgcaacaggtatgtacctgtcaaaaggcaaatccgttgttgagctgcttaaaaaacttgacatggccaatctcaaaccatgcaatacacctatgacaggaggcaaacctctgtctctacaagatggagaagaactgcaagactttactcaatacagaagcgtcataggtgcactacagtacctcacccatactcggcctgatattgcttttgccgtaaataagctaagtcagtttctcaaatgtcctactacttcacattggtgtgctgtcaaacgagttcttcgctatcttaaaggtacaacgcaccatgggattcacatcaagtatagtgataagctgaccatttcaggttattgtgatgcggattgggcttgctgtcctgatgacaggaagtcaattgggggatactgtgtgtactttggagatactttagttgcttggtcatccaaaaagcagtctgtggtagcttgatcaagtaccgagtttgaatatagagcattagctcaattagctgctgaaatatcttggctggaatcacttttacaggagctgcattttaccctgccatcaataccagttatctggtgtgacaatatgagcgctaatgctcttgcttctaatcccttttaccatgaacgcacgaagcacatcgaacttgacattcacttttgtcagagataaaatcctgcaaaagaaacttgaagtttgctatatcccaacacaggagcag

SEQ ID NO: 267387 - DNA, 966 bp, Cannabis indica
aaatttcttcttctcctcctttgttgatcttacttcaaggatgttttaatttaatattaattaaatttctgatatattttaaaatattacaataatgtaacaaatattttttaaaataataaacactaaactcttaatcatttttaatcaaatcacgacaaaatatcatttactcatttaatttaaaataaaataaaaattaaacagaaacttaaaatgaagagggacaaaaaaaatcatcactcaacatgaacatgaacattagacaaatttcttacaaggaaaaacaaagagcattagacaaattaaaatattatttagtcaaatataattttacatagttacactacgtattgcaaaaccactaaataaataacaaaacacatcattcaacatgaacattaaaaaaaattccaatcttaaactaaaaaataatatagaagaagatgaatgtttataaaatccccaaaattaagagcacaacgacatcaatagatttgtgccaaaataagataacttttaaaatatgagaataagatggtaaattaatttatcacgttcagtgatagatgcatattcctcctctgactacgtctgtagatcataacccaatttgcccatctatattgtcgcaccaaagtccactaaaacaataactatactgatgtatccaaggtcgtgaaagagttggatctagaaaatgagaaaaaaaatcttaggggttggatctgggtacttgagaggaagaataagttctttagtgaggttgggtctatgttttaagagaaaaagaataagatgatgtaaaaaaaaagagaagaaaaagttatttttatttttattttttgtaaggctttaaaaaattattaatttttattgtctttattaatttattttaattaagatcatatgtttaaattttttaaattattagggagttttgttgtaaatatattaataatttga

SEQ ID NO: 267388 - DNA, 1228 bp, Cannabis indica
tgggtattacttgttaaaacgatacgtttacttccatgttgcaattatcacaacacatgctaatttttgggggccacacaaagtgcctactcactcatgtaagcaatattttatttatatagttgataattatagtaggtgtgcttggacttatttgctagcaactaagaatgaatgcctagaacagttgaagatttggaaatctcaggtggaaaacaaaacaaaaagttaagaaccttaggacggaaaatagattggagtttgttaactctgagtttgacaagttgtgtcaagaacaaggaatcactagacatagaaccataataaagaccttgcagtaaaattgtgttgctaaaaggatgaatcgaaacccgttaaacaaagttaggtgtttgttgttctgttccagataagagaaacgatttttgggggaagctttagctattgcaacctaccttttaaatagaagcccaaagagagtcataggcttcaaaagcccgtatgaaatttggtacaaaaaactgcaaacctaatgcatttaagaacctttgggtgtagagcgtatgtacaccaatctattgacaaactagaacctagatgagttaagggaattttcctaggttatgccttaggtaccaagggttaaagaatatgcatttcctaaaagggtagagcaaacatagtaattactagaaatgtagtttttagagaattgaaatttctccacatgataaccgtggaaggtagtgtatctctgtgtgatgcaggaaagtctggaaataagaacactacatgcatggaaatggagtacggaacgacactctagaagaggatttatagttggaaactattgtggatttggaagatattgctcaggcgaaagttgttgttgtgccaaaacataaaaaagatagaatagattttcaagaaggatttagataggcaggtttggaacgttatcaattaacgcgtgatagaaccaaaagacagattcaccctccaaaaaggtttgctaaggcagacctaattgcatttgcactagcggttgtacaaaaaattgaaattgaagagcctagaacatacaaagaggcaattttagggggaaacaagtcaaattgctccatgacatggatgaggagatgggttcactctagaagaacaagacataggcggttgtaccgaaaccagagaacaaaaaaatttttgagtgcaaatagattctcaaggt

SEQ ID NO: 267389 - DNA, 698 bp, Cannabis indica
tatgcccaaccaaacgagccttgagtgattctatttgcagatcgtttaaataaaaaataaaaaaatattttattaagagaataaattagtaagcgacaatctctcactaacaaaccaaactgtgatgacatatgaataaaactgttcactggttgaaccacaaccaaagcatccaattcaaccaccgtatcaaaccaacctttatccaacttaattaaattaagtacccctatcaattgtgcaattttaggttgaactgaaccacaccgcgactaattgaaacaggctcaatcagttttcctgcaaggtcaagggtcacacaaccaaaactatttttcaagttttaaaatgaagagcaatgtttgttctccacaataaaacgaaagtgtttgtaaactttttgtacaaaaataatttttcaacaaagagtaatacatgtgatgaccgatgtgtaatgtatgacaatgtatattttagttatagtagatctcttgttaattttgaaaaattctaaataatttagaatctttttaagttactagttaaaaatatggaatataataacaacaatatacacatacaatcatatcaactgaaaatagattataacttctctatttgccaaaaaaaaaataataaaattatacacatatgtcttcacacaataataacatggggtatactaattattaggtaat

SEQ ID NO: 267390 - DNA, 1834 bp, Cannabis indica
ggcataaaacccaacaagttgtatgtggatgagatagtttgtctccatggggctcgaagtcaattatttcagacagagatacaaagtttacttccaagttttgggagagtctccagaaggccatgtgtacgaagctaaatttcagtacaactttccaccctcagacagatagctagttagagaggacaattcagatactgaaagacatattacaagcatgtgtgatggaccttgaagattcgtggagtaaatacttgccattgatagagtactcctagttatgaaaatactatagagatgactctctatgagatgttgtatggtagaaagtgttgatctccgattcattgggatgaagctagagaaaaaaagtattcggtccggatttagttcagaggaccagtgatgctatagaatatagcaaggctcagatgcttgtttatcaaagcaatgagtgcccatgagtttgtaggaaatttaattctttttttcaaatgttttaattattagtatgagaaaaggacaatgcatgagttgtgttaataattagtggattccatttcagttttgttggtctttcctatgtaaattaataaatatatttgggtattactgctaaaaggttcatacattattgtctgcttttaagtttgtttttggttatttgataaaagatgttcctttttttttattaattctttgcgaaatatgaaactgtctgcatagaccagctgccagtaaaactcttagtcttaggtggagcgagcccttttacaccctttcttttcttttacccctggtgtaatgactcttatggagagtctatagctataaatttgagcctttagactctacctcgtatcacaaaattacattaccttgttgaaatagggaattagggaaatgaatttcatttgacatttaatgtttgtgcaagtattatctaataattcaagtagctggaatttagttatgaactagggataacaagtgattgcgttctttcagatttcagtccaactatattccttcgtttggcaagtgacaataaccttcagaagaatctagctcccattttagcctttcttgtaaagaattccaactcccattttagtcttaatttctgttataatattctatgttgttcttttcctggctcacatttcagaacactagaggaagttatctttttttatgataatttttattttagtttttattttttctaagaatgtgattttcaaatgtgggcaggaacaagggatattggttctaaccaatgctatcacagcttgctcagaagcaatagagatccagaaggggaaacttgttgtcaaggaggcacccagagcagtgagtgtcaatcttctttttatttcttgttgtgataatggtcaacttgttcgtaattataatgaatttagcattgtgtttaatgatatattattattcactctctagtaaagaggatgattgttttagattaatctcgtgtttggtagttgagatttcctatgaatctaaatgtttgatttcgagcttctttttgtattttgtgccttttgatgaaaattttgtttttttttttttaaaaaaaagatgaagaagaagttatatgttatttctaatcaaaaataatttttatattttccaaaaatttatattttgtgctctgtattttatttttaataatgtgctacacgatattgttttgtttacgtttacataaaattgcagaatactaattaaaaaaaggggtctttccttttttctttcttttggctagaataagagcactagatcaccaaagttttttaattgaactaaatattgc

SEQ ID NO: 267391 - DNA, 1462 bp, Cannabis indica
tctgtattttgtttaagtgttaaggatgaatgtaaattatgtgtttatgagaactttctgtagctttatttcatagctagggtgtttgtctttgtagatattgtagttattaggcttcttctaagtataattaacaagttaattttaagttttatgttaaattatattccataataattgatggactaatatgcctgtcatttaaaacttaaaattatacataaagaccatgcttttatttagataaaaaaagtacttgtattttttaaaataaaagaaatatacattaataatattgttaaatctgaacttttttctttcaagcttcgaagttgacataaaaagtgaaattatgaaactaggtaagataaatattgatgatgatctaaatcatactctcaagaacattggactaatgtgtgctttattcattgtagttctaagtcaccacttcaaatctattcaaaataaacaaataaatgtacagctagaaaacatatatatgaatcaaattagtattaaggaggctctaagttggattaaggagttacaatcttagtaaagaaggaacattattgtcgtacttcactcgtgtctctcctgaagtggatgaaataattagtattaaggaggctctaagttggattaagtctcaaggttggcactcgcttacagttgaaacggattgtcttattgcagtccaagcaatacatagtttcgtttgcttaccatcctattttggcttcctggctgctgattgcaagcaattgcttggtgatttatcatttgcttttttgaattttgttaaacgtaatgctaataagattgtgcattttcttgctcataactcttgttattcgacaattcgtatttttgatatattcaactcactttctgagttgataaacattataatggctgattctctttaataaagttactatatttctattcaaaaaaaaaagaacattattaacattattgtttttttttgcgggacaaagaatataaaaccactaatatttgagacaccaaaaaatttcaccaactatcagacaaatatacataattatagagagaagatatggaagttttactggaatccctaaccttcaaacgtataaaggtcgattttgagttgaaattggtccttattataagaataaataatatttttaaaaattattaaaaaatatatatatatttataaatatatatttaacctagggccgtccctgtatacatacaacaaagtaggaggtttatctgcgagtcctatttacaagtgaatagttgtcttgccatagtaacttagtataacatatttctctatttgctttcactattccaaaataaccttttatgaagttgattggcgcaattgactactactcaaatgaggcgcctgttttgaatcgacagtaataaaaaacctcaaaagcatcattttaaaacagatgct

SEQ ID NO: 267392 - DNA, 886 bp, Cannabis indica
ttattactgccaaaaattaaaaacttaaatatttatttgtaagcatgagttaaacttaagtattagtaccacaaattactctatttaaaattatttaggtcactattgattcaaggatactattattaacctaactaaccttaaccctaattctcatattctcgaaatgaatactcaaaacattatttccctatagagtagcaacaaaagtgacactatctattgttatgaaatattatcataacttaatagtgattttatttttttaagcataatgtgcaaattagaagagaaatatagaaactcatacctgaggcgatggccatagcaggttccactattattatcacaccgttgatgtagcttattggatcttaataaacttggtacaataaacgtacgcagagtatttaagtaacttatgttactcgaaacagatctttgttgaacaaaaatattattgttgacactgaaaaataacaatgttgtcaccaacataaatatagttggaattccaaacttaagtttccaattttgacctaacgcagaaactatatacaccccaactactcgaacccctatcaatgcaactatgttgaagaaacgtaaccaatatttagatgttgttgagtgttcattatgatcaacttccttaataagctcttctaaagactttaatttatgaaaagacatacccacaatcaattgaggtaatgcaagaaaaaacaagaatgtgtatcttcttgtaaaactactacatgagttatcctcctccactttttggcagttatccattgttgctgataatgacaaaagccccagtccctgaagtccaaccattgacaaataaaatacatgagttaagcttttagagggcatatatata

SEQ ID NO: 267393 - DNA, 731 bp, Cannabis indica
catgatgtaatatataaacgcttgaatcaaaaaaaaaatacctacaataaaaataaaaatatataaagctcctcaataaagtaatttttgtactagttgttttatgattatcaattttttgtcacctttttctcacattcttttttatttttattttctattctatactataccttttgcataattaatttgtctcccataataatctagtggatattcatctacattacctatcttaaaccttttgactcttcttgttccaatattacccttgtactttgtttttttttttcaaagttcatcttatatagtgatcattattactctgaaaatggaagaatttaagtaaatgggattgaaaataataactaaaatttaatgtacatatatattatctccatggagggtttttgcaagatatatcaaattaatgataatttttcaattactattatttataaaaatatgtagaattaatagtgtactatatactggtgacaagaattacaagatccatcaaaaccaattagttatgaatagaatagtctttatgtcgaataatattattcaatatctttgcgatggtaattatttttttgctcactaattttgaacgaccttatcacgactagctcattatagaatataacacaaaaaccatgacaaaaattatgagatttcatctcaaaaccaattagttataaatgaaagtagtccatattcttatatat

SEQ ID NO: 267394 - DNA, 716 bp, Cannabis indica
tatatatatatatatgtagcatttgtactaagaaggaaaaaaaaaacaagagtttgacacatatatatgttgaattgaataattatatagaaacataaagaatcaaaggggattttgttcttatcatatattttaaattttggtaataattaagagctttattatttcaaataataattggaaaaaatataagaaagcaaatcaaagaagaaacaagaattgtttcttacgagcctgcaaagtacagaaccatactcatcagcaagtttttgaatttaatatatatatttatatatatatatatatatatctatatatatgaatgggagaggagaacaaatcaaatcacaaacactcaccccaaaaaataatggtgtcagctctttgtgagaccaaaattatcttctttatcccaagccatgtgtaaacgattaacccaccattaatctcagctctctctctatgtattatattcatttactattcgaaatttatagtacaattctaaaaaaaatccttttagtacacatttttctttttagcatttcagagagtttttagttttttttttttttacttattaattagttttcttactcttatttgttacaatttaagttaaaccaaaactaatttattaatactaaaaaaacttaacaataattgtcttaatatgtatgaaaaacaaatcaacaaataatttgaatttttactat

SEQ ID NO: 267395 - DNA, 792 bp, Cannabis indica
tgagaatttcattatattgtgtgtgttttttgtttagagaaatttcattatattgatagaagaatatcatatacgcatagtgtgttacaagttacaactaaatgaatattttagaatttatataaaccaactgtatatagaaaagtttatattgaacatatctgaaatgaatatttgaaattaataatagaatagaatagggaatcatttgaataaagagtatgaaatgataacgaaaatctgaaaaatctaatgcacccgcagaggaaactgtctcaaaaattctgacattttggaattggatgatggacagggcatctctgtcgaaaataaaagtagaaaatatactaataataatcaaagaaaataataaaattattcacaataaagaaattttttgttatgttgcatgtgctgatatatcctaattaattagcatatttccactttatatttggcagcctttctaagatattacacatacattgaatacaaaattatcttcactattcatttagttagaaagtagaaaaagatgaattgacattacaaaattattactttattgcaaaagcaactaaaaacttacatgcatacaagatttaagtaattaaagaggtgtttaaaaatgttgttacaaaacaatattcgtttgataattcttcttatagtgacattctccaacacactcacacctttattcaacaaaagattacaaaaacatcataaaaacacgaaactgcattttatattttgaatttttcaggtggttataaatttcttttgaattat

SEQ ID NO: 267396 - DNA, 710 bp, Cannabis indica
gtattgtttgtgcttatagttatgattattgcaattattacttttacctataaacatttttgtaataacatagagtactactaaatgattttttttttttttattcacaacttttcatcattttgattaaaagtaaaattttttagtgtgttaggtaagttagatatgaacatgtatgttatgtattctaaaaccattatatgagattgagaattaggattatctcaaacgaattgataataggaatatgtatattgtgtttctcaaatgcaactttttatttctaatataacaatctctatcttgtgtcttgaaagagtatataattgtaaaaatttatccccaaaaaatagtataaatacgaaaaatcacactatagaattggtttaaaagtaaaaacttacataaaatgaactaaattataaaaaacacataatctttttattttgtttttttggaacattttattttaaagaagaaatgaattagagtgagcagctttgtttaggcaggtacgctagtgtctacctctacattcactaaaaaaaataattatttttagtgacaatttttagtcataatataaattttttgtaattaaatatgacttttagttatgacaaaaagttaattatttgtgactaaaatatagtatttagatacaagttgtcgctaatttaattttagtgacaacaaatattgttactaaa

SEQ ID NO: 267397 - DNA, 2084 bp, Cannabis indica
ctctctctcttcttctacaatatctctacctctcgcctcttcctctctctatctcctcttcttcaatatctctcctctcaccttcttcctttctcttgaaaaatattgctgcccagcttcctctggggacaagtgtctgagactttggagatttagggcgtagacgacagagatgaggagcttaggccgtggatgcaacaaggagatggttctggttaggtgggattggaatcgcgcgaggatcaaaggtgctcactctctttcgttcttttctttctcattttatacaaagtttgaggtcaaacagatttgatttgattatatctacttcttccatacttgatttataatttttggagtttattttttatggatctctttcatttacgttctcctttaccccaatttgtaattattttgtttcactgttctggattttgatgtgggtgtgtgagaaattttgttatttgattgtaaacctaggcttttgatggaggggagatataatgggaactgaatgttgaagatgtttataaggttgtttacttgaattatttttggaatagcaatgatataccagctgccgactccgtcagtaataaaaccctccaaggaattgaattgaaatgggaaattcacgccttacttctctgtcaatggagaatcatcacccttccggccaccatgttgtccatggattccagtgcctcctcctttcacaacgaagtggatttggggatgatgttaggaccaaggtgcggttcacttatgctaggagaggtcaaaatgttaatgcttaagggtagtttggtcttatacggttaaagggtatgattgtaattgtgagtgagattgcaagtttgttaaagtactgtttgtgaggtttatggggtttatgctggtattgagatttctctctctgcagcaagagccttgtaggctctatcttgtaatctttttacttgaattcaataacactcactgtgatgttttcttctattttctattgttaatctattattgagtaattgaggcagcaggttatatcaattggtatcagagcaattgatccgggaacatggcgaatacgagaagttcaaagaaggtggtggaatcggttcgggtgaagaggaatcacagtcacaagttcacggggatcgggattcgatgagggagaaggttgaatctcatgagcggggcattgctgtcattagcgagaagttggatctgctactccggggacaagcgagaatggctacagagcttaccgatggtttgcgaagcccaattgggaggtccgttcaacctccgatcgggtctagtggagcgggaagccataatcgggatgagactggtggttataggggacgacgacctaaattccgcccaaggaatatcgagttgcctctgttcgctggttcggaccccgatgattggaagtatcgggaagagaggtatttcggattggagaggttaacggcggaggagcagttggaggcggctgtcttgtgtttagaaggaccggctcttcgctggttcagatgggagaatcgacggcgtgaaatccgcagctggggcgagttgaaggacctcgttctccggcgattcctccctgcgcacgaaggatcggcgtacgatcggtttttggcgttgcagcagacgtccaccgttcaggaataccggcaacagttcgaagctttgacggcgtcattgggggcggtggcagagccactgttggagtcagcgttcttgaagggattgaattcggagatacaggggacactccgtctccttgaaccggtggggttggagaagactatggagttggctgagatagtggaagccaatcctaaagtggttcgggcttttgggagtgggccgagtaaagggttaagcccaaatagaaattcttcatttaatccaaatgggctcactcaaaggacttttaatggactgaatgggacaattaataaaagtctttcttcccaaaatagtttccaacgtgcatcaaccccttaaaccagagaagagaaatggagtttggtaagggattcaagagacttacggagactgaggtgcaagag

SEQ ID NO: 267398 - DNA, 593 bp, Cannabis indica
aaataaacttctttttctacacattttctgtaggtgatgtatgcatgtggcaagtacaacttagttcacgacttcttcagaaaaatacaaaagtcttctactccaaacgctttaacttatagaggtattatacttggccacctttatctgctgtatatcaatattatgatctcattataataatggcttcttaaacgtacagtgcttgtgaataccctatggaaagaaggtaagctagatgaggctgtattagctgttcaaaacatggagaatcgaggaatagtaggttctgctgccctttattatgattttgctcgatgtctttgtagcgctggaaggtgtcaagaggcattagctcaggtacggccttcttacaattttgcacattcaagttcttatgtattgcggtcactaaaaattcgaccgatccacagattgagaagatatgtaaggttgcaaataaacctctggttgtaacttacacgggattaattcaagcttgtctcgactctggaaatgttaaagatggggcatatatgttcaaccatatgaggaagttttgctccccaaatcttgttacttgtaacataatg

SEQ ID NO: 267399 - DNA, 2386 bp, Cannabis indica
gagacattaattccgctgcatcaatgtaaggttttcttaactttatatgtatttaatttatcgttttagaaaattcatatttagggtgttaaacaacatacttgtgagtagatctaagattttggtaaaataaatattccaacacatttgtcaacccgaataacatcgccaggaactcataatgaccataccttgtctgaaagcccgtctttgaaatgtcgttctcccgaattctcagctgatgataactagaatgtaagtcaatcttaaagaatacagtcttaccctggagttgatcaaaaaaatcatcaatcctcggaaatggatacttattcttgatcctcaacttattcagttcccggtaatcaatacacatccgaagagatccatcttttattttcacaaacaaaactggagctccctagggcgatacactaggttgggtaaaccctaaatccagcatcttctgaagttatatttttagctccttaagttatgctagagccatcttgtatggtgccttagaaacaggttctaccccaggtgccagatcaattatgaaatttatctcttgccgtggtggcaatcctcgtaactcttcaaaaaatacatcaagaaactctcttacaaccttgacatctttaagcccaaatgtttcaggtctgttggggtcaatgacaactgctaaaaatcctacacatccactgtgtaataaatccttagccttttaactgaaatagtcgggatccgagaaccttgaacatatccaacataaataaatggatcttcaccctctgcctggaaagttaccatcttttgtttacagtcaattctggttgaataattggatataaaatccatccctagtataatatcaacaactattagttccaactgtactaggtcaacacttaactccctattttcaatcctaactggcatagacgtaatcaaccttttggagataaccaattctctgccagatagtagggttataaaccctttcttaataaaatcacaaggtctacccaattggttaattactcttgacgccaaatataatgtgtaaccccagagtcaaacagtacagtaaaatatgagtcattgacaagaagttgatctgttaccccaaaagggttggctgcaacaacagcttgaataatggcaaacaccccagcaggtgtttgagggtagtctttcttaaaatgtccaaccatgccacactagaagcatgtattttgattgaactctctagaatgatgtttcttacaacgagggcactcagggtaagaataaccctggcgtctagctctaccttagttccctcagaaccttttgtttcgttctgaaccaccagatgttgagaaagtcttcctcttctgatcagtagtagaatcaccaccatccctaccatatcctgaagtaggaagaataaccctggcgtccacctctaccttagttccctcagaaccttttattctgtctcaaaccacaagatgttaagaaattcttcctcttctgatcagtagtagaatcaccaccatccctgccatatccgaagtaggaagagtggtggtcccatcaacacttggagtctctcgcggctcctgaagaaatgtcacggcaccctcagctcgaagagccttcaaaaccattacagcataggttgatgtatcacttgtagtaattaccagatcatgatttatctttgcatttaaacccaccaagtatttctctttcttgctgaagtccgtgggtactatagccgaagctaacttggaaaattggttgaacttcgttttgtataccgttattgacatactttctccctgaaccaattcagtgaactctttcttcttagcactgccgaccgccttattataatatttaacattaaaaagttcccaaaattcttcctaggtcatagcagtgatgtctcaggtgagggatactaactcccaccacatgagtgcgtcttattggaactaaaaggtggtgcaagtcactcgatcattctcaacaacacccataaaaattccagattctttctattacggtgagccactgctcggccttcgtgacatctgggcctcccaaaaatactagaagcgccttgtaacgccctaaataattaggcacgctacccaagatacttatgaaaccctaatcctctaatcgagattactaataaaattagcacgaaaattaaactttaatcataaacggaatgaaaataaaacttgtaataatttaaactttacaatctaaatgttacagaaattgggatcccaaaaacatttacaaaatatattacaagtctctttccttcagcccacctaagcggcaaaaacgagtctcaaaaacacatcactggtagaccccaacc

SEQ ID NO: 267400 - DNA, 2108 bp, Cannabis indica
acagtaggtcaaccagagcacagaggcaaacacgagacgaaggtggatcgtgacgttattatagtgatcaagaaagtatgagaaactcccattgttatcaatctgaaagttactcaaggactagatccatgagtaattatgaccaaagatgtcgcgatcctaatctccacgagcggttaaactaaaggcagtctgacctatgtgagcatttaaactgtaatgcaccagatttacgtaatcaactaaatcgaaatgatgaccaacaacttgtggatccagtacaattgcgggtaatacaattagaagataagttcaagaagtactaggatggagaatatgggaaactaccgggatatgactcaaacgaagagacataactattccatcctgatattttgaattcatagttttctcaaggattgaaaactctcatgtcgcacaatatgatggtacaactgatcctgttgcccacctgaacaacttcaataccataatgcgagcaagtaatgtttcaaacaacttgtgatgcatattatttctaacttcattaacaagagctgcaagtagttagtttgacaaattcaccaatcattccataacttcctaggaacaattgtcaaaggatttcaaaaagcaattccaagctacaagagatcagtgaccagaagcatcttcgttaaccaatgtcaagaaacaaccaggagaatcccttaaggcatacttaagtcgtttcagtaaagttgcaaagttaggaatttgaatgatagcattcaactaacagcccttcaagcgagaatcacaattgacttgtcaactgtagggtagaattatgggatgatttgcaaggtcatcttgttagaaacatcaacgagatcaatgaaagagcacaattttttgtgcaaaaagaagaggcgagaaataaaattaagctattaaaatttggcttgggagataaacccagcacaagtaccgcaacaacgagcaccgtgaccactaaggtagaaaatccaaatcctattggcccaaataccaaaaggatcctccaaggacaaaaagaaacaaaagaagcatgcaaagtatttttctatttactcagtatacactgagttgaatgagactcacgaaaatatctacctcgccaacaaaatcaggttgcatttcgcagactagatccaatgagacatgcgagaaacaagcgagatactaacaaatattgctgtttccatagagattttgggcatacaaccgaagaattccatcaattgaaagataaaatcggttacaacctcctcttatagagggcgagaatatcctcgttatttttggagggccacacctcacaggaaacaacaatagcgcacaaaagaggtacattaatgaagtgaaaaacgagacatcaacattttctccaaaacttttaaagagagcaaaatctaatgaaccgcctattgtctttactgatgaagacacatcacacgtacgataccctcatacaaatcttctagtgataacaatacaactcgctaataagagggtaaaaaaggttctcgtagataacatgagttccgtcaatattctttacaaggaaactttaaagaagatgggattagaggatgcaaaattaaaatcttggacggtaaacttatgtgggttcacaagcgatagtgtcacaagttaaaactcggcccgacgacccgacccaattgacattcctagttgtagttaacattgggctgacttccaatagctctctcgtacccccaaaaagtttcagtacatatccttatcaatgttaaaaaacaaatattcaactagtctggaaaactagccttagaagtaattatatctgtatattaatcatattagtattcgatcgcgtggcctaatggataaggcgctcgcctccggagcgggagattgtgggttcgagtcccaccgtgatcgcactctcactaatatattcttctcctcttttgttttaaaggtcatcttattaaattatggtattgaaaaactcatctaatttcttatcctcttaaactgcattttttttattatatatataaaaaaaataactctaccgagaaaaataagcaacaaataggttg

SEQ ID NO: 267401 - DNA, 896 bp, Cannabis indica
gcataaaacccaacacaagcttcccatcttcaatcggagcttaacaggttgcttcacaaagaggaactttattggaagcaacgggctagagttgattggctccgttcggtgataaaaatacaaaaaatttccatcaaaaagcctccactcgaaaacgaaacaattatattcatcgattaacccttcctgatggctctatcacccatgatactcagaccatcttcactcaattccattcctattattctgatcttttcaactcacaaggtgtttgtcactcagccatctcctctaatcttcagggtgttaccacttgcctttctcctacacaatctgccttcctagccgaggctttcactgctgaagaaataaaaacggctatgttcagcctctctggggacaaagcccctgggcctgatggattaaattcccttttctatcagaaaaattggcatattttaggtcccgatctttgccagggccttcttcaaattcttaacaatcatggggatctctctttaattaatagcactattttggtcctcattcccaaaaagaagaatcccaaaactgtgcgtgattttcggccaattagtctttgcaacaccctttacaaatgtctatctaaagttctggctaatcggctcaagagtgttatccactctgtcattagccccagccaaagtgcctttctcactggtcgtcaaattactaacaacattgtaattgccaacgaaataatccatgctattcactctaggaaatctggcaaaataggttgggctgccatcaaactagatataaaaaaaagacttttgatagagtagaatggtcttttatcacccaattttctttctcatattggggctccccagagtttttatctctctcatctc

SEQ ID NO: 267402 - DNA, 746 bp, Cannabis indica
ttagtaagaagtaaatctcttgatttcattacctctttggtagctacacacgatttccaaggtaaggtacaaaacaaacaccaaaaacaatattaataacgggaacattatttatacatttattctgaattttcttaattaacttttttttttcttccttacactgtcctgaaaagtaattaaccaaacaactttcactctcaagtcgattaaattaatcaactatgacgatgatgatgacgacaacgattctaagccggacactggaaaccagacggaggagtcttcccacagtcaacgaggacctgaagagcaatagggatgataatgttgatgttaagaagcttagccttaatggtggtgcagaggcaaatggccgcgtccaggtctactagaccctgaagcacaggacaacacttctccttggcactttcgccgatacctatgtgaatcaatccacccaacacgtccacgcaagccccgagctttaaagtgtcgatgggacaagtctgctgtgccgggggcggaggaggacagggagtttctacaggtggactcggcttaggtactactggcgatggtgttgaaggaggtggttttacaaccggcggcggtgtcaccactggtggatttggagtgtacggaggtggttgaacgacaggaggtggctgtacgaccggtggtttgggcacataaggcggaggctgcacgactggaggctttggtacgtaaggagggggtagcac

SEQ ID NO: 267403 - DNA, 665 bp, Cannabis indica
acaacaataatagtaataattagagtaaaatatgcattgatactcaatgtttccttttgattaaatagaacacgtgtcacgtccaacacagaagaacgttatcctcactcaaaaattaaaaagtaataacaaaaacaattaatgtgttcacttattatgactctgcacaaatttcatgaccaacattgttggacatgaaaaatctcctaaagaatttcacgacttacgctaatcgtgttaatcacgagaaagggtcattaaaaatataaattgttgtagtgagataaacaatagactaacaaaaaattacaacgttccaattagggcgaagtagactttggccccacttaaaattttaaaaacaaaaatatatgtttaatattattttaatagtagtgcaattttttttatatagaaattagaagtttagtccacctcaatctttttttttcttcaacattttgacccctttcgaaattaaggatgtgtttggaagtaactgtgtaattactaggtaaggtattatatattagggtggtaattacacagtttagtaattacactatattttaaaatgcaaggtgtgtttggatatgaggtggtaattacatataaattcctaatatcttgtttgacaaaatagttagtaattacatgggaaaata

SEQ ID NO: 267404 - DNA, 685 bp, Cannabis indica
gacactctaatacccacaccaataaaaataaagccccacccaatatatcttccttccacaacccagcttggaccacaccaaatagagcccttacccacatgacttcaaccggaccccaggaacacaataaaaaacccaatcacaccccaacccaacaccacagaccccaggaacacaagaaacacccagccgcaccccaacccaacaccacagaccccaagaacacaagaaacacccagccccaccccaacccaacaccacagacccaccaacaactcagaaacgcagacgcaccgcgagcaaacacgaatcaaactcacacacccaagcaaccagcttctacccccaagaaaacgcactagaaaccagatataaacaccaagaaaatgcaccaggaacaacccaaagaaaactcacacacccaagcaaacaagattcaaacgccaagcaaccctaagagaacaacaacacaagaacaaccagatacttgcaaaaaattagacacaaaattcaacccaaaacacaacatcaaacacaaaaaaaaagacacacacaccatgtcacaacagacaagacatacacccaagaaatcaacgccgaccgacgagtaaccacaacggagaagacgccgcctcgaaggattcactgacgcagaagagaaacgacaattatattttaataaaaa

SEQ ID NO: 267405 - DNA, 978 bp, Cannabis indica
cgcccttggaaaaccttcgtgcatccctccaccagcaaaccccgagcatcccaagccaccaaaccaatcccaaattgtctggagtcattaaacaaagcagcgtcaacatttatcttgacactaccagaaaaagtggcctcaatcacagttttttgagcattttgccaatggttaaggaagctttttgctgacgaaattatgctatctactcccacaattttaccttaccaaaccttattatttcttgcattccaaacagaccaacacacagccactaacaacttctttttacccttatccagctgctgaaagtttgaactctggtgcacatctgtgccaatcccaacctgatcccagcatgaagaagcagctgggcattctaccaaagcatgcaaagtggattcatcatcaagagaccaaaccagacatagtgatgcaaccgcaacatgcttaattcgaagttgaagcatcgtgggaagacaaccacaaacttttccaaaatttatttaatgtgtcatccaacattggtgtttactttaaacataatttctaggtacaaattaaacactataattaccgatcaaatcgaaaagatgagaatggtaatctttgtcaagcagttgatcatctcatcaacaaaccatgcattcaactggtaactaatcatgtggatcaagacaaaaaaaatccacaagctatcaagttggaaaccaaaggaacagatattgtcattgatctaaaaactccttatccagaagtatctgttgatcaaaagtaacaaatatatgatttgactttttttttattattattattacatttttaaatttatcaatcataacgaaagaagaattatgatgaataattcaagaaaacgtactttaatcataggcaagtcttcagtacacccttttaaaaggggtgtttcaatagatccctatctcttttggcacttaggaaaaaaattaattttttttt

SEQ ID NO: 267406 - DNA, 1119 bp, Cannabis indica
tgttctatgttatatacaaatagatcttgggttaattgttaatttatctaacatcttgctgttggcaacaagactgacctgaaattgaatgaaccttaaaaaataaaaattattgaatttaatttaaaaaaatatgtaacatttttaaaaattactaagaaaatatatattttttaacccttaaactaacggacttagtctgccttagtttaaacctggacctggctgttggtataaatgaaatcaagtcaaatgattcgaaatcaacaacctattacttccaatactttgagtaggtgttccctggaatgagatgcccaaattcatatttggtagctgaaaatgctaggcagggattttggctgtgttgttaagcatttattttaggcattaagaacctaaattagtacaattaacaggttaattataattttaaccctcataatgactacagtttgtaacattcacctatttctctataagcaggaggtagaatctaccttcattcaaaaataggtgatgaggaatgaaaaatagagagaactctttctacactggagtaggcttaaaacatacccctataatttttttttttttttgttacattttatcaattatttacatacaaaacatatatttttatgaattgattcgagtactcgaacatctttgttttttgtttttgtaattgaagaataattatctcacaggacctaaaaacctttgagattttttcataattaagtagcatgtgggcttcgtccaagctccaagtaagaccatgcagtttttttttttttttttttgaagaaaaccattcttagattaaaattaagacttgacagtcattacaaaataattgtttaagaatagaggacaccaaaatacaaccatgcagttgataaataatacatcgtttggtcatctctttatgagatttatatggctttatttttgctaaatttgttgtgaaataaattaatttctatttatcctatcgataaataagaaatatatgaacttaatattttcatcttattaaaaaaaaaagagagagagagagaatgaagaaaatttagggtaaaaacaacctaattcatgttagtactttttatttgg

SEQ ID NO: 267407 - DNA, 942 bp, Cannabis indica
taccacttcctgctgacatgattcgttgacggcagggacttgactagcgacggcggacggcctcctgagcatgatggctgttgctgtcctgcaacgaacggaaagaggacctgaccaatgctgactctggcacacacgccttgacggtttacccgaaagcacctctcattcctgtctggagcctatcagctccagcgcacgaaagcatcttgttaatacgcagaacatggaaagggtgcaccctcaccctcaaatggaaagcatcttttccggcaaacttagccatgtacttgttgcaagcaatcctagctgcttccaatgcctctgacgaaacattctccttctcccaactcacgaggtgaacgcagaatgggaattcatcaacacccttcttcttcattccaacatcgtaaattctgatcttaggatcaggaacaccacggcaaaatcttgactttgggtaaggtttgttcttgatttgacggtaacaccttgcaggtcctataccaattcaaattgttgtatatgaaaatgtaagtttttacacaattcgaatctaaacaaaatatatacttacatgcataagaaagacaaccttttactcagatatgttacaatagttttttctttaactaatatacaattatgaacaataaaaaatacatatttctcatgaattacaatacaaactacttgcaacagaacaacattttaaatcacatcaagtttttattactggaaaattcatttattaaccagacacggaaaattcttctaagattgattttgccaaaagaacaatattttcagtaaattataatacacacatcaatttaatacattaaattgtgcccacgacaaagatgttttctttttttattattgttctctctttccaacacaaaatcagtgacagagcattcaaaagggtaaaattgaaaa

SEQ ID NO: 267408 - DNA, 3707 bp, Cannabis indica
ggagatgttgctattttgcaaaatcgatagactcaaaactgctcaattttttacttagccattttgtcaaaatagtaaaatatgaagttgtgactttgactattatgagttcatagttctcgttttctatgaaaaactagatgaaagctagagacagaatcataatcaaatgagaagaacctaacgcattaggacatacatcaacttgggtgttatgtgctcttttataagcttccaagatgttattttgacgcttccaaggtccttgaaattgagcacgaggtctcctaccctatttttgaccatgccggagagaatgcccagagtagaagtttcatttgactgatagaaactagcgcaccaggttgattgttaacttgggcgctaggctcaacttttagtcgttaaggattctcgttttcttgccgagtttacttgtatctttaatatttttgatgacaaaaaaatttcccttagggagattctcgttttctccttgagtttacttgtagctttgagaaaatgattggaaatagcccaggttgacaaaatgtcaacttgggtgttgggcctagcaccaggtgtaaacttgggcgctgggtctagtttatagccaccaaatggctctatttgattcccaaaaatacttgtatcttaatctttgatgaaaataatgaatatgcccagaagacttcttaaataactccttgaagctggcctaggttgacaaaatgtcaaccagggcactaggcccaggaccaagtgtcaacctaggtgttggttgccttgttttccctccaagtcgatctgtttctcccgcgaaagtacttgtttcctttttttggatgaagattaaaaaatgctcgagatagtttttcagtttgaagattggaagtgtcctaaatttatactatgtcaacttgggcgctagggtgcctagggcacctagtgctctaggtgctcaaaaataaaagtgctttgaattgattctgattcctcaaatatgtttgtgacgagtctaattcatgtctcagtacaaagtttgacccattttcattaagatagtcccaaaaactgaaacccttgtcaaaatatcaactttggcattgggtgaaaccttaggtgcccaagttgactttcgggatgttgttttgtgtatttttagctttcaagccttggactttgattcttcatatcttcatagcacgtaatactgaaagataatgagttggaaacaatttggggtgatccaaacacccattatagagtttccaaagtcaacctggtcgtagggctagggacccctcccaagtcgactgctatgactcgggattacttaacattaggatattttcttttttgccacgtgtcaaatattaatgttcatgtcaccagggtcagtttctaagcaaacaaattctatctccagtaaaaaaaaaattataattaaactttatgattatattattcaaagaatatgccctagttattctaggacttggattatattgttccaattatgttttaattaaatttttcttatttcattggtttttttagcacatgtttgcatttgtgcttctactataaaattatagagagatgttttcaatcattgcatgatattattggtatttaaaatatcctaactgccattgatcaaattgaaaattttcaactctgcatatatggttcatactgatcaaaaattcaaaagtaaattcctgaaaaagttgtgttcttggcttttgtgattatagtttgaccaactataatttagctcttgtttaaattactgattattagagttataaaattatttaacttttaaagttcttgattattgaataagtacttgtggatttattacgtagggtcggccctatattaatttgggccttaggtaaaaataaaaattggggcccagtgaaaaagtgaggttgttgggatttaaactctcaacctcttagttgttaaactaatcaaattaccattagactacagcacatatttagcattaaaagtattattatttactttactttatgactaattatatttttattttttttttcgaaagtcgggggccctgagtgagtgggggcctaaggcggctgcctccttcgtctcacctcagggtcggccctgctattacggatactaattgcatttgataaaataagtcatagtatttgtttggttgaaaacattttctttaaagttactattgttactagtttgtataatttctttctattcatacttattttgtttatttgtagtgaaaataaaatataaaaatttacaactatttattttttttattttattttatttttaagtaccactaatataaaatttgtttgtgcagttaaaacactcttatccctttcaaacttttaaaaaaagaagaagaagaataagttttttaaagtaaattgggtgacattggatggaaatttattactgtgatttagtaactatgaatgtttttattattagagttttctaccctaatgttttaagattatttgaagttttttgcaagtttattatttcaaatttttaggagtgttgatcatactattttcatggataaataacttgtttagttaaatcataattttgtgtgagatgtataatattatttttgataaacataaaaatgtaaagtatttatttaatgaagatatatatttataattaacctatacgaatttattatatttttaaatgaatttgttcattgctttcaaatatatctattctatataaaatgtggctatataatagaattcttaatttatgagaattattgggtgacttttttaaaaaatatctattcaaaataatagttttttttttaaaagtaataaaatatatatatatataaaataaaattttactatcgtaagctaattcccaacaaatacaaaactaatttccttaataaaactcacttaataaaactcactttaactctcaaaaaataaaatatatatatatatatataaataaaaccttacgatcctaagctaattctcaaaaaaaagttagtccgacgataacctcaataccttaagtcacctctgctcatctcatcacctactattactctctctcacacactatatatatatatatgtatgtataatgtatgtatgtatatatatatatatgcttacactcatcatttatgaatttaggaaaattcaatctcatcatatatatgaatttatttatagctatgttgataaaaatgaaagactaaattaaactctgactgaatttaaactaatatttatttttgttgtgtattctactggtaaatttgttttcaacatttgattattaatctttattgcactttttttcaattttcaaactttgtttctatttttttagatttgttatatatatagtgtatacaataatattatacataaacataaatgtatatatatgatgaagcagcgtttgcagtgcaagaattgcttctagaatcagcgaaaggggattttgcattagtatgctcgtggctagatgataagagagaaacaataatcaagtttattgtgattaaaagggtaattttatcttaaaaaaaagggtaatttaaaatttaaattgagttttgactggtaggtaatattaaaaaaataaaaaatagaagtaaatagtgatttttttttgtggttgatttagtt

SEQ ID NO: 267409 - DNA, 920 bp, Cannabis indica
ggatcctcaaaaggagaattccagcaatttataaggaaccatgtggaatgaactggttaattccatggctaatatgggtatgaatgtaatacaaaaggaggtgattagtgaataaagtccaatttctacaaaggcagatagaaagaagaccagagaactaaagaattttgtttttaatgtaaactaaataaagaaaagtggaattgagggaccaatagtagcttaatgaagatactaaactggaatgtcagaggtagtggatcaaagggtaaaggaaagacaattaagtccacaatatgtaagataaatccagatgtggtgattcttcaggaaagttaaaaaagagtctgtagataggagacttttaggaagcatctatagatctcgtttcaaagcttggatcctcccagcttttggaagataagggggtactctaatgatgcgggatactacaattattaatatcttggattcattgattgaaggtttttccataacaattttgattgaagtagaaggcaataatccatggtggtttattggggtttacaattcagaattttgggacgaactagctcgtttgagctcaatttgtggtgaatcttggtgtatacggggggatttcaatctagtgggaaggttgcaagagaaattaaatagtagctcttgcacaaggaatatgtaagtgtttaatgagttgattaaggaattaagattgattgatccaaagcttaataatgagaggtttacttggtccaattttagggagcaacctatctattgtagaatggacatatttttgtgcaccaataacagggcaatctcttaccccttttgtgagacaagaggctcatgtaagacttgtgtccaatcatagtgcggtggtgattaattactgtccttgtctttctcgatttgac

SEQ ID NO: 267410 - DNA, 893 bp, Cannabis indica
gcatatataatagtatagatagagaagaacataaaaataaaagtggaataaaaacttgcattattcaaataaatattacaacatgaaaatcaaagatacaaagtaacctcactttgcatatagaatcatccctaacctttcgaagaagattatgccattatgctcatcattctctcaaaaattatagaaagaaatatgagaagaaaagtgagaagagattttgctatattgtctttactctaaaaattacacactttaacaaagaaaatgagctcctatttattgggtgggtctcaagaaaataaaattatccggcgttttattaaaatttatgtagtatatttaaaaattactaaaaatatgtatatttttaaagttaaaatatttgtttttggacccttgggttgagtgggccctagacgcagacccagtcaaccttagtccaggccccgactctacctttttatagagtctccagaaggattaaaatgcataatataaataaaattgggttacaaaataaataataaaaataaaaatctgcttcgtgacatgattaatattattatcgttatctttaatcttgtggtatttaggagggtttggtgggttttgtgataattttgtggtccatttagtgttgtttctgaaatttgggcttcaaaagatgttgagtgtgctcaagcccaaaagaactttgattggatcacacatgtggtaggtgaaagaagaagatgggagagcagccaatagacaagtgccacacgtgcgagctgagaagggaagaagatgggccacttaggtgctgatgtagctcctagagcaaatggagaggcgccatttggcgtcttgatgtggcatcaatagttagggctgaaggagagggagaagat

SEQ ID NO: 267411 - DNA, 718 bp, Cannabis indica
ttccatgtccagaaaaagcaattgctttgctgatgtcacattcatcattattacatttgaatttcagaattctaacaaaagttgtataatggataaacaaaaaaaaaacagttgcatgttcttttttaccatctaaagtttgggcatcaatggcgataaattctacttttcctgctgtaaatttgtagtttctctttccaaattcgtgttcataccgctttgcaacctgattagaagtagagcaaggagtataattaacaaagacaatgagattgcatacatgtcaaataatcacttcaagttcctaattatgagatcaccaaatttcacaatacatgtggcactaaagacccaaggatagtttgaaaaacatgattgtatgtagaaataagatgcttaattacctctggactatgagtgaagatactctcatagccaatgtcatggtttccaggtatgaagtagaccttgacatctctatgctttccttgcttatccagataaaaaatgtgcttaaaacggcttaaagattcctgccatctaatcaaacaaatgttaatggctaatttatatcgtgaatgtagaagaaattccattagaaaggttttcaataaagtgaacctgtagtaccaaacattttcaagtgatgtttgaaaagtagagtaggatttgataactttttcataagagttttgataattctattatcattagagag

SEQ ID NO: 267412 - DNA, 951 bp, Cannabis indica
taaaataaattccaacaaatggtcctttttctaaatattaatatctaatatttttaaataaatattattatagaaaataaaaagtttttattgcatgcagttaaatgtatcataaaagtatatatcttacaccataataaccaaacgatgtaaaatcaatagttaaaaaaaataccctaccagtagaaaacttttactaaatcctaccataattttgctctatatatatataataacatctttaaacaattcagtggaaaaatcttataaataataaaatttaagagcaaaatacatattgattatattgtttttaataaatacagtcggaacttcagccaaaaaaaaaaaaaaatacattcggaaaagcacaagatccagaaatccgaaaggaataaaaaatgtcaaactattaacaaaagaatgaccttcggcagtttggggagagaaacagggttttcctaatggaaaatgatttcttttttggagtgatcaacaattaaaactataacgtctaagataacgcaatttcatcaaaaacaacaaaagaaacaaacaaacaaaacaaatttaaaactgatttcctatatcaaaaaaaaaaaactaaaaaaactggagattcagatttaagacctctagttcccacattttcattcagaaatgatacaatcttttcgattttagtttgattccaacacatttccaatgtagctccccaaacagattttgtacacgtccttgtggtaatccaaagatcataacgcagaattctacagtacatacatttcccagatctcttgatctgaggcttcaaaatggtgaactacgaagcttacattcttcacgatgagtacaacactccttcagatcggctaggtacgagtgggcattcagtaatgcaaactaaacgctgaatgcagtcagatatgcaacaaaataagaaaggtcgtc

SEQ ID NO: 267413 - DNA, 1391 bp, Cannabis indica
attgatttcaaaagggctcctttctaagttatctaattgaaactggaaataagttgcaatggatgagaaaataaatgaataataacgagtttttgtaaaatcataatttgatgtacacaagctcaaaagataacatattgatttattctctaaaaaatatgattaatattttatgttaatcttagccaattaattaaataactaattaatattagtatcaaatagaaagtttgtacatgtttataccttctttcaccgaaagaaatagtataaatatatatatttatatacatccaatctgattcgattcaattagtaattactctaggcgaatataaattaggaaaaaaaataaaaatgtcatagctacatattgaaatcaaatgaaaaaaaaaacaccacataattttatttacctgaaatagagactgagacgacgatttattggattgctctttacctgaaaaaaaaaataatatatatatatataataaaataaaattaataatccattaataataataaaaatcgagtagaaaacaagaatatatctgtcaaccaagaataattgtattattatggtaaatttatcttatatgtctatatgatatacccgaatttattttattctaaaaaaaatttagtttaattttgttttattatattgtactaggaatgtaaaataaagattagaacttctgtaacctgttgttgatgaatggattcatggtctgaggttagttgacggagaaatagagccggtaactattaggtgaattccgagatcaaatcggtgtctttattttgtgtttatttttctgggattagtgtttctggtaaaacagaattagaaaaatcttagaaccctaccctaaattttgtttcggctgtagcaagaagaagataagcaaaaaaaaaaaaaaatttagtagagatagtggctgccgtgtatattagaaagtatatagcttttatattagggttataatattgagaaatttgtatgggccatcttattttggtaattatttttaaaaataactttgtttttgttatgttaagtttttgtatatataattgtcgtttttttggttaattttttatttttagaattaacagttgtgtttatgtttgcaggtaattgtggaggagatgatgacgtgtcacgtcattttgtgtgtgatatattattaacgttatttttgtaaaaacttacctaatatagtatattcctaaaaaaatccctataatatattagttgggctgctattatgtttgggcccaattactcttgtgagaaaagagttgtgttgaggaaattacactctataccttttttatattgtcttcttttatttttaccttcttttttaaaatctatcatttttacc

SEQ ID NO: 267414 - DNA, 1750 bp, Cannabis indica
  modified_base (164)..(164): a, c, t, g, unknown or other
ggcaatagagcgagagggagatcatgagagagggagatgaattttcatggtgataatggcagattaaagtaggaagaagataggaagaagaagagggtactgttgttggttccagtcaagaaaagaaaaagaaaaggaaaaaaaaaagaaaaagaaaaaggaanagaaagaaaataagaaataaataatttatttattttataattttaattattttataatttttaattttaaattacttaaaaaaataaaagaaaaaagtaaaaaaaatgttattttttttaatttttttttctgattttattttttttaaaatatttataatgatttttaatttttttaaaatatttataatttttttttaaaattaatattacgtggaccactaaaaaattgccacgtgtataagtgtgtacacgtggatagtccaccgtggcacttaactgagatttttggacggaggtgtacagagcaaaacggaatgggagtttaggtagtttagccgccaaaaattcggtttatgtggttaagtgttacaaaccgtaaagttcgggtggtttagccgccaatatcccaagttaaaaatgacaatcactcgctgccctgccaaagcaaatggactccaactagctatcaaacccgtgataatatacaataaagttaaacggtagattgttgtctccccacaacacaattaattaccgtaaaagtcccagaaattcgtaaaacctatttttgttggtaaaactcgccaactgtttacctcttttattcgtttttgactgttagaacactcttacttcctattaacagtgtcaaatcggatttcgacacagtacacgattacgaacacgaattagatgcgagtcgaaaacaaattaatataaaataaaaacgagccaaagatgacacgatacgcttaacactatgatttttttaaatataatataataaatattattaataataatataattatatataaatatatatttagtgattcaaagtaagttaaaaatttaaatttaattttgtttagtatgaaattaaaaatattttaaaatttttaattttattattatatataacaaattatatataaatgtacataagttttttaataaaatctaaatctattatttttctctacaactctagcttcaataatagcaaaacggatcacagtgggtcgacacgaacacaacacgattttttacaggtcaggttaggattgagaaaattagacacgggtcaaaaacgggtcgacacgcctgacacaaaatatagaagcgaattacataaaatataatacgaacacgacacgatgacacattttgccacccctactcccaacacttcttttacatgtctattttctctaaaaatttgaagaaaaaagcaaataactcctttaaatatttattttctctaaaaatttgaagaaagaagcattaaaactcattgcgatagatactctaaagtgttctttattttaaagcattagaaggtttagagcatctctagatattttttttaattattttttattctttctctctccaaataaaatatgttttatttttattttctctttctatgatttattttatattattttaattaatcaaaatattataattaaattatttagagaaagcaaaataaagaagcactgtgtacttaaaattttgatgtaaaatatataattttgagtttttatgatatattttgaaggatagagtagaagagt

SEQ ID NO: 267415 - DNA, 2180 bp, Cannabis indica
tcctttctctcaagatggactcaatttttctttcctcaatagccataacctgtcatcaaaatccaaacattagtaaccattttacatatatacatacaacttttagcattttccaaaaacacaccctccaatcaattacactatgtttggttagagggaaggaaattaagaagatggaagggaagaataacaagtctccttagaaggatggaaagataattatttgtgaaaattactatattatcctcttcaaatatatattatttatttcttatgaagggtatttaggacatttaatacttatttttgtccttttctccctttccttccacttttggaaagattggattttttgtacatttagagggaaaatgtatccttccactcaaaaaaccttcctaccaaacataatatattattaaagttgatttttcttttcaagtatttaccaatcatgtgcagatttaaccttttcaagactcaaaaacaacaaacaaaaccatacagagatattcacattttgtttttatagcatattattaaaaatgggatctttatttggtattattctaaattagttaatttcccatttggatgcaatttgtttttagtgtgaaaagctacaaacctgaattgtccatggggttgcctgcaggcactggttcaggctccttaatctccacaaccacacagtcagacatcaagaatgtttttgccaccgacgaggcatgttctaaacaacacctcaccacctgaaaacaatcaattagaaaatagaaaacacaaagctaagaactttcccataattttacactcacaaccaagtttttccataattcacactaaaaccaaccttggttgggtcaataattccagcagccatcaaatcttcgtactttcctgtggcagcgttgtatccgaatttgaaattgtcggtggaaagcacctgaagaaagagtacaaatgctttaattcatcacccataagaaaaagattaaaactttgatataatatcggttgatgatgcataccttctcgctgaccacgctaccgttaacaccagcattcttggcgatcaatttcaatgggtagctcaaagctctcttgacaatatcggctccaacctaaaatttatacaaaggtgagtttcgactttcaacataaaaaattccctttctaattgaaaaaacacgtaacctttcctcgtcatttgttaggctctctctaattgcatccacctttgatgccaatctcaacagggtgcactccaccacctacaacgataccttcctcaacagcggcctgaaaataaaagaacaaactttcaagctctactcgtctcaagtgaatgaatacaaggaaaatagaatgtttgcgagaaattaaattacctttgttgcattaagggcatcttcaactctcaacttcttttctttgagctctgtctcagtttgtgcaccaaccttaataacattcaaaagattaggtcacaccgaaaccaggaataaaataatcgataacacccttaagccttaacacgactctaatgtttacctgaatcacagcaacaccgccggacagttttgcaattctctcgttaagcttctccttttcgtagtcctgctctgcagcctgcgataaagtacaacaaatttaagctaccgaaactaacaaagctttcacattgataatttgtataacacattaaaaaatttacctcaataagattcttaatctgtgcaactcgcttgttaactgcatcttgggtacttccatcaccaacgattgtggtggtgtccttggttagcaccaccttcgaagcatgaccgaggacctcattgcctactttgtccaaactgagtcccacctcttctctgatcacagttcctacacaaaacgagaaaaagacaactatcataagctttgttataaataggcaagtaagtaatgtgacaaattagaagttaactaacctccggtcaaaatagcaatatcgtcaaggtattggctcttgcgatctccgaaaccaggagctttaagtgcagcaatcttcaatgcccctctaagcttgttcacaacaagagtagccaatgcttcttgttcaatatcttccgaaataatcagaattgggtatccacccctgatggcttcctccaaaaacattgataagatcccttgca

SEQ ID NO: 267416 - DNA, 1701 bp, Cannabis indica
tatatgtatatatatatatataataaattttttaaaaaatatatggtgcattttgtatagatgcacactgcttgtttgtataacttagttatttaagatatactattaaattttttaaaaataccaaaaaaaaaaaaaattaacacactaaataataaaattcaaagcatttatttatatgaatatgggattaattaattaaaaatatcattattggttgaaatgggatatgaatattcaacatagtaaatagtttttgttttattgaaatggatgataataaatagttacataattcagattttcatttttaaaattacatttttttgaaaacacgattgtcaaattatcaccaaccaatatttttataaataaatcaatgacaaatataaaaataattgtacttatattaataaaagtaaataaattacaatttacataaaatatgaaaatatgccaaacaatctaacaaaatttttaaaataactgcaagtctgcaacatacttaataatgtaaaaaattagattaaatgttatatgttgaaacaagtagaagaatagtttattagaggtctactaaaatattctatatttataaaaatagaataagaagaaacattttcgttttgaaagcgaaccacttgcctggttcgtgggttcataatccgaagctgagcctcggggacatcaccaattttaacggctctgatttatagtctccataattcacctctttcattctctctctctcaaacatccgcggccatcattcgtcgtcgtcttcggattctgatgttgaagccaagatttttcaggctcttcggtagagaaaagccagtccgcaaggtcttcagtattgactttttgctggtttgaaatacgaatcgacttattgtattcatatctagttagttagtgtgtttgaaacaatttatttgatggcgtttatcgcagcatgatgtactaggaataagatgtatgtacatgttttaaatttactatgtatgtcctacagattgttgagggctggttttcacctatagatttttggagaaaaggagggaaaagcttccatcaatcttcaggtaccaaaaataaactaaaattttgcattgatttccacctaaagaaatcgacatagataatgggagcatgcataataataatatggacccgataaagtttagtgggatcgtttggggtttctccaaggatgggatttaaagtaaagggcttttgggtgagtttaaactcgttaatgggatcatttggggtttctccaaggatgggatttgaagggctttcgggtggtgagacagctacaatacaaacttcgactcctgaatggaagtggagaaagaaagattggagcgagtgttgggttggattttggagataatattaataagaagaagagcaaatactctgctttgaataccagtttggggcctataatatggcctatactctgctttgatggaggtaaaaagcttccaactttttcttttctcactgtttttacaaactaaattttgcttttttttttttttttatatatatataaagaagcatggagaataaatgttcttagtgttgtaaatatagatatgttcaaaatcatatcacttaattgtactgtgtagattataagtacatgaaaaatcaaaaaaaatctaaacagtaaaatcttccctaaaaaat

SEQ ID NO: 267417 - DNA, 784 bp, Cannabis indica
ttttttctaacctattcttttatcaatcccaatttaaaaaatacacctctattattgttatttatttctgtcaaaccttctgttgcatttaataaaaaattaactaaatattttctttatttaatcagattttttattattatgtcaaaccgttatttttttcatcatcttatatatatgtacatatatttttatctagtttttctcaaatatcaaaaatcaaaattgtttatgagtgaaaaaaattaatcatttgtgctattgtaaattacatatttttaattttcaatttttttaaaaaaataaattgaagtatagtatcgttaatattaataattgctgaaaaaactatttgatatttgtcaagagttcatgttcatattatatttcgctcaaaagatatattttataaattaataacaattttaataaattagtttgagtgttttggtgcttaattttgttaaatatattcgtaacatgataatatttgaaaatattatttataattatacttttttcgtgaggatctaatttttaaaattagaacagcctccaaaatatttaaaatgttaatgtttagtcgtgtaatataataataataataataaaattataagaatatatacatgcatttccaactaccaagcaatcgagtccctgggttcgagtctcaggtaaaatatattgtaatatataaacgcttaaatcaaaaaaaaaaaaaaaaaaaaaaaaaacttaaccaagcaatcgaaatatggtcaaaataaacaaataaaaataa

SEQ ID NO: 267418 - DNA, 1420 bp, Cannabis indica
atacttttggtattcactttaagagttaaatctctacaaatttaaattagtagccataatcatatagaaaaacgatcaaactgtaacataaaaaaaatagattggtgaaatgtgtttttttattattagaatatgataaaattttaaaagaaaaagtaatagaaattagaaatattaaataaataccaaattgtaccttttgtccaaaaggaaaaacaaatgatacttaaaataattgcttcacctttttagtggtagtcaaaaaaaaaaaaaaaaaaagttaatataaggtaatatgagtaataatatattttttttgttataacaaaaagaagatgttatctaataataaattttatgatttggttatatcatctttttgtaaacatatatatatattattatttttttatatgtataaatgtgtaaagtcccgtttaattaatatacggtaattaggactctcaaatgcagccagctgatgaatagtttttacttgggactcccaagcactttaggccgaaacaaatcagctgctttgggattcttaaaagaaatgatccataaacgtttacaaagtagggatgaaaagttcctctggaaggccgggaaagaggtattattgaaagctgttgctcagttgcttcctagttataccatgaatgtcttcctccttcctttggagatcactcgggatatggaaagcatgatggcgaagttttggtggcaaatatctaattcctctcaacgatgtatttattggttgtcttggaatcgactatgtaaacacaagaatggaggtggaatgggatttcgggaccttcaggattttaatttggctattttgggcaaacaagggtggagactccttactaggctagattcgcttgctgcccatgtttttaaagctcggtatttcccaaatggtacttttctcaatgcttcccttggaaataactcgagttttgtttggagaattattttagaagctcaacatttgattcgagaaggagtgcactggtgtgtgggtaatggtgaagacattaatattcttgacgaaccttggttgcctattaaggagaatccgtatgtttcttccctacatcctgctttgtttaatgttagagtttctaatttgctatgtgttgatggttctagttgagataaggaaaccatccttgatttgtttgagaaaagagatcaaagaattatttctaatatccctattcaaatgactaacactaccgaccactatatatgatcattagaaatgtctggcttgtactcggttaagagtgcatactctcttctccaaaaaaatcgtggtcgatggtatgacaacgaggatgctaatttttggaaaaaaaaatgtgggatgaaagctcctcccaaaagtaaaaaatttgtgttggcgtgcagc

SEQ ID NO: 267419 - DNA, 528 bp, Cannabis indica
taataattatataatttgaaatttttaattataacattaagaggcctgacgttctcagttatattgtatcccaaaatagtaatctgtcttgtgcgtcgtaccctcaaaaatgataatgaaattgttgtcacaataattatatataaatatttatatattcatgaattcatcatatgaaattaattatctttttacattaatatacaatcaatcagagactagagtagtacacacactagttaattaattaattagtgctattttgctttagtaaccaataactgggatttgttgactggcgaattggccagtactagcagtgtgggctgaaaatggtgatgatgagtaagagaaggaagtagtgtcaatcgatttaagcaaagcattctctaaatcttgggccacacctcgtctgatgagtttaaccacatactccataaacactgcatcacaaggcaattttataggaccatcgcttgataatccaaactcctcttctgacatcttgaacagctctctcaatatgtt

SEQ ID NO: 267420 - DNA, 1184 bp, Cannabis indica
aattggtaacttttacaaaacagaaggtccaaaatagtatttacccatacatttatgatagattctgatgtgagcgccaaacttaaaccaaaggctttctcttcatttttttattcttatatttttcattaaaaagaaatgaagagaggctttacttagctaagtgatgatattaatgtgtttcaattattgtaacatataatgattattattatttttttcaaaaaatataggactaaacggtgcgagaaatatgaagatattataaaattataatatcttcataaggataaaataataatcaagttaataatatattaaagtaaggaaaattgtccaaataaaaatgttcagatcaagttactaatatattataaaatttcataaaaattcatgcatgacaactaaacatactatcacaaaataaataaaaattaaatcgggccttatagaggtggggagtatcgtctccatccctaacacgtttaacattcaagaatgaattattatcactatctttctttcgctctctatttaggcgggaaattcccatcccactaagggcaagtaacaagtataggtatcgggataactgaaaaggaattgttaaaagaaatcaacaataatgcctactaatagtatcttattctagttgatttattgtgtccaatatcaggagtcgtcaatttttcatcatttggtcagttgtacatttgtaaaagcctcagtctagtgtcattgtaggaagtcatgtggtgggaggtgattttcatggttggtttggctcagattttgcagtagtattcttttggtgtgagagaagaagctgcgattgtgattctacagtgagagtgattctatcagctagagtggtcattaatcaatggcaagctgcttaattaaagaaaaatgggtccttgtttattcttatggaatgggtgatagactagagcaatagataaaccgatgttgaaaaacattaaggaaaagttgatggatcaatctttgattcaaaaggttggtatggggctgatggggtggctcgagattgttcaaggcgtttttttggaggcttattttgctatgcgttggctgagatttttggtatcaaagaggttttaaattggatcaaacgaaaggagtgggtagatgttcagctggagatcgtttgtctagtggctatt

SEQ ID NO: 267421 - DNA, 801 bp, Cannabis indica
aaaaaaaaaatactattttcctgaaagatatgacaataaataaagcacataggaaggaaattttctccaaacattctggcaagagtgagtcatgtgagtgacgttacttactaatactgattattcaaattatttattattttttttttgtaaggactgattatttaatattaaattttacaaaaggaaaatggaatatggggtttatttttttaaggcaatattttcattacgtaagcttgtcttaactcttaacaatgattttttttaagtttgtcttaacaaataacaatcatttatttatttcttttgaataaacaatggttcttatttttgaacacgattacacatcgataatttatatataatatataaggaacactatttgataagattacccattagttactaaatgaatttagttaaaaatattaattttaaaaatattaaacaataaaaatttgatcaataataaataataaaagaaaattttaaaattttctattaatttaactacttaattaaaaatatgttcgtataaaaatacctcagcaacttatatggtataaaataaaaaataagagatttttttttaaaaaaaattaaacataaaattaattttttttaattttagttgtaatatatgcgccaaaattattaattggatcatttatttgtttaaataataaaatacaccttatattttccaaaatagtaaaaataagaaacatgagctcaattttcaataattttattttttaattataactaactttaagacaattacaaaaatataaccag

SEQ ID NO: 267422 - DNA, 862 bp, Cannabis indica
tctcgtgcgggtttcgagtcgtgctatcgtgtctaccctcgactaggtgagccctaggcacatgcctatcccacctatgcccaggggcgagcatgtgtgagactctctaacgtccaccctcaagatggtgactattttttactcaccaatcttggatgactcgatcacaagtgacacttttgacttaccaaatcacaagcaactccttcttggctcgtctttttagaccgtcaacactttttagctcactatccctaaaccacaaacaactcttttggcttacatttttagaccaattattgaatttgaatcggataatactcattaaagtttatttggctctgataccatgttagactttggaagtgttgtgaacaaatctataataggctgagtatatggtaagattcgtgaggttctatttcaatactaattggcaatggtaggaataacccatacatcttatatatagtattatatttatagacaataacaatatgagactctctaacacactaaacctatcaagcttatccctagcctcccactcatctattatcaagcttttattgagtttttattgaactaaaactcccataatacactacaataagaaaacacaccaatttaggtgaagatgttaaaaaatcaataaacccaagatataaatttgtatataacttaaaatataataataatatataataattatgtatgtatatttgattaatctatagcaagtacctcgatttgatagtgcaatactatcaactaagtctttctcccagtatctttaaattagaagtaattttattatttgattatttgaagtctacaattgtgatgagacaatatgtattta

SEQ ID NO: 267423 - DNA, 1542 bp, Cannabis indica
agaaagggagatcaagagagggaaggaagacgacaagagagcagggcgatggtgcggaggcgtgggtgagattttggagggaaaattttcgttttagggtgtgggaaatggagaagaaataggtggacatgtgagaaatagaaaaaaagtaggtggtcacgtagaaaatgtggcgagaagtaggtgatgattttttaatacacccttatgggcgacggtttaaaaccgtcgcctatactattttttagtgacggtccccgaaaaaatcatttttaggacggtcgcgaattctaatatttgtagtagtgatagtgtagattgtcgaatgaacactcttatatatagtacgcccattcattatacattgatcataattgaagtaataatttgtaaattatctcattcttttgcacatgatattgtcatattatagagtactatgttgtctcaattcataattgaagtaataatttgtaaattgtgtcattattttgtacatattatcgtattgtagtactatgaattcataattgaagcaataattcacctattaaattgagagaaatttattgccgagagagagaaagacatctcactttttaagacattataaaagcaatttaatatataacatttcatcgtgaatagcaacatataaatttgtagagaaagagatggggaaaagcaaagtgttgatagtaggaggaactggttacttggggaagaggctagtgaaggcaagtttagaagagggtcatgagacctatgtggttcacaggccggagacgaatgttgatattgagagagttcaaatgcttttgtcgttcaaggagaaaggagcaacactagtctctgcttctttcaatgaccatcaaagcctcgtcaacgctgttaaacttgtcgatgttgtcatttgcgccatttcgggtgttcatgttcgaagccaccatattcttcttcaactcaagcttgtggatgctatcaaacaagctggaaatgttaaggtacgtagctagtgattatgtatgtattatcccgccaatatatagttgtgttgtgagagaaaaactgtaaaaattgtagtggttgacaaactataaggataatttcaaaaaaatacaaaaacaataaaaaagaaataaactttatactcactgttttttttttcctattttaatttttacctttattttattactcgttaatttatacctaattttatagctcataatttcattatgtgcgttaggaactttattttaacaagttatgtgagtttatgtttggtactttgattataaaagagggtatttaccaagtaaaatgattttacagttatatttggttaatgtgtaataaaaaaaagatagttctcaacttatcctgttgtgatattttgcacacgcaagtgcacgtatcatttacaagtaatagactcaccaagagtgaggtcgatatcccacaaggattgtagttaagaacgttaaaattaaacttttacttctatttggttaaataaaaattaagaataggttaaaacta

SEQ ID NO: 267424 - DNA, 1360 bp, Cannabis indica
gcctcgtgacgtgttgaatctatggtttattcccgaggtggcggagaaactgggaaagttcagattcctgggaggtctctctaagaatgtcctggtttggagagattcgcttgatgggcgtttctcggtaaaatgtgcgtatcgtgcgttgatcaagggcagactcccgatccttaatggaatttggaagaagatttggggagccccggtgcatttccgcaccaaattgttcctttggaaagttgctcgaaacatccttccctgtggccaaaaactccatgatgttctgggttctgcttcttgttgtgttctctgtggtgccgaggaggattctttactgcatctcttcttacactgtggtgtggctcgccattgctggttgggaagcccatggggcatccgaagtgacttgctctcctttagttcccctctggagatggttcattggttctttgacccaggtatatctgaacccgactcatcctttaactcttctctgttcctctggtttgctttgtttttgtgtggggccttgtggcaagcccgtaacaaggctttccatgagggaatcccggcttgtccttcggctatcctcattcaggttcagcgattggtggcgggggcgggtgagtcgggtttgggtaataccgttcagcctcccattggtgatgtggtccatcaacatggggtagtcttacctgcccatgagtttacggtctattgtgatgcggctgtccgtgggggcacgggtttttttgcggtggtggcatttgatagcgagaacactttggtggctgcgttttcggctaaagccccggtgtcttcccctctcgaagccgagacgttggccctccaccatgctgtctccttctgctctctgcgtggctgggatactgctgtggtgttttcgaattgccaagtcctcgttgatgcggttaacaagcgggtggtgccggattggaagctcacccatgtgttcctctctctgttttcggaagtttctttgggggtgtgtgctggggtgttttggattccccgtaggaataacgaggtggctcaccgccttgctgcgcgggcggccaccttggatgtttgtcgtgtgtttggtgttggggaggttgcacccctgttgcagccatgaactgattcttgtttgtttcttggcttttgccttttgttttaatgaagttttttcccagccgaaaaaaaaaaaaaaaaatgtcaccctgctgtgcctacattacactttttacattactgtgtaaataccattgacacgatcatgggttaattatattatatattacttttatttgaaaccgaaataagtgtagatatacgtccaattaatttcatccta

SEQ ID NO: 267425 - DNA, 1277 bp, Cannabis indica
ttcttattcttaattgtatgaacattgttacaaaaaacaaacttaggaaaataaaaaaaaatggatgtgcttcaatttgagcatgacccatcattatatatactctattctatatataattataagaaattaaaacttacctttttatgcattaaaactgaccttttatgcattaaaaaatgtgtttgtattatagaaatgcattaaagaaaaagcggaagttgagttgagttggttcttgtccaatatggtatgaagtaataatacatatatcggcttgtgatctctaactgtttgataaaaggattttgttcaggatattcttaattgccctaacaaactccattaagaggaagaagaaccatgaatccatttttgagtctactcagacgataaggtaacaaagcttaaaacaaacacatgttgttgttgttataatgattgtttgttttattcaaatcttatattgttataatattatgctacaaacacacactgaacaccatagaacagactaaaatcttccttttaaactgtgcctttcattgtagagtcgatcataagaagagacgaaggtcacatgtccatgagtggcctcttcccaagtttattcacagccctcacttatggccgaggaaaaccgtgattatagaaaattacacaaaaacgatgtaaaggaaacatctcaaacaacatgaatgatagaagaaaaaccagacgatactaaacacataaaccaaacaaacaaaacaagtctaaaccaaccacgaatactataacaaaccaaattacaatctaacacaaacattgcatgtttcatgttgtggaagctatctttttgctgccttcctaaaaaacctccctgcattagagatagattgaaggtgaaaatcatgatctggcataagtggttaaccattcattgaaaaatatgtatataaagctttaaattttaataaaatatcatcacacattcattgaaaaataaagaaagaaagcacagtctgaattccatatatatagagaaagttgtggggttctctattagtatcataacacgtatttacagacatgtcaatgattacactaacacgacttaactcaacgtgtgtactaagaattcatttcatgtttgtattgttataatatatggtcagtggtagtcattgttttcatatatgatagacatgttaagaatttctattggttgttgaatacatgcatattttggacaactctttgatgttatgtgtgcacacttgttgatgcgagccagt

SEQ ID NO: 267426 - DNA, 534 bp, Cannabis indica
aaaaaatatatggcacatggacttctcatctcaggccctttcctcataaagtacgtatgtgctttgtatttgtagcacatggatttcatttctttcccttttttaagaaaacatttttttaaagaaaaaaaaaagtttacaaaaatatcatttatcattaccctactcaagtgaaacactttattatattgaatattctccacatatttgaaaaaaggtttttgatgataaaattatcatccttaaaatatataaaaaaaataaaaaaaataaaccgataattcacatccacaaccttttttaagttaatttattcttggaattcttttgcacatacacactcacaaaattcatgtttatacatattatcggatgaatgaagtaatggcataattgccaaattttaggtaaatgtaggggtgttcataaataacgaatccaatccaattcgcacgacccaatctaattcaatccgcacaagtgcggagaaaattaaaaattacgcacttgtgcgaattggatcctgattgatat

SEQ ID NO: 267427 - DNA, 551 bp, Cannabis indica
aataaataattaatctatattattaaggtgggaaaactaaataccatatataaaattaatgacctatattcttctcattatcaattaattttaaaataaaattcatgcactttacccacactcaaaaattttaacaatttatgtgttgtcttctcacagcacaaaaaaaaaaatatttattaagactagaataaatatgaataaaataataatatacacgtatatttttttttagagaaagtcaaaagtcaactgtaaggtaatttaaaagtacttttgagcaagcaccaccaattattacagctgctaataaaaaaataacatcattcataataggtctgtaaaacttaaacattattatatgtggaatatatattttgatatatatatttataaattgtgttttaagtactaccgattcattgttctaagttcttctatgcaaatcgataccccctatgaaatggagtcatgtaatgagaatacctaattaaatttctaattctaaatacaattaataattattataattaataatgttcaaaagctaa

SEQ ID NO: 267428 - DNA, 817 bp, Cannabis indica
aatgccaatgtggcatgagttgctgacaaggatcgtgccacgtaagccatttttgcctttaaacggagaccaaagtgacggaatagtgcggaccaaaacggaagtggggttcaggtagtttagccgccaaaatttgagttttggtggttaactgtcacaaacccaaaagtttggggggtttagccgccaatatcccttataattaaaagggcatttaatagctttaaggtacctaaaatccagtttgttgatattaaacatacatgagagtaactttaataatgcacatacatgctctcgcaattcattattagactgttatttatgtgttgattgagatttttgacactattaattagagatgtgtgaagcaataaatgagtattcgagaagagaatttttacgtagttggggaattaataaattttaatccacgagtcactgttattaataggagtatttattgcagagaattttctaatcccttttcctatgcttcattggggtatttattggttcgtaatagtggtaaaaggtcactattgttgtgtttgtatgaaccatgatttgcacaatttctcaaatttgatcttagggcatgattgtctactttttcatgttgtatttgggctggttataggtgtttggtgagatttaatttgtctcttgttcgtgatttgataatttattatagccgtcaatcgatgtatggggcatcatgaaatcaaataattatggatttaaaccctcgagcacgtctgtgcaaagtatggtgttaaatgttctttctcatactgcattaaatgcgtatataatg

SEQ ID NO: 267429 - DNA, 715 bp, Cannabis indica
gcagagattaaccgcctggaaaactcccatctctcgacccgtaatcgagagtgggcggttcgagaagagaaccgtcattttcttggagcaacgagggcagttcacttcagccctgatgttatcgtactctcctccgccatcgccattgccatcgaatgtcggaccgtcgcaattgtggcggaggatgtgggaaaaaggttgttgtattcggagtgcacttgtagtggcggtgatgagagtgtggggtataggacgatggcggaagaagaaaccagcggcggctgtgactgtgcgtggcagagaggatctgctcaatctgatgaaggacagcatctgtttcgagctgcgtttgtggccgttgcgttgagggtttaggtatgttgtttttccatggaaatggaggtttaggtacagaatacagatacctctctagcagtggaggccgatagtctaatttgaaaataaacttcaccacagtccactgcactcgctcactgtttgtcacagtgacacaaaccgctagcaccacgccacacccacaaaaatgtgctttgaaattttgtttggtgcggttgcagttagtttgtgtttttgccaaaccatagagtgttgtgcagtagaatttagggcagtttggtatagctgttgtgtccgaaaaaagcagttgtagctgtgttatgagaaaaaaacagttacaatagaactgttaaaaaaa

SEQ ID NO: 267430 - DNA, 1138 bp, Cannabis indica
taaaatcctggtaaaataatttccaacacaaccccatttttatagtgaaaataaaatcaagctagcatttcaaggccgcgaccttacaagcaatttcccattttctttgctgatttttgcagtttctcatttcagtttcctactacgatgactgatagtattttggtcataactctcttgatatagctcagaattagatgattcaagatattttggaaatatgaaagagagatctaaaactttaatgtagaaaattcttcttagaaatgaatagatcatagtcaaaaattgacttgaagcttcagactatattttcagtcacaaataaagcatgttcaacatccaaaacatagaattttttaatttatttttgaaaagtgatcactcttgactctagaccacaaaattatgaattaaaaaatatttaattgagacaacaggaaatccaagtatccattattggatttccttttattccttacaatttcctattttcgtctcaaaaaggctttaaaaagaccaaaataaccaaaattgaagatctctaaatatttttcttgaaaaacaaataaaaaaaccaaacataaatctacacaataaaataataaaaatactaaaacacgcactaaattagtctataaaaactgcataaaaataaacctagaaactagccctctttagggggccattcgatgaagtcgtctaacacgttattgggtaaaccggagagatcgatttttccagaggtgtctcttagtcttgtccatttggcacatagtgagcgatgaagttttgttgggaatattttaccaggatctaaatttactaacaagtatgttgaattaacaatgaaaataaacacataagggtttaagaaaaccttacattggttgcagcggaatataataactctttccgttcaagatctctagcccttgattcatttctgtagtagagcattatcaatatttgaacctagatctctttctctcctttgggtttggttaccaccatcttactcactatgattgagtacttgacttgctatgtgtgggcatgacactcaccactcaaggttcgaacaggtgaagaacaatgaggaaggttttaaatcattaaggaaggaactctctcatct

SEQ ID NO: 267431 - DNA, 1862 bp, Cannabis indica
atatacatatatatattttaataaataaaaaattctttcaattttatttttggttttttagtttttattttttgtttccaggtcagaagttgaatctgtttaggaaggcttttcgtttgtggttgatgttgggttttgttcgtccgaatctttgggtgcgatgatcgtgaggcaatatacactgtgattttgagatttgagattttgcattcaggagtttgggctttgcttctctacttcttctgcgtcctttaccacccaagatacaataattgatttggggaaatgggaacccttacgaaagaagaaagtagttatgcgagttggctatgttggtaccgattacaaagattcatttcatatcctatgaaattatcaattggttcctaatattttgccaactctctaatagcttttcattttgtttatataattattttcaggcttacaaatgcaacgagacgagcattcattatccagtaagcttaattccatttcgtgagattgatgcattgttcgttattgttttttttgttgctacaattgtggtgtctttattggggggaaagtatggtgtttgtatatgttttttgtattgaccaaagtcatataattcattcagcttaagattggtggattggggtcttgctaaacaagcattagaattttgaaatgtagctatagaaaaagaactggaaattgccatttttaaggccggtggtattcgagatagtaattatggaaactttccgaaaattgcatgggcaagcaatagccgaactgatgaaggagtaattaaatcataaccctctttttttctatctcttttgttggtgtttttattgtttgtttacttgcatcatattaattatgtttgtttcacttattgacaaggttttgagaatgatcttttattgtttggtgttaatgaaagctcatgtgtaatggtaatagaaagagattgaattgcagagaaattatagatctacgcgttccctaaaggtatcaatttttggctaaaatttgatagctaataattttaagtactatagttagtgaaagtaataattttagtctgtgataaaggttaaaatgttatacagttttatgatagtagttaaaccatctgaggttgaaaaacaggatatatgtattaaaaggatgttgttggttgtttacttagtgatatgaaagagttgattattgaaatttttttcctcatataatttatcttgtaaagagattgttgttaaggtatgttacccatgtttttgggcttcctaaagatcccattgaaatgaattctctattacctaagaatacagcgattagaattttaaaacttctaaaaaattcatatcagtaaactcaattatataattgagccaatttgggttgcaattgactcttccttcctttaattgacccatcgatttttagctctcgatctatcttcatagtttgaatccaattacatgttattggaatgttgtaagaaagtagctagaattgttcacttcataagatgttcagtttaatagtttaccttaattatacttccttgaatagctgagtttatgttttggtaattaattaatgaatttgttcgtagttttacagttaaagcaggacaagataataaaacttttcaagggttactttcaagtttcttaggcaaaccccattaaatcaaataatattgatggaattattacaattttattcaatttcttttaggttttccccatgattggaggcgcaagtattgtattaacattcgtcttggactggttcagggcggctaaggatttcacttactaccttcatgactagaaagaagagggtctattctgtcaaagtat

SEQ ID NO: 267432 - DNA, 2295 bp, Cannabis indica
attgtgtctctctttttgtaccagtctctattgccatttatgaagtttttacatggtatcaattgctatgacttctgtctctgatggcttccacgacaacacatcttcctctgctgctcaaatcgatcattcacctgccatactattgctactcccctctcttgaatcagttcgggaccttagttgcgtggaattcatttgctcattcgctctatgcattcctcactgttaagcaggatcacaccaattttatagcctaaaaatctcagtttttcccaatagttataggccatgatcttgatgagattctttatactggtgtgccacctccttgcaccctcattaatgatgatccaaatactttgtatctccaatggaagaaatgcgatcaaatatttctatcagctcaacggtcaaagctcccatgttcgtatgggtgccttatccatttctgaccatgtggaaaaagtccattctctcttcgattcaattgtgattgcaggttctacgacgggtgaccaagatgtaattcttcaattgttaaacgacttaggtcttgaatatgactttgttttctctagcataacctctcgaagtgatgtcttgactcttaaagaagtttaagctctcctcatggcccatgagagttatattgaacaatacaatgctcttgttgatctcactgtgatccgtaaggggaataccgggtaagctgtgctatctcacattgcttgaggaaggtcaagtgggataattctgagattgtgtaggtatgggactacacagttgaagagggctgaaatggattgattggtactatctatatcaacaaggtgcatccttttttttcgatagcccatcagaactcgacagttaagcgtgcttgacctggggtaatttaaggataggtgacctcctggaaagttttcccaagaagagtgcgagtgaggacaaagcaggctggaaacacccgtgttggtctgtagggccaatcgtgagtccatgaagcagctagagtgacatacttgtgtataagagccattcaatccgtgggtgtaaggacccaatggagacttgaagcgggaacgttacaaacaagatgcaagccaatcttgcctatggagcataaagaaatggggaatacaagctttatctactgctgaatctgaatatactgccactaatgagccaatcaaggaagcactgtggttaaaatgacttatggaagagctagacctagttaagaagatctctattatctacttagacatccagagtagcatttatctatgcaataaccctgtgttccatgatcaaacaaaacacataaagattaaatatcatttcatcagggacaaggtgcctacaaaagtaaatcttgtaaacatgggaactaaagtggtttccctaaataagtctttgaaccctagggttagggcttggagtccattccagggaaatattatacacaagaaagaaaaagagtcaaacacatacacacacacacacacacacagagaaatacttagataaacacttgtaaaataaagaggattaccaatcgtttacctgtgatttggaagcgaagcttgtaacttgctgatcttgaagatccaatagagcaaacgagccatttctgaggcgagctcaaaagtggaagtatccagtaataattttagggaacctttataaatatgttgttatctttctcttgtttttcttttaattttattgctatgcatgtgtgtgtgtgtggatttagttattttggtcttattgggaagggagtgaaggtttgatttagggttattgtagatttcaagtttctttagaagaaactcgaagctctgttaaggtgaaaaaatgtttagggttcgagagggttttaagggatttcgttttgggatcaaaacgacattgttttgattggagtcaactttgataaaacttgatttgtgtttctgttcggtgtatgttaaatacgtaaaattcctatacatttttaaatcttttttaaaatgacattcttttgagtttctagccatggtgaatcctaggcgcatgtcttacgtcatctatatacataatctcatatacatactttaatttaagattacaataaataaaaaaaaatgttttttaaataaatgaattaaatttaaattaaatacaattaagagtgaataataattttttattgaaatatttagtagtctttttacaaaaatacgctttaatgacattaatgtgatgacctatagtataaacatcatttcaattatatgaataagatta

SEQ ID NO: 267433 - DNA, 1123 bp, Cannabis indica
ggtgactattattatatagtcattaatgttgttactcaattttaaattgtaattggttgatgaaatattttcacacttaattgtggcagacccttttatagaatatatcacacctatataattatatggtaccaatctccaatatcaatatcattactcttcttaatttttttataactccatctaaaaaagttggtgaaagtttggaaacccatccatttttttttattattttctttttgtagataaaaaagtttgcagttgtaagctattaagagcatctctaatgatagtagtgtcaatgccattgtgtagcatcaatgtaaattttaagaataatatttttttatctccaataatatagcatctttatattttgtcacttatgctttccacctcattaaacattctctaaaatattactattggagatgctgatctaatttggatattcaatctcgttctatttaaaagcaatttgtttatttctcattgcgattgttatgcatttaaacaaaattaaattttataattaatttaactagttaatgaaaaaaatattaaaaaaatatatatttttacactctactaaaaataaaagaaacttgtattaaaccaaaaggaggagaaaagagtgattaatttggtcagacttatgtaacagcgtgcacattggtttggtgtctttaatcttagttaaatatcgcatccattagattttaatttgagatcgacaatgacaatggatggagctatctattgaaagatgcttatgttttcatgctttcactaaccttttttcatttgattttaggttttgactttaatttttatttttcataattttaatgcctactatagtactacccaaggtcaaagggccggaatgactacataaatatttgtggttgttaattcttctacgttaaactaaattcaacataaagttggtttgaaaataagttagttgtggctcaaatgatttttattttttatttttttaaaatacaatttttaatatgcacagaattctagaacaaaactcgagggaaatttacaaaaatactgaaatttgggttaacttttacaaaaatactgtcacacggaatttttttcaaaaata

SEQ ID NO: 267434 - DNA, 1758 bp, Cannabis indica
aagtgctccatggaaaaaggtgcggcctcttgccttagcttaaaggccatctgtttctctaggaccttgacttccacgatcaacttgttgggggcacagcttgcatgccgtctacaattttggccttgcaaacaatcgacatcacaattgccctccggcgaacctgtagtttcttggcctctaaatgcccattcagggccttgttcatttcctttccctctgcaagttgagagggtgaaaagaaattgccttccaggggaaggcgaaccccacacaaggaacccttggcagggctaaggggagttgagaatagggaggctagaggtggaccccattccaagagcaaacacttcgagcctctaatttttcctagaataagaactactacctgccatcccaacaaggtccgtcttcttcgaagtagacataatgtacctgtcaaaagtcgacacaagttaaaaggttcatggcttgatcctgaaattcccaagaggtatgctactagaatcagtgtccctgaggcggatgcaccttcacatttccctcaaaactctaacgaagagtaaatgaagaacttaccagtacatgagagagagttaaggtggaatactttagtgtggtatccttgacgagagaatcagtattcgacgataatagagaaaagcacgatggagaaggaaaggaacacaagaacttttgcttgacgggcaagaaaagtgaaaaatggaacgactgctaaaggtattaatgggatgcctagatgatgcacctttcataagaggtagacgcttcagatcgccccaagaggcatctgatggtaagaagattaagacgctaaaaggttcccatcattgcatgctttataaagtacaatcaaaaaaagagaaggctgcctaagtccaattgcctttattttgagcttccaagagaacacgcgctcggcacgcgcgcagaaatcaaaaagtcagcatttatgatcctaacaagaaaatagaagaaattatgcttccctaatagtgacactttaggttggcggctgatgacgcaatgcattaaaagattcgttgcaagtcccacgtgcgtaaaaaatctctcaagagaagatattgctagctcccagaccatggtatgtcccaaaagattgggggtaaatgttatccacctttcatcaagagtgacatgtgggcataaattaaagaaggtcaaggagtcattaagctgcctaagtgtccaacttcgcgctttgggaagataatgagataaacctcgcgggacgggtctctacaaggtaaaccttctcgagtgcaagccacgagataggtgttcgtgaactaatgattccttccatttccataagactggacccttttctcccgcgaggaatatggatcttcacccaagatgcgctagttcggagtacgcctttgactcgtaaaagttcagcctgtgcatgccaagctacgggccaactgattgggcttttttcaagtacaatgtcagagtttgtctcccacgccatgctaccatgtagagcatgcgtgtcattgtggactgttctaaataatccaacgggtaaggatgagaggaatttaaataaggatggccctggaatgacacgcgtccaacaccacgccagtataacaaatgttatctgacatcaataaagaccacatagaaaacatgctacctaccaatccaacggtgggggttcatccctacgaagatccatcaaagatagcccatgcaagggggtcgacc

SEQ ID NO: 267435 - DNA, 789 bp, Cannabis indica
taaaataattccaacaccaacttgatcataccgttcggtcttgaaatgttccgcccataatgtcacaccaagtcttgacaaaccatgacattttatgcaatgaatcttccctaaatcaatccacgtttgttttgtgccaccaattttgttagaatctgtctaagtcacgaacatatcatcttggttgcaactttctagattacattacaacaagctataggtctgaagtcacgaacaacattcagacacttagtcttaggaataagagtaagtgtagttgtattcagttcctttagtaacattcctgagtgtaaaaaagaataatatagcttcacaaaaatcacctttgagcaagtcctagttgtcctaaaaaaataatagctatatccatctggaccacgtgatttgccacccagtatatcaaacatagcctctttaacatcaacaaccatatagtcttgtaacaagaatattttttttgacccaggcaatataggatcgaagttgataatactctgtttgaccgattctctgtgcaaaatcttggagcccggaagagaagaataaattgaacaaatgcctcactgactgtggagaaatcatccacccaaacacgagccatattgtttgattgaacaaattctattgcttactcttcttgatcgaggacttgcatgaaacagagatgtattttcatctccctcttttacccaaaatacttttacttttcggtataaaaaagagagataagcgttatgaatgtctctatatgctttccttacttcctgt

SEQ ID NO: 267436 - DNA, 1982 bp, Cannabis indica
ttaaacaaattaatgtcatattagtaatattcattaggagatgaagaacaataaagggagaaataaataaataaatgcatgaatgaaggtacataccgttttgatgagccaataaatgtggtaatcccaaatcagaatcattattattattattctccttgaaaagttttgccaaagttgcattaacatctctttccagtagaggaattatttcgtcatcaatctcaattgtcttcaataatgatgcagaagtatttacgatcccatctaaaaatctcctcatcttagaacacctggtgatatataattcttccaaatttgggaagctcatgataactttattttctgagtagaaaaagctttggagattgggcatatccttaagttgtagtatcttcaaattttggaaaagaattagggagtgatgatgggtactcttgtcttcattaccattatgattaataataatctccttcatttcatcacaatttgttatttccattcgttgcaattgtacaagagtggttgctgttgaggaagacaataaatacctcagcccatggcaatttgatacttccagagacaccaaattggggaaagacataaagaagggtgcaaagctctgtaatctcctacagtactgaacatgaattctttttaaatttggaaacaagagaatggtagtattattatgtgatgatggttccacccgaaacacatgatcaaccatatcagcacttgtaatatacagttgctccaaaagaagaagaaggtggtgtagatgtaagatgagtaatagtagtagtgttgttggtcaattcatcatcaccactactcatattcacaaaacggagcccccacaacttttaaagtgtacgaattgtatgatatttgtgaaaggaataaacttcaaaatttggtacaccaattggttcatcaggagatgtgcaagtcaactcaagtgtatcgaaggttagggaaacaataatgaatcattattactattcactcaaatatttccttaattacttcactccaatctgtctctaatgtcttaagcataggaaaaattacctacaaatcaaatgaaaacaaaacaatttaaaaaaattatatatggaataataaacttgtcaaattaaaaaactaaatacaaaattaaaaatgaaaagatattgagcctagctacgtgttatctcattcaaacacaaagattaattgattgtaattgccttattattattagtacatgatgaccatgtccttttatcacccataaactccttcaatttatgacaaccatagatttccagtttagacaacaatagacattcaatgcaataaactcctccacaataataataatcataataatagtgatatgattacctcatcatcaacatcatcatcaaccatatcatcatcatcaccatcaccatcctacatactcaattattaaacaaattaatgtcatattaataatattcattagaagatgaagaacagtaaagggaaaaataaataaatgcacgaatgaaggtacataccttttgatgagccagtaaatgtggtaatcccaaattattattattatgctccttgaaaagttttgtcaagtttgcattaacatctctttctagcagaggaattatttcttcatcaaccttgattgtgttcaataatgatgcagaggtatttaggatcccatctgaaaatctcctcatcttagggcatttctttaaagataatattttcaaatttgggaagctcatgataactttatttcctgagtagaagctttggagatttggtaaattctgaagctttagtaccttcaaattctggaaaacaattagggagtgatgatgggtactcttgtcttcttcttcattaccgttatcaatattataatctcttcatttcatcacaatctctatttccatttctaccaattgtacaagagtggctgctgttgaggaaga

SEQ ID NO: 267437 - DNA, 1308 bp, Cannabis indica
ctctctctctctctctctccctggtgactggggtcaatttattatttgatttgccaacttaattggaaccccatttcccaaatcatgtatcttctctctttctccgacttccaggtttcccttcccttggcttgtattgcaaaagttggagaatccagcactacgtgcctgcttgaaagtaaagtcaagtgaggtatgtcacatgtaaagcattgattggatgctagaaactacagtctaaagtaaatatattgaggttttatttttatttaaaaatttcatatttttaaataggcttattggtaatatggagctaaatatatgttctaaagtgtacatgcaaccaaattggtgtagattgaaatatatactatgttagactacaataggcttttaaaagtcatgactgtgttagagaattgttttgtttgttgttcaatatgttacttgtctatgagtaatattattatatcatgaatacatggaagctttgattcttacatacttggaaatttaatcattaatgtcagaccatccttgattcttgcagatgctgtgataatgtaggttcagatttacctaattcatttaaatgcctcaggttatcccttcattttatgtcttgtgcagggtgttctggtgcgtagaattgagcccacatcagatgcatataacgtcttaaagcaggtatgctaaccagttgctaaagcaggacttttctgtaaagttgtacgtggactacttaagacattaacctaatgagaaaccataaatcactattttagaggctttgttgttaagacacagctttctgttcagtggttaacactggcttgtacatttgaatattatgaatttggactggattgtaaggacatttaaacataaagtgggaacataaagcctagaaaaactgataccatatttgttcataaaggtcatctgggatatttttttctttctcgaggtgtcgaaacagctgctaaaacttgtgtgtttctaaatgtcatttcagttttctaagtatactttagcactggaaaaacacatcacttagtatttgcttgaacttctgcagtgtcaaaatatttcaaattcagtgacacagaaaatcttgctcttttacagggggacgtgatagtaagcttcgatgatattcgtgtaggatgtgaaggaacagtgccattccggtcaaatgagcgtattgctttccgatatctcataagtcaaaagtaatgcattttgatcaataaaaatttcgtttagaaagctttattcattttgctttctacgttgtgtacagagaac

SEQ ID NO: 267438 - DNA, 570 bp, Cannabis indica
ttttagtatttcacattgttagtttagacaaatttctctttattggtaatttttgacctttgaatctgatcttatcagctggtcttcaatcctatatgagaataggaaaatcatattagcttaggacctcatttagtgtgaaccaaattaaactctcttcttcttttacttatctttagttaatgctcttaatttacaagctataaattcttacacatatctaatatgacactggctagtggccatatttaatttggtgatgacacaaatattctaagtaatgtttttgtagaattaattaaaaaacttggatagtcaatgaggatgaattagagtgatgattttttgtggtgttggtagagtgttttatataaatattaaatataaatgaccctcataaaggtagctgactttacaataatcatatacatgtttgaattagtataatatatgtaattattttgtttgaattagtcctttctatactcaaagtcagaagtttatctcttcaaattaacatgtcataaccacttgtttggcaacatcttggttagtactctctctctctct

SEQ ID NO: 267439 - DNA, 1814 bp, Cannabis indica
ttattataaccttaataatttttcccctatttttgaaaatagtcctttatttaattcaaacagaggagataattaaaaaaaaaaaaaaaaaatatattttttcaacataaaatgtatcacattaattttaaaaaacatatttattttaaaaactaattaacttataattgtttgaataaaaacaatgcttttttggttcttttatttctttttcttttttaattacaccatgaatgccattttttactataaacaaagataaaattaaatctaaacaaaatattttcaacatctaaatatataacattaatttcaagaaaatattatttaaaatttaagtaattttttagttttacattaataaatatgtaatattttagcataacaattttataggcagactattataattaatgatattgtgtgtgatacccataattctatagaagagataggtggcacaaccagaaagtaatcaccatttcaaaataggcctaagttggatccagaacgggcccaatcccaacaaaagttcaaaacttcatctatgggacatgcgactctcccaaaattcagaagcctccctagccttcaaggacacggaaggtttgaagacctcttaatgaagataagggcctacctgaaggcaggatgcaaaggatgacattcgaaagcctaccacaaatcaggagtcggatgtctaccgcaggatgaatatcggatgtcctcctctctaacacaagatcagatattgtcccatgcgtcaaactatagtaatgcatgtaccaccaatacccctttttgtttgacaactccacttacacctttgtctgccaggtgtgatctccgtgcaacatgtgccttataccaagcggtctgctcatcaatacagaactatcgccccacgagcctaacattcttagtaggcctcatagtcatgtatattgtttatttttctcctatagtgggctaacttttaagaaaaacccaaatggatcacgggtatgcctagacccaaattctagcctatataaacctcgttatcccttcatgcaaagggacgggatttttagcacaagctctgctagttttattctaagcgttattcttctacaagaaatacctagagaaagcatcttagagtgcgggttagggccccatatagtagagtttatttgtaacatgcttcaaagcctgaaaggccaatacactgactcgtggactagggataattgacgctcgaactacctaaaagtcctccatcttattcacttaatctctattcaatttcctaaagctcttatttagttagtgttgcccctgattttgcacaatatacgtggaccaaccagacagggacacgtggacacgaaggtcttaacatttaattaatggctaagtctttaataaagaaaggcgttatccaggatcctcctcccggagaaggcatacgaagtcctctatgctcccggaggcctaagtggtatcaaagcacctccgggagatgtcagacttcctctgagcagtcatctcgcatttaatgccgcatgggaggaggcgtgttggaactgccacacgcaataaagtctgacgacacaacccccaatctgcacctataaggctatgaccacttaagtctaatgacggctacactgtgaagaatcacatcagtcaaaaggcaataaggacaatccacataaaatccctacagcacctagggattgaccatgcattacccatggtatattcattgggaatacccaactttattgatagttacagaaatacatgtactataattctgggaatcaccc

SEQ ID NO: 267440 - DNA, 857 bp, Cannabis indica
aaataccacacccaataacactactactcgaaatacatgtttgtaatatgatcaacaatactagaattatcattggtagtcatgacagaaacacatcatcttcaaattgttgaaatagttgctgcaaaaaaaataaataaataaaggaaacgaacttatcgaataaaatctaggttgagtcgcagattaagtcgctttctttaagatatttgcagtattgcctagaattgtgcaagcaaactatcaagctcatcatccacaagataaaacaatccaatcaaaataacactgtattagagctctactgcatgatagaaaaccgtcgaaataccacacccaataacactgttgttcagaatacatgtttgtaatataatcgtacaaactgtttataatttttctatgaaaagaagatgtatttctcttgttggttttgatgcattatatagggaatgcacaaaaagtagtaacggaaaaaaagacgtttctgatcatgagaacgttaaaacaagagatcgtaagaacaacattgaaaatcgaaacaagaaaatgttttcgtttaccaattaattaaacacatttaaaaactgttttaattaattaattaaaaataataatttaataaataaatttttttcaaaaaataaagtgcaaagctcaatcgaacagtagcatgcgcagtgttcagatgagcctttgtatgattccttccttttccacaaaaatgagtttaagcccaagccaattgctcatatgatcatatctatattatatataaacttacaaataagtattcccaagaaatagactagtcctcaaagaacttcaaaatgcacatttccaattttttttttttt

SEQ ID NO: 267441 - DNA, 1184 bp, Cannabis indica
aagggggggttctccaagtgtattgtactgtatgcttgcttggttgttatgaaaataaaaagtgtttcattttgtaagatttgtatgaaggatttggaatttggagaaatatgagatgggttgttgactagactggtactttgatgattcgtacggtttctacaaatagaaaatttaaagctacatttgttttttgaaagttagagaaatttcaagaacatgcggttttcagtaaatatcttatatttcatgaagtgtattcataaaattaaattaagtgtatcattgccgtaatataagaaaaacagtcttgatgaaattttaacactacccttcaatttgtttctttttctcctttctgattgttaatggtgatcttaaaggagtaaaactgttggttgagtatgaaaagagttcaagaattcataattctgaaacttccatgccttagtttcatggagctagtaaatactaaaagatgacttatatgtaactgtgtatggatttagaactatttctattatctatgatgttggggccgcaccatatgtgtcttcttcattggtagtatcctcgttagttggaatttttagatgacttttgtcataatttattgtgtttttctaatgttaataggaaactgtttatcctcggtagttggaatttttagatgacttttgtcataatttattgtgattttctaatgttaataggaaactgttttgcatttgattgcattccatttgttttatgctcttcgttagagcttcgagctttttacttgttttcttcatattatggcagttttggtaaccgctagaaacttttatagtattcttaaaagcatgttgtatcacgttagtttgtattctacatacatcatatatggtatgctaatggtggacatttttggcgtttaaatgatcattataacacttgtgcaggcattgattgctttgaagaagggttctcaattactcaaatatggtcgcaaaggaaaacccaaattttgcccatttagactgtctaatgtgagttttctttcggagtttctttgaagtgtattttttaggtgttgtagcttatgtggcttggtataaaacagcagtaaagggatcgtagtgttctttcctgtttcacatttgtagttatcaacttatgaatgagactgctttggtcgaatt

SEQ ID NO: 267442 - DNA, 1145 bp, Cannabis indica
ttaatttctgcgctaattttactagtaatccaaattaggggattagagttttataagtatattgggtagcgtgcctaattatttagggcgttacacatgtgtcaatcaaaggtcaagccttaatcaactttgtaatggaatgctttgggttagatgaccacccgaacgagtcagtcttggagttacccacatggaaagtttatgttgatggagcatcgaatgaaaagggagatggagctggagttatattaatctccctggaagggaatcagctacaaagtgctctacgctttaaatttcttgcctccaaaaacaaagctgagcatgaatccatgctagcagggttatgattggccaaggatgttagagcctaacacagtaaagtggatagtgactcccagtttgtggtaaaccagatatttggggaatattagactaagggcaaaaggatggctgcctatttaatgatgtctcgggaatcattgcaagggttcaaaggctaaacatctatcaagtcccttgagatcagaattcgttcgtggatatgttggctaaacttgccacagacccagagatcattcaatacagagtagtacctgttgcccacctagaagtctcaagcatcaaaacacgggggtaaacgccatcatggatcattctaactcatggatatggcccatctaccaattcagaagtttgggggagcttcttatagacaaggctgcttctcgcaagatttagtatcaagccccctaatatgtgatattagattgaaggctttaccgcaggggtcatttgtgtcctacctgaggtgtgtcagggaccaaaataagtgctatcatacatgagactcacgaaggcttctgtggagatcatacttctgaaccaatcttatctaaaaagatccttttgcagggctacttttggcctaccatgaagaaatcttgcgtagaatatgtttggaagtatgagcaatgtcaaaggtatgctaaggttctgtgtgcaccaccaatggatcatactcatgagtagtccatggcccttcactgtttggggaattgatctagtaggttgccttcccaatggtaagggaggagtcaaatatgccatagtcactattggctacttcaccaagtgggtggaag

SEQ ID NO: 267443 - DNA, 989 bp, Cannabis indica
tgggataaagtcatgttagaaacagataacttggtatgtgtccaagcgattcacagcgttattttcatggcttcacagtttggtcttattgtttaagatgttcgaaattttcttttagctttatcttttgttgatttgtgttttgtaaaacgatctgcaataagttggctcattgctttgcaagagactcttgtttctctacaggtcgtgtgcttcagttgtaggactattcctctaaggtgctttatattgttttgaacgaatttattaattaatagatcttatgaattttatttttttaaaaaaaaaaaccaaagtttccatttttattgctactcattaaaaaatattgttttttttaaaaaaaaataaaaatcatatctttacataccactcctaaaaatcatatcttattacttaaaatattaaattttgaattttaaaaatctcaacatttcttcttatttcccctaattcacaatcaattttcaaaattctcaaaaaaaaaaaaagagagagagaaatgtataggagaggtgatttggttgaagtttgcagcaaagaaagtgggtttggcggatcgcttcaatggtatctcaattgaggaaagatcgaatcttgtcgatggtgcagattgggtttcgactcccccaaaccctccttcctcccaaaagatcacgacaacagtggcgaggagcagacagatgatgcagaaccaccattccctctcacaatcgtttaacaggttttttctcttcttgtaaattcgattttgacttggaggatttattgtctctgattgattgtttgttaatgtaatgcaacagacaggttagaaattcagcaagagaaataaaccaaaatagaagttagtataattttgtgtaatattaatctttatacaattcccttgcaaaggcgccaaaaatttgttgcgaaaattattaattactacgcaagtgcatgcaatcaagtagtatactcacgca

SEQ ID NO: 267444 - DNA, 970 bp, Cannabis indica
tttttcatatagtttttctattatggttttctatttttttcatattgttttgttttttttggtgggttccattcctattgacctgtttagtggtaggaatttttttgttggcatccttctttgtttgggtttaagtttcgaatttcatcacatcttttaagttttcacttcatgtggcactgtcaatggaatgaaaagtaaaaactctctaagtatataccgataattcaactaataaagaagatgaggtattaattctctatataactgtcaaatgattctcaggtttaagctactaaacgagtaaggaaaagatttgtatcacataatctattttattttcagataaaaagaattaaagaaatgtaatttttataagcatataatgttcaacaatcagtttatgcaactcagtagttgttaaaatatatactaaataaattaaatcaacactaaaaattgtacttcgaactaactatttttaaaatacacaactcgtaatttattgattttctttgttaaaaaaatgagacacattttgatcacagtgctgcagtgcatatgcatcataataaacttttcttaaacttgccaaaaaagaaaaaaaaagtacttttcttaaaattatatgtaataataacgattttaaaagcaaggtgataaatggtaatattaattattgttcttatcatttttgtgcatggatacatgtaattatttcttccccttattatgatatataaatattataaaatttagtgttacatgatgattaatttcaatatttatgattacatttattataatgataaatgctgataagctcatgttggtgtcaaaccaaatttttttgggggggacaattatgtggattcttaaacttttattaagcatcgaattttcacgttaaaaataaataaaaagggcactggtggcctcctaaaacatcatcataacgattcccatataa

SEQ ID NO: 267445 - DNA, 598 bp, Cannabis indica
cgttcaaaaacgtgaacaattacaccaccgtttcgaaaccaaagcaaaataagataaacagagaaacttaattaggaattaggatcaaataagaggaaaagaaaaaatcaacacggagagagagaataatcttattcttacggaggagtaagattgaagatcgacgttgaagagaggtgagaatgcgaatccaccatgagatatattctagggtttaaagaaaacccccgatttaattttttgtgttagggcaaggagtgtgagagcttgaagctctgaagcctgtgtatccacccggcagacataaaagtccaaattggttttccaatttcttttctttctcttttgtcggatttgatttgatatttttttcctagcgtgggccaaagcccgacccgaggcccactactagtcatatacgaagcccgatccaatgggccgaatgccaaatggatccctttgaaaattgatctccatctcattatagggaaatataggatttggtatttttaaattttttacatttttatgggatttttccttatatatttgtaatgtttagttataacgatatataatatttggtgattctacaatg

SEQ ID NO: 267446 - DNA, 562 bp, Cannabis indica
ttttttttaaataataaaaaaacaacactgtattttcttaaaaaagaaaaatttatttgtacaaaatataaatcagtaagtccctaaaaatataaaatttttgctaattttgtatatttatgaaataattcctaatttctacgaaatcccttattatagcccaaaatggaaagcccaagatcccatcgaagttctggtctctccccaattttagcttcaacttctttcttcctcttgcttgcactgaccgttttgaaatgttctgagactggaaacttgaatcagctcaaggctcaagcttcactacacactaagtaagccttaccttcggtaactatggccgagaacgaaactcctcctcctcctaaatccaaacaacgcccaatcgtacgcctggggatcttcctcatctctcatagctttctatttaggtactctttcgtcttcatattcgcttacagatccgatccaaaactttgatttaaatctctatcttacttctaatgacttcgtttttgctgaattatgataaatttctcagcgttgtttgctgcgctgccgg

SEQ ID NO: 267447 - DNA, 758 bp, Cannabis indica
taaataatttctaatgagaaatttgttctattattccttttctcctctttttgtttttgttttctatatttacccaagttacaacaaaagatttgttttttctttttacctatttttcttgtcccctaatcaaccacaaatgattagtaaataaaatcggtattaatgattagtaaataaacttgttaagaaatttcaagttactcactttattattaacataattaaagactacattaatatgaaattataaaactcatgaaggaatattaatatagaaaattaaagaaatgtgggagcaaaaataggctgagtttttcaagtcaaaaaaatgagaattaatggccacaaattgttgattaatagtaaccacaacatttgaaactgtttaacaaaaaatggttaaaattggttggtatatttcttttggatctattccttaatattaggaaaaactaaataaacttaattttttctctcttaaccttttattattccaaaacacacataatttgaactaccaatagattttgcctcaccattatctcatcatcatcatctctattgttttaactctttaaagcttcataataccctatttagtcaattaattaaggtacaatttctcttctttgaatttttgttttcatttattttaaattgattgatatataataccattataatatcttatgttatgctctttatcaaatgtgtcaataaagatttgatttcttaaaaatcgaaaaattagggtc

SEQ ID NO: 267448 - DNA, 627 bp, Cannabis indica
atacaacacagtgtaccaaataaactcttaatttccaactacactttattacttcatatgaaattaagacctcaatttaatattttaggtatagtttaaataaaattacttatattaaacaagacattgaataacactagttaggcaagcaagatgatattaagagaaatacttagattaagatagacattgaagaatactaggttggcaagcaagataacattaaaggaaagttgcattaataataagataagatctcacattcatatgagttgtcacaaaattgtttattctaatataattttttatcatgcgggggaaaaaaaaaagaattacagtcaactaaattttattgtaattaattactatgtaaaattaattataaagaataaattacaaagctaacttattattatttatacaagggatattggcggctaaaccacttgaattttacggtttgtaacacttaatcacaaaaatcgaaattttggcggctacactacctgaaccttagttccgtttgtctctgcacacctccgtccaaaaatcatagttaagtgccacggtggactgtccacgtgtacacacttgtacacgtggtaattttttagtggtacacgtaat

SEQ ID NO: 267449 - DNA, 1656 bp, Cannabis indica
aaatttaagatcattttacataacctttttattaggtggttaagtataactaactattaagaatagagatttcaccctcaattcttctattttttttttcctgagtttcactcatttatttgagagtgtttcaattttcttcattgagaaaaggattttagcaaacaaggattaattttttttttcttcttcttctttatttttatttatttatttattgaagaaatgaagactagttcttggttacaacttacatacatcctattacagtatgagtattaaatattaaagcatgttcatacatagaatggaatagcattcaaaaaaacacacgtacaaattattaaatacaataacataatatcatagtcataccctcaactagaattccttgtcttttcctttgaattggtacataaaactttttttaaaatacaacttgtcttaagttaggtatgatagaaatttttattgaatacaagttgaaaactcatcacacacaacattgtttatcataaactatttttattatatatatatatatatatatttcttgtgaaataccaaaaggccaaccattgcaagtgacctttctcttcattcttcctgagtttttaaaggagcaatgggtatcacattctctctgccatgtaattcagttaatgatgttgtcactcattgctataaaagcagtgctaaacaagcaagttatatccataagcttgaagataatcttaagtctttaacagatgatcttcaagatttaacagacaagaaaaataccatacttaggagagtcaaacttgcagaggaacaacaattgacacggctggatgaggtgcaaacatggctttcaagggtcgagaccatcgaaaataaagtcaatggagaactactgcaaagaaaaactgaagaaatcaatagacttagcctttggggttattgttcaacaaactacaagactagctatgtgtttgggaaaaaagtgtgtaagaagttagaagaaattgctgatttgcttagccaagaaaaggcttttgaagtggtggctgaaagggaaccaatacctcctgtggttgaagtgccagtggagccaagtgtgggtttggaatcagtttttgaccatctttggacagaattcaatgatgaaagtgtgagtattatgggattgtatggaatgggaggggtggggaaaactactcttttgaagaaaatcaacaacaatttcctcagttctcaaaataattattatgttatatgggttgtggtgtctaaagatcacacccttgagaagatacaaaatgagattggagaaaaaattgggtattttggtgagagtacatggaagaacaaaagctgtcaacagaaagctttagacattttcaaagtcttgaataagaagaagtttgttatgttattggatgatatatgggagagaattgatcttgaaagcgtagggattcctttgccaaataatctaaaagtaaatggatccaagcttgtcttcacaactcgttccatggaagtttgctgcgaaatggacgctgataaaaatgttgaagtaaagtgcttgtcgtcagaagactcatggaaattgttcgaagaaaaggtgggaattaaagctctcaatatacatccagatatcccaagtttagc

SEQ ID NO: 267450 - DNA, 2179 bp, Cannabis indica
ttttatatatacaattgtgaccccaataatttctaacactctaatcttgttgccttgtaccctgggtgtgttgtaaattgagttagatttttgtgtcttaagagggacgggaacaagaaaactcaaaacagtggtgtttctgtagtcggagttgaaaagaaaacttattatggccaattggaagaagtttttgtgatgtcatgtcttagtggatgttctgttgtattatttaagtgtaaatggtttgacagtagtcaacccttaggaagattgaagtcagaacaagacatcattagtatcaacactagtttttaagggttcaatgatgataaatttatttcggcaaatcaggctaaccacattttctacattgaggatctcataaataaatttgagtggaaagtcattcaagaagttcatcatcgaaatgtatgggatattccgcaaattaaagaacatttggaggatattgaagtagatgttatgcatgatacaatttcatctgatttccaattgtttgttgatcttggtctattactataaatcaactttcaacgtataggggctccaatagagtttgtggataggaatgtcaatggggcgggtcgaatctgatccgactatgatccgacctgatctagatcatgtacggatctgccccgccccgccccgctggatcagatactcggatcggatcagatctgacccgccttatacggatcggatcaaatccgacccgactattttttttatagaattttaatattaacttataattttatatccattttaattttatattaatgggtccgggttctaggttccgggtccaggtccgggtccgagtctggggtccggatcccgggtcccggtctaggtccgagtctgggtcggggtccgggttcaagtccaagtcccaaaggatctgagtcttgaattaagtttttttttaaaaaaaataaattgaaatcgggtcggattagatccgatccagaaaaaaattaggcggggcggagcggatctgatccacgatccaataagtatccgaacgtttcggatcagaggtgatccgtcgggtcagagctccaacccgctccaactaaatggatctttttgacatgcctatttgtggatatagataataatctacccgatgaggatgacacggatgaagtggaggaagaagacatagatgaagtagatgatgaagagatagaagaaatagtggaggaagacaaagaagaagcagaggaggaagatggagatgacaatgagaacaatgctaaaattgataatttagaagaaacttataatgatgataattattatagtgatgaataagtggtaatttattatatgtatatgttattaattagtactttattacattatgatattaatattattgtaatatttctaatacttatatttcttaaatataacaaatgttgctcgttctcatggggtgatggaggaagtgatcctcctcttggtgcaacaaatattggaaatgactatgtgcgaggttatattatttaaaatatgtaacttatgtattaatatttatgtgaatatactaacttatgaatatttaaacatgacaacaactcctccaaagaaacgtcgattcataagggattaagcacacgggaaaagcgagaaaacctcaaacgtccactacctatcgagtgggacatcagagaaatacatacaaagaggtaggtccgtatagttcagatcttttgagggagttaggattacttgtacgacagtacatggatccaaactacacaagttaggcacaagtacctgactctgtgaagaagagaatattatctagagtagatgtgaattatttttagagttaaattgcttctcattagctatatataatattaactaatgaagtttgttttatttgacaatatttttgatatcagtcgagaaagatatggatcagatcatctctttggtatcttaataggcattgataagtcttgtgccaaaaaatattgcgaattcaaacatgaactcaaagaacacttagaaaataatggtcctacaactccatatgctagatgcactaaagaccaatgaaaaaggccctcgcatattttgaactacctaaagtgaaggtattttagttttattcaaccccaattgaatttttactaaacta

SEQ ID NO: 267451 - DNA, 561 bp, Cannabis indica
aaaaaaaaaaaaaactcaatttctttctaaccaactaataaagtcatgtcgtggaagctagcttattggaaaattctggttgacgaatctagcttatggagacatgtggtggaagctaaatatttgaaaaaccaaaattttttgacttggaaatcaaagcttcggattctatttggaaggcaatccttcacgccaggtcctatatccacaaaggactatgccgtaaaattggttggagatctctaggtaccatgggacattctccaatcgcatcctcgtctcgatgcctcggaagggatcagtttggttagcaactttattcacaataacaggtggagtgaggacttagtcaggcaatagtttcaacatgaagatgccaaaagaattctcaatattaccatgcctaatcatccttcggaggatttttggctttggttttcgaaacccaatggcaaattcagtataagattagcctatagaattattaaaaacttggaagttaataaaaacaacaacaaaaaatggagaattatttagagagccaaaattcatgataggttg

SEQ ID NO: 267452 - DNA, 674 bp, Cannabis indica
aaaaaaaaaaaaaactcaccatatagaaagaactgaagtttcaagctgtggatttggtagaattccagacattagaataagcaactcaaatgaccaccattctagactataaacacaaacaatttaagtaattagtgaaatgttacattgcattttctcaataaaaacaaaaatttatttgtattttagttaccatgacataactgcagaagggatagccaatcgaaagaactctctgatcccatgaaaaatctctatagaaatcgaagttcgagttttctcacatgaaggagaaaacttaatgtagaaaccgaatataatagcgtttaaccaatacgaaatactaatacccaatgctcctccaagatttcccaatccaaatttgaatactaaaacccaagataaaggtatgtggaaacaaagtatggcaaaagaggttatgagcattggagttatcatgctttgtgtttgaaaatatcttataagtggttgaagaattgcatatgcaaatagagctggaataagccatattatgaattttccagcttcatgagaaatttgagggtcttgaccaatgaaaacaagtatttttcccatgaaaatccaaattaaagaaattggtatacaaaccaagaacaaacaaaatattgcagtgtaagtttgaagcccaagtt

SEQ ID NO: 267453 - DNA, 682 bp, Cannabis indica
tttttgtatatacatataatatgttgccgtaacgagcatacatgcatgaatctatttaacaactcttttttacaatatattgtttaattaatttgggcaagaactgttcatgtattaattaatttttgtctcttcgtgtggtatgacccatgggtggcaactaaatattataatttggagttattagctcggttgatagcacatcaatttttgtctctaaatttaattattatttgtttttgcgtaaaatataactttttttaatcatgtgcactaagtaactgattcattggctttcggtatacgtacctttatataaatataaatatattatatatattgatttgttgtactttacaggcatatatttacacaaaataaatgaacttatatatagactagtatggtaatatataatccaaaattatatataattaatgtctggacaaaagttatagatctataataaaacaagactcaataattaatccagccagattattctcttaaataatcaaaaatgaaatatataattttttttatactattatacgcccatgcacgtacggtactacggttctcatttctatgcagaaagggagtaaaataagaggtaaaaaaaatgtaaataaatataataattaataattatttatggaatcaaatacaatgagatggtgag

SEQ ID NO: 267454 - DNA, 619 bp, Cannabis indica
tggttacaataaaaatgtaaccattgaatagtcacccaatatatagttataaattttaattaattctaaccaaactattttaggacggactaaataaataaattcagtgtgaattatttagtaaattcaaccatttaaaattttctgaatttcaaacaaaactaactcgtggtataataattttatatatggttaatgtatatttgtatttttagtttgggttttaattttttttttatttaagcgtttatatattacaaccatgttttagactcgaacctaggacctctaatacgcacacacctacctatggccacttgagctagcctcaagtagtttaatttgggttttaactggttctaaaggttgttggattatgtagccttatgtctttatctttagacccatattgaggggtttcgtggattagtgcttctcacaaaacaacttgtccctattaatgtattctgacaaatccacctaatcaaaccctaataaattttctacagttttttcttttcttttcttttcttttcttttatataatataataatatcataatggaagccaaaaaacaaattatgaggtttgtgagaaaaacaacaatttatcaaatgc

SEQ ID NO: 267455 - DNA, 930 bp, Cannabis indica
tagtaattacatgaaaaaaataatattttttagtaattaatgtttaaaatagaaaatttttagtaattacatagtgtaattacactcaattctcataggagatcatgagaattggagagagtattacccctcaattatctccaataatataatattacagtgtaattagatagtgaatcaaatatatcaaattatataattactttcaactacatataaatctaattataccgtgactttctaaacgcggcataaatatttcttaaccctttttattcttggtccatatatcctaccaaacacagtgttgttaggcaagcaccagctggcacacttgtgtgtgtacataatatatattgaaagagactgctgtccttgttgagcacatgcagtggtgtttgaatttgcatgttctttggatctaaagcattaataactcatccttctattactttctcattttcatgatattacaagattaaattagtcaactattagcacttatgggtttgttttgttctatcttagaattcatacattagtactagttaccaattttgttttattattagtgtttacaagttggtatacattggtttggtctactggtccacaaccacaactttataaaactgcatacaaataatgtcattgatttgaccctcaaagtgatttggcatggccatcattattattgtaacagattatttatagacctcttttttattctcctattattgattgaggcattttgaagaacaactttttttaagtcattttaggaaaatctagctttttgataattatttgtactcaagtacttgataatcccactattaggtaattctctttgaaatcactaataaagagagatttttacactacatattgaaattttttatttttttttattttttttactgtgaggca

SEQ ID NO: 267456 - DNA, 1371 bp, Cannabis indica
atatactagtatatatatatatatatatatatatatatattatatgttacagcgaattattttgatcatgataattttaagttctaaaaattattaattgtaaatatatattttttatacaattattctaaaaaatacataagccctagcagatagctattttttttcaacctataattttaatactttaatacaattttttttttaagcttttttatttataaaaatatattttcaataaaaataataaattgtgttttttagttattttgtagtttatttatagttgttgtgagtttttttttttttttgattgtttgtagttgttatatagttgatatatagttaatttataattattgtgaagttgattttttcgttgtttttagttgtcttttttattacatttttgctaactaaaatctatttttgtattttaaatttttgtaaatgtatttcgtaaataaaaattttaagttacaaaattataaataatcatacaaatatatatatttaagaaaatttattaatatatctaatatttctcttttggttcaaaggtttttatttattcattttttttcattatacatgctgatgaatagtatgcattacttgtataattttattaaccatcagttaaattcacaataaattatgattaaaaaagaaacagctgtcatttcaatgcaacaaataccgaatgtcaattaattacaccaactatcataacaaaacttatcttatcacacattaaatacataagtgatgttctttatttatttatttatttttttaaaaaagaaaaagacttaattactagattgaagatattaaatacacaaattttgtcaaaataaaaataaaataaaatagaatcacaaatatatctttcaatgaagatatatctctcctcttcacacttaggagaaatatagcacatcattaaaaaaatctgaaaataaataataattatgcattacatattcaagaatataatagatatatccaaataattattaacccaaatagttggaagactataacatgtacatgaacaagagaacaagagaacaagagaaagaatatacattatacatggggatatattataatatatttgagaggaatatacacttaaaagggtaccaggtaggtacaagtgtccaataaatatatatagggatatgattttgtcctgttactgtactttcacggattgtatccgtgatgtacggcagccgtcagatgaggaagttatttgatctgacagctgagattgatttaggagtaattagagttaaaaattagaaacgtaccctgacactcatttaatgtactctgagacccatctaatgtaccacggaatac

SEQ ID NO: 267457 - DNA, 1060 bp, Cannabis indica
tgaggtcctcaatttttacgcgacggataccctttctctgttgatgtaactatggagtgaatttatgaaacaggtatatatgggagtgacgaataattcttatcctgccacaacctcgtttacatccctcttcgttgccttttgatctctatctcactttgtcttttttcaatttctcaaaatcacatagacacacacattttatattatctataattaaaataatataagattaaacctgataatataacaaattaatttttcaatgtaatatattctttatattaaatttagttatatatttataatttctaaaacatattagcctataagttatgtgtaaataaatgaaattatgcatcttttcaattgaaaattcttaatcctacaatatatttataaattatagttgtagagatatatattatttagatcaaattaatttagataagataagagtttttttgaacttcgcgtaatttcattgatcagtctaacataataaatttgaacatttcatttaaaataaatctcactttttaaaagtgatttgtgatataagtgtgagaatgtacagataaaaacgaagtattatttactaactagtaaattataaatttaattatgtaggcaactaggcatactaaattacctacctagacatatataaataaaacgtcgcatatagatagcttgcttgcttatcccatcatattatatatttatatgttttactttttgcaccaatttaatgtgtattatggtttgattaatttggagatgaaggtttattattattgggccctgggacacgtctcatattcgttattctcttaatgatggcttagctagtgacggaaagtttaatatttaatttatataaaagaaacatatatatactaatgttagatattcttgtttctaaaaaagaaaatgttaaatacaaaaaacgactaataaaaacgccatgcttcgttgtccactttcgaaatcattgattcatacaataaaataattctttttatacattatatgaaatgtactttgcacgtaaaagata

SEQ ID NO: 267458 - DNA, 920 bp, Cannabis indica
ttatacttcaaaataatttttttcttacatctttacggaattatacgtaaaaactctcatagcaactaacagaataacttaaatcgcaaccaaagtctacatagcaacccccatagaaaccaccagaaaaactatcggagcaacccaaatcgtaatttttttttaaaaaagttaaaaattgatatatgggataattttcttaattttttagtgtttttaataatatgatattgactattaaattttattttatttttttaagaaaaatatttaatattcaaatacaaaatgtttttaattttaaaattttaaaatatctatattttaattatttgacattttttttatgaatcaagaatttcattgcacaactaacaaattgtgattacaagctatggctctccaaggattaaaaaaaatctatacatgtatcattttttaaacatcttcttataattctctaaaccaatccatgtcattttgaattatttgacattattaatataatatctcttataataaacattattaatttcttatatatatatggatatattagtggtatataaattaatatcaataatgaatttgtatcaatgatgctatatgcttcctcatccattactgtcatattttctttacttttatctaacaacccttctttttgttgctcactctccacttaactatccataatcttttttgtgatttcatattcaataatttcatgatcatggattaaatttactttattcactacacgacattcattatttgtcaagtaagaatttgatttagccaaattttaagttaataccacttcaaaaggatcttgatcttcaattgtaggctcaatcgcttccatgtattcaactaagggcacttcatcattattctaacaactcttataacttttgtta

SEQ ID NO: 267459 - DNA, 516 bp, Cannabis indica
tttttctgtatctcgaatggttgttatcttttttcatggagagatgccatatttttcttggagttcatcgatggtgaaaaattcatttcgggttcatgatattttgactatgattttgtgttttaaatggatattagaaaatgatagagcattgaaaatggaacaaaacccatcaatgggcgttgaaatcggtggtcggggctgttaaatatgaccgggtcgagaaacaggtcgtgtctattacagacctatggacccacgagtgggttatttcggtgatagggacaaggcaaacaacatgtcttttgcctctgtcaggcagaaaccacatgtcgttcgccccaaaggctagccacctcaacagaaaatgacgggtcattttgatccattggttaacatcattccgcccaaaaaacatgtcgttttcaaaaaatgacatgccgaacaaaccattaaaaagcaaaacaaatccatgtgcgtgggggtgcgtgaacaagccttttccaaactgttttt

SEQ ID NO: 267460 - DNA, 2624 bp, Cannabis indica
aaagggttttatttagggcacaaaacccaacatcatacactaccattaaagttcaattctataaatatgggctaaaaattacatatatactacatttatagcaccacattataaagatggtgtaaatatattttttaacccatgttcattattttaaactttaatggtggcgtataatgtggtctaaatttagcacatgctaaaagttgtgccaaatttagcacaaaatatagtatgaattaaattttatatcataacaaatattattttttatttacttttttgtacactcattaatgtaattaataaattttcacattattatttaatatttaatatagtttttatatatttttaataaaaatttaatatttttattgacttttttacacttttctattaaaataaagttattgtccaagtgtgctagtctaagtgtgcttcatggtttcaatcacgattttggcagctggttttccacggttcttgatactaagccaactgatgtttcggttgatgctgcaatggtgagttggagtatatggaatgctcggaatgatgccttttggaagagtaaaaatcagagtgctgctagtgttgtcctctcggcctgatccactctgcaacagtggagtgcagctcgtgtggagaagcatgggccgctgctggtgtctggtcctcatacggatcaggctcagtggaaaaaactgttgttaaacaccatcaaagtgaatgtggatggtgctatatttgcggaggaacacaagtatggctttggttgtgtggcctgtggggctaatgggagattaattgaggccatttcaagcagtcagttgggtattgtggggcctgagattgctgaagttatcggggtgaaggagactttgagttggattaagcgcaaaggatggatggaggtggagatcgagacggatgcgcttgtggtagtgtaggctgtcatgggctcaatccagatgccttcacagtttggtttttttgtacaagattgacgcaacttattgtcttgtattaatcatgtgtctttacattttgttaaacggtctgctaatagggcgactcattgtgttgcaagagcgtcttgttaccatttagatcgtatcttttgtgagcaagatgcccctcttgaacttatgtctattattgatgttgaatgtttatgaatgaataaatcatcttttgttcaaaaaaaaaagtttattttacccctagtacattaaaacacaattgtaaaatttgggctaaatataatattgactcactttttgagtcaaatttagcacaaaatttacaccatttattggagttagttataaggtggtgtttatacatattttatcctattttttataaattgaactccaatagtgttgtataatatgagtcaaattatattaaatttgacataaaatataacataggctaaatttacatcacaataaacatcatattttttaatttactcttttaccatttaatagtatattttacatttcatttatatatatttaatagaatttttatatactttcaataaaatttaaaatttttgttaattctttttaacttaattttacacctaatgcattgagcataattgtaaaaattagaccaaatataatattagtttattttttgagtaaaatttaatacaaattttacatcatttattggaaatagtcttaaagggatgctatatttcttcctaattgtagaattctttgttgctttgaagtctttagatttgatgggtcttaaaaaaatattgttaggctctcatattgaaaaaaaatgctaaagagcactcatgatacttaatactcttgtgagctatactattgttattggtgcaactcaatagttggtcccatttgttatactttaataaatattataggaaatcgttaaccaattatagtgtaacacttcatcgtggtgctagacatcataggtgtcccataacaatgctctaataaaatatgtagtatttctcaagaataataataaaaaaaatgtataattttaaaaggtaaaaaagttagggcctttagaataggtgggccctatgagcagacctaaccgactttaatctagggtcgactatggttacttttgttggattatcatatataaatatatatttttcttaaaaaaatctataacatacttgccaagagagattttttcgtacatctcctatctattttagcatttaggagaatttttgtttattttttatagtcatatacgttgtagttttttaagactatctgtaaatttttcaaaaaattctaaatagtttatagtatcaaaaataatgtttaaatgttttgttgcacacatggtgtgtagtaaataattgtttaaacttttatttttgttcatttataaatattatagttttttttttaaaaaaagaatttataaatgctcttaaatagttataacatacatgattataaaaaaaatgaactattttttttaaaatgtccaaaaacagtataaaaaagtgtaactataacttaacctataccacttctaaaaaaaacttacctaatgcttttatatatgttaaaaatataataaaaagatttttaaaaaatata

SEQ ID NO: 267461 - DNA, 1576 bp, Cannabis indica
aaaaatgatatagtgatgcttttcatgtgttgctgttatttttttagtctaataaaagttgactctaaacgtctacaatgacgctcagtgagtgagtgtaaaaaggtttagtgacatgcgtgaagggttactaaaaactttttttttagtcaccctcattagtgacgcgcaatgaattatcactgaacaggtttagagtcactaaaatccgtttttctagtagtgattaaatgtaccactggttaggtactttaataagtgtagtactagagaaatattaaacacctattcactggaataatacaagtgagaaaagaataaaaatggaccgaaaagatctacggaacttataaaaatcctagggtgaattcgaattatatgctcgcttcattgaatacatagaaaggttacactgatttaaagtgtaggaatatcgagttccaaatgggagaattagctttctccgagtattgtctatgaaaaggatatgtagaaagggaagttaaaccctaaattcattataccttttaatattggggtaaatacgctaggtagcctattagctagccttaacttctgtgttgtccagagtatataatgtgtttcatatctccatgctgagaaagtatgtaccggacccaatccatattctgagttataacaattttgatctaattaattttatggggaacagtttgtccaggttttggactagaaagaaaaagtattttagaataagacaattccactagttaaaagtgttgtagagaaacggcgtggtggaagaaacaacttgaaaaatagagttgtaaatgcttgagcagtatctcgaattgttcaagtaaatttggaggataaaatttctataaggaggggatggttgtaatatctcgaaaacttaattatgaataattatgttttattatatattatggatttattaggtagtaatgagtaggattatgatcctcctaacctaatttagcaaaaattgtaaatttgtctataagtggataaataagcgtaatttgataattatggatatttatttgaaatatgtggatataatgtaagttatttgtgagataaaaatattttcaagttcggtgaccttagagacccgattggaagccaaaaatgttacaacggtattagttagaaatattgttgggattattgggataagtggattttaaaaatatcagggtattttggggtactcggagttgaccaaataccctaaaagtgaaagtttcttagtgactaaaaaatgataagataattattaatattattgttattgttataaatattaataattatgtagatgtccaaatcttttatttattaccattaattgtaatcaacattcatcttttcttagtttccctttttcttagtttcttagtatttgactcttgtagttgtataaataggggttcaccctattagaataaacaactgaggaattctcattcactttctctttctctcttcatctttttcttctttcttctcatctattctatattattttatattatcagcacgagtctctgcccaagcttcaagcatg

SEQ ID NO: 267462 - DNA, 2091 bp, Cannabis indica
aaaatggtatttaccctttcaaaaaataatccctaaatacattttaatttgttatttattttttcttaataatccctaaataaatcctttgaacaaaataaagattagaaagatacaggacgtgatgtggcctaattgaatagtagattatggctgagctaggcaccacagaggccaaaggagaggagagagaagaccagaaaattctagaagagaagaagaagaagatgaagaagcacaaatacaagcaaacatttgcatacaacaaataaataaataacataaatataagagttccttgccaaaatagcgtagtgcaatttgcactctaagctaagcctccaataaacctgaagcttttctttgatctcagaacagaatcaataatcaatcgacaatggaaggtggatcgtcctgagcttcagtgcgttggcaagttggagattgccagtcccaagccccttggcttcctctgcggctctattcctgttcccactgaccgatcctttcattctttcaactcctcttctgatctcattccttctccccaaacgtccgtactctctctctctctctctatatatatatatatttatatatatacgtgtttgatgaattggagtcatgaagtttttgtgatgatgatgctttagtttgtttctttatcctctttctacagtgtgactgctcctcgttatcgcatgcttccaacggagactgatcttaatagccctcctctactctccacttttccagataaggttcttccaattgtcaggcccagtgaaggaggtatttttcatcttcatattgacattcaatttgatgcttatcaacaaaactatgcttcttctatttagacactctcattcacatggtttaggatgaatgggtgaggtgttagttttgcctgtgctactttatggaagctacttggatattaactagagtgttgatgggtctgtggcaatacaagaagatatagttgttgattgtggatgaggaggaagtagtggggaatttagaaaatttatgcgctttttaacatatgccatgattctaaggtggttattgaactcactctcgagcaagcagcgtcacagcttgatgcttgtatagggacaaaaagccaagggcagtgagaactctagattaggcctctaacccaacattcttgtgtgcataggaaatgagttacaaatttgatcttttgaggtgtgaaactaacaagttaattaggaaactttctttggtactattgttagcgttattgatgatgactttaggttactttcttgaggattattgagtttttatgtaatttgacctattagattttagtatttttacccattagaaattttgcaccggactccttcaagctcttggtttgagtagcaaaagtgtaaccactaattaaatgtattaaatgaagtgttacttcacacagttggaacagtcaagtgactttagacttggaaaatacgatttagttccatttagttacctcttcctaaaatgacgatagctatgtagaactgtgaggtgttagcaattctttagtttgttggaaagaaacattaatgaaaaggaatggatttattttcttcgtgggagaaaattaagttacttatcatcttttattatttcccctctttctactgtactttcttttcttaaatatataaattatgttccttgcttcactttgggcttcggcaacagaatttaaatactccactttctccacttattcttaattggaaaacaatataaatcttctgttctactttgagaattactcttcatatacactttctcattctttgtattatagggattgttatcaatgataaaagtagtctttgtttgcttcaaaaaagaaaaaaggagggggcatatggattgagaatagataagtaatctttaattacaggagttgggtattgtgcttttatcaaagcactaggtcagttctagaagaagctgctgtgactccaagaacacctaaacctttcacttattataactatgaatattatgattgttactgttataactgtatcaatatattaaaatcattaatacttt

SEQ ID NO: 267463 - DNA, 1884 bp, Cannabis indica
aaatcaatcaatcaattattttataaaaaaattaattttaaatattcaaatttaatttatttatttaaatatagcttagataataatttaaaagtcttttattattaaatcttaatttaaatttaaattaaatattaattcaactaattaatcataattaatttaaaactagatatattaatttaaaactaaataaatatatttaaattattaatttgtttaataaattagttaaatatatttttttataaataaatttaaaattagattaattaattttatatatttaaaaaagtataattaaattatattagatttaattgtaattattattacttaaattaataattaagtaatagcaactttaatacaattctaagaaagcatgcaatgtatgttactaatacctagtatatatatttaaatgttattaacagttaagatatgtgagctttagttgagcttttattgaaaagttttactgtcggttcttagtggtcacatatgtgtatgcgaccatattaaattggcggtaatgctactattagtgttggtattttatcgacactcaatttcattaccgtcgttccccaaaaaattgttttttttttgaaccaacaggaatgcccatttttctagtagggtacgaaggaaacaaccttggccctcgaaaccccgagaagagtagcatcatctgctcacaagatcccgacatgttcatttttgagtgttttcttcaacagtctaagtgaatgagtcgttatgacaccgaaatgggatttagaaactgaagatgtcgctaaacatcataaaacaccacttggggggcgaccccaagtgaacaccctactcatatggctcttttcctttgtttgtagtggttctagttcattgtcttatcacaataggaaattaactccaggattgcaatcgagtgtacaaatggttagccacactttagccctgagcctcgaaactcacatagtatgagttagtcaccaaagggcacccaggtgagcttcttgctccctaaatagcacgacagctagggttttggttttggtgtccaaagtgtatccgattccaaaaaattgaccaggaacaatgtttgcaattaattttttacatctggtccccaagtggaacacacacaacagccacggccttggagagtcttccttggctcactgggtgctctttggtgacttactcaatatgttcatccgggtcaatttctgtgttagaattagtttctagagttggtttttacatagaggatcatccaataacttacgccacctagtgggaaccaaggtggatctggctagggtttcaggggaatttcactcattttccttccaatgatagtaaatacgagcaggggtgttcataaatatctaatccaatctaaactgcacgatccaatccaattcaatccacaaaggggggatatccgcacttgtgcagattgaatgttgacatgtaaaagtaactgattcattccaatccacaaatattttttaaaatatatatatgtacaattaatattttaatgtaaaaaattacaaataaaaaatttaatacatatgatacaaatatattccaaaacatagtagattaaatgtatattccattcttatttataaggaaaatataatctaaaacaaaattaaatatttttttatacatacaatttatttttcttcttgttttaaattgttattttttatttaatttattgttggagacataaaacgaaaataatttattttatttcattgttagttatgtgaattatttttgataaatattaagtaattaaatattaaaaaaagtaaccaatacagttgtaacgtcccgtttcaagcttccattgggccctta

SEQ ID NO: 267464 - DNA, 552 bp, Cannabis indica
aaagtaagatttttgtagtgaaacaaaaatttagattttgtatatgaaaagttatttctaaaaatgtgattgttgttgtgttatttaatgttttgatttttacaaaaattgaagttgtgattggttgaaatcaaactaaaaaaattagagaatatttgatgaaaattattacttaatatttgagaaaattttatcatagtttattcaagtgattattattggggttctatatcaaaactaattaatgattagtggaataattcaatatttttacattaatttgttcattgtggaacaatataatcgaataaaaaacatttagcttggaagagaagagtagtgctaagaacactctctatcacactctcttttgcactctctagttaatttaatgacaaatgtcatcttttcaacaagacttaattttacttaataactagtcatgatatcatacttttattacaattatgtcattcccactaatttgctcaaataatttttaatttattgaaaaataaatattttaaagaaaataagtcataataaaaataa

SEQ ID NO: 267465 - DNA, 1027 bp, Cannabis indica
ggattccgatcccaatctaaagatgactaatgcaattagatggcgaactcgatttcattttgagagcgcttggtctgaagatgatgagtgcacgcagattgtgcatttggtgtggcaaaaagacaagcagctttctaatgcgaaggagcttaagaacaggctgggtaagtgtggggaggctcttcaccaatggaacaaaataaagaagcaagagatgacaaggcaactaagggaatgtgaagataaaattgctatactgtccaaaagtaccaacgaaatggactggcaacaaatgcaagagctggaaaggaaacagaatgtatggttagataaggaggagaaattttggaaggaaaggagtagagcggtttggctaaaagaaggggataagaacacaaagtttttccatagaaaggcaagcaataggaaaacaaaaaacactatccatggattatttgatgatcggcttcagtgggtaacagggaatcggaatattggtcgggtggcttgtgattacttcaaacaattgttctcatctactccggcgtcaaagaaggaattagatgattcccaaagcattattcctaaccgattttctagagctactaacgagtacctcctggagccttttaacagtgaagaagttttcaaagctatgcgtgatattaacccacataaagccccatgcagggacgggtttcctggacttttttatagacaatattggccaacaattgggactgaagtgacaaaaatctgccttggaatcctcaatgatgggatgcgagttcaggatatcaatgacacacttatctgcctcattccaaaaatctcaaagccatctcgaatgtctgaatttcgtcctataagtctctgcaacgtgatatataaaatagtggctaaatgccttgctggccgaatgaagacaagtatgcaccaagcaattttctgaggaacaaagtgctttcgtggggggtagacttattcaagacaatgccataatcgggtttgaaagcctccattgtat

SEQ ID NO: 267466 - DNA, 1207 bp, Cannabis indica
atatattttatattatacatataaaatgtctaacaaagattagatgtgttccaaattttttccataatcacttgtcgaaatttaaagagcatgtttggaagggtcttcatttgggattgtgcttttcaaaccaagctgaaaaatgaccttcttggtggatgtcaccgcctcctaattcctttgttcttgcgactgatgcttcagtagttcctgggaggggctttgtcagattgggttgaatagtacgggatgttgcgttgtggtttggttagcttggtcatttggtgttttaagttattttttttgtttatgtgacagagcttcttataattagactgggcctgacttttgcgaattaatttggttttagtatttctattattactagtgattctactgtgacaattggttagattaataatctttactcaaattttatttttcaatctactgtattagatattaattctttattagcttctatttgtactagtttttgcagtgtcgtttcgcgatttacgaatattgttgcccacacatttgcaacctctattataagtttagtagagttcgtatgaacggatgtttgtccacaaattctgtgctcttttgtaataaattcatcaaaataaattatgtttttcttaaaaaaaaattggcatccaaaaaatttagaaatatggtccaaatatctgtaaaattatggatatttagttccttagtaataatatagccaataaaatacgaatcttgtgaaatttttttgacacaatcaaaagtaggacctcgaaaaagttcagcaggtcacaattggggtcaaaatcattgagtgaaatctgtaaattcatttttgaaaaatgtaaatgaagatgtgcttttagtcaaatcatgtcgtctttattagtgtgtccttggagaacactgttatgaaacagtgtacacttgtcgatgaagaaacatgaaacattcatgttaccgtaggttaatagcgtaatcccatgtcgacacgtgtccttgtcagttaattttcattgttttgaaatgatagtgaaatccacatggatttaataataatgtaaggcccccattatgatttgtgaacaaaacaaaagctgtacaacagtacactcacaaaggtctcgatacgtcattttttactgttcccttatctaacagtggcaattcttacgaatcaatatgctttaat

SEQ ID NO: 267467 - DNA, 2359 bp, Cannabis indica
aaaaataaagaagaaaagagaaaaagcttgagattacctactaaaattgtggttaggaatctccaactctttgtaatcgtttttgacatggatagtgaagaatcaagcatcttcgaaggaagcttgacggagatgtacccttgattttgaggggaactccgaaatcaatctctttgtcatcttgctattatttttctgcctctattttcgggtctcttttcaataactaacaaatatcattttagatctttgctgtcactatttttctggtgtttatttggttgtacaggttcgggtatggagggctttgtttgaagctagaagaagagaagtagagaaagagggctaggctgcggtttgaagattattgggaatgcaactaaagtcccacattggctaggaatggaaagaattatgggtatgtaaggtgttccatcttatccattagtatgaggcattttgggaaggtgcccaaaaaaaaaccgtgaggggttaggcccaaagccgacaatatcatactaatgtgggagaaggtgaggtagcggggtccaacaagtcgtatcagagcaaaaagtttaagagcgctgagatagtgggctgcatttgcaatgtgtggaagaaaccctcattgtgatgacctcgcaattaaagatctatatggtgtctttgtatcgaaagtctacctgatatggaggtagcttctttcaatccatgggttcaagatggtgtatagctttcttgtctgctatgcttttggtgaatggcaactggtgggtgccagtgcatgggcgaagtttgtgtcgagattttgtgggccctctcatctcattaaaagcctccctcctgagagtaaagatatgttaatttgaaaagatattgttgatggaagcttctcggtgaaacacgcctatagatttttggtttcctcaagagtaagcccttgcaatgagatctagaaggtcctctagaaggccccaattcatgaagaactaaagttttcttatggaagttgggaagaaatatgttgccaataggacatcgtctccaagctttttggcaatggtttaaattgcattatttgtagtgtcgtgaatattatctgcttcatctattctgttactattctttggctagacaaatttggttatctagtccttgaaatatttgtagcgacggacttagttttgattttgtggtgtggtggattcataagccacctgatttttttccttcatcttttcccgttcttgaatcttttcctaatttcgttgtactttggatttttagacttactaatgttagtgctcatagattagtggcttagactttggtttgttttgtacaattattttcgttataaaatatatatatcaaatgagtattattaaaaatacaaaataacaatgactccatgttctggtgtagtttcccttgaggtggcagaaggcaaagcaatccttacagcccttgagtggattcaagcagttaagcttcctatttcggctattgcctcggattgtcaaagtgtgatcgataaaatttacaactcttattgtaataattctgttcttagtgatgttgttaattgtattaagaattcattgttgttcagtcctaacctgtctgtaatttatgtaccaagggattgtaataagatagctcatctccatgccaaaacaggattaggattagacaataaatgtacttggaatggttctctaccttccaatctaacctgaatctttgtactacttggtttttatatttgaaggatttcaggttttagtcaaaaaaaaaaaaaaaaaaaaaaaaataaaaaaatactttgtaaaagcatagttacctacctttgttttttttttatttagaaaatatttatatagaaaattgtatattttgaaagggaatgaattttgtgccccttactaaggacaaatagtagtttcacgtatatgaatgaaacactattcattaattttcaactattgattatgatagatgtcttactttctttcttgttacatctgaatacgaaacctttgactttttttactttgcattgcataattggaacaacttattacaactctatccaaaatgtttctttagcccaaaaaaaaaaagaacattaatttatgtagagcctatagtgtagattatagtgtagatgaagttaaaccaaaaccccactgatgatcaaattgcacttgcaaaaaaatacagtgctttccattttttatttttgtaaaaaagaaagcttacatgatatgctctttttttcttttctcaatatattaattatcaagtctaaaatgttaattgctaaagaatatagtaaattccaaatcttcaaactctt

SEQ ID NO: 267468 - DNA, 2657 bp, Cannabis indica
tctatttggctttggaactaatatagagtttgagactcagattgtgtagaaggcttctttgatgaatttattgttccaaagtttttccacctcttcctttagtgcattggctctctctttgtcgagcaatctccttttctgttgaatcagcttaaagttgtcgatatttattttaaagcatgacttatcacgatggggcttattccctctatgtcttcgtgtgaccaggcaaaaacttcttggttctcccttaagatctggatcaagtcagatctgatgtccttagggaattctttactaatcttgattagtctagagggttgtttggggtctaatggaacctcttcaactcttcaatttgaccaacccctgtatcagtatccccaaaatggggatcaatgtcttcgaccctgttttgggcgagtccttaatgctgacaagtactactatagatttgagggatttggatgcttttcccctagttgtgatggataggttgtaacactcccgtgctactagttggttacccttcaggcagcctattccacccttggtaggaaacttgatgaggaggtgaaagatggatgcgaccgcatttaggtcgtatagggctggatggccaatcaaggcattgtatggtgatacgatatccaataccacaaacaatgccatagtagtgacactcttggggattgttcccacagtcaatggtaggctaatgagcccagctagtgccataccatttcctgtgaatccatatatgagatgttcacaggtttctaaatcctttggtcccaaacccatcctctccaatgtggacatgaagaggatattggttaatgacctattatcaatcattgttcttgctactatcatattggtgatttgtacttctaccactaaagggtcattgtgtgggtatcaaatgtggctggtgtcatcctcagagaatgtgattgattcatatttatatcgaggttgttcgagagctcgctcatggaccgccaacacatcgtcactcagctcatgtctaagagactaagtaattttccttgggaatttttggagtttttagccaaatgacgtcatctagatatcacatctaagcaacccataacaggaggaggtaacagtttttggtcatccccagccacctgttgttgttgccgtgggagttgattgttgtcacgacgtacgtatctcctcaaataggggttgtcttgtctgatgcggaactcttttttttacttcagattgttgcactcattagtgtcatgactgtaatcattgtggatttggaaaaacttgttcatgtctcctttgctaatattctttctcatgggataaggcttacgatatggcaccactgagtgagttgcattgtagatgttttctctaattttaaggaggatgttgtaggtagtgaaccttagggcttgatcctgcctagttaactcagggctattctttggttgcttgctatcattgttgttattaccggcactattgatattccccctcttgccattgttggagccattcttaccattgcctccctgagagctttggctatttgagcttgttctgttctttttgttcttagcttagttgaagccttgagcattttgctcggcttcttccaatttaatgaactcatcaatcctgtccaagaaatctcgcatggtatgggttagtttctgccttgtatctttcgacggccgacttcctactagaatgcccccatgatagcaacctatttgccatcatcacttagatttctcaccttagttgctttgcacaaagcactggatatagtctttaagcaactcgtcaggattttgcttgacggcaactaagtcactcaattttaccagtgtgtatcagactgaagaaaactgggtatagaataacccttcaaacttgtcccaacaagtgatcctccctggggtaatttggtgaaccactattgcgctttgttcgtgagggttgcaggaaagattggacatctgaggtcatccctaatcccttgaaggtccaattggatttttaatttttaacatgagttagagggtcttcattacccgtgtacttgcaagtagacattttgaattttgctagaatagggaggtcattgatcgtttttgagaaagcagaccccctcctcctttctagttctaagtcaatgtgttacggtgtagtaagatccttgactagttgagttaactcatccaaccaagccttacacgttcaaagactgatccggatcttggccttcctcctgcattttgactgtcagcccttccattgactagaggaggtatttggccatctctacccttttgaggaagatttttgggttgatgttgcctattaggggcatacgacccttcgacttggtaaccgccagcctaggattcagttcgtcattggcccgactttcagcttcgtcattgccatgaccatcggagtagttaggatgataatcacaattgatctcggggtcttcccttctccctctgggcttactatttctcaggtaatcattgccctctcatggtttgttgtagggctgccactcctagtgttgggttgtccttccaccatctctacaatggtcaccattattaaatcctagagtttcccctacccctctcatt

SEQ ID NO: 267469 - DNA, 747 bp, Cannabis indica
gatattaggaatgtggtcatatatgaccaatattattaagtatgtatttagggaaaaaaaattaagattttctaagtatagaaaatcaaatttcccttttgtttttggaagagtctaataacttaatcaatctttttgaaattttattaatgtgtagattagtgtattagtaaatataaacagtgctgcttagaaaaaataaaactaaagtaacaataagacaaactttttatggaagagatgtctattatatcttattaggatgtaaaaagttatttctttcttttttttgctgaagatggaagagaagttttaggggttaataataataataataataagagaaaaaaacagcacattttacaaaatggctttatataactttacaatggacaaatatatactagaaaacaacaatattaattttacagcataatatataggaaacaagtcttcaaatctaatataagtaactagtcttattcacaactaagcaagcttacacatacattcatttcataggggtctagtttctttacatactggcatctcatgagtctgtttcaattttcaccctcacatctccctttggcttcttcttctcaacttctggagagttattggctgaacacaatgtagcagttcaatggtttagtactataattcacaggagcacacaaaaactaaacacagtacagaactacatcaatgtttaaaaaaattcacaactgaccttgagacctttct

SEQ ID NO: 267470 - DNA, 1782 bp, Cannabis indica
aatccagtaggcaagtagctaggcttatagctatgtacatcactgcaaagcaggtgtactaaattattgaatatgtcatttctgtaactcccgcgcatttatttccgaaatttcaagtatagctagacattaattatcttttttaaaagaaaaaacagtgtcacactacttctcattatcttactaccaaacaccactgacgactcatgcagatgtgaaacaaaaagaaaacgtaaaaaaaaaaaaaataacttacatttacagcagtcaaagtaaaaaaaatgcttatctggtaaatttaataaatggaactgcaaaattatcattgaaatagtctaacgtttgtgttgaattaattttttcatcagttaattttgttttttgagtttaccaaaaaggaaaaaatcaaaattgaccgaggaataaataattaatgagcagaaaagccaaaaagagagaagcgtttctaacatgttatatatgtgtactgtactagtaatagtattactatataacatctcttttgttgttgatgtcgtttgtgtccgttaccacaaccacttcttcctctcagtctccaccatcactcacccaccagcttatacatttttaaggcatattctctctcgatttcagaggtgggctttttcgtatttctagcgccattggcggggtacttttggaaaattaaattaaatatggtaaaaaagtggggcccagccgaacaattcgggtcaagagagtcagggcgtgtcttaagggcgactctcgttttaagggtttttatttttgggatgttgatgtttttgaagtttgtttgggacccacgcgctgtttagacagtgaggattaaaacgtaagacgtggctcttccccgctcattttagttttttttccacaaacagatgccatctcttcttcttactactttttatttttattttatttattatttgcgtctagattttttttttgaagagatttacgtctagattttatacagtgttattaatacaatggttcttacatcttataacaaaactacaagaatcattctctttttttcttttttgaaaaggctacgagaatcaatcttaaatttacaaatcattaatttgtgacaaatcatatacaactctcataatatatagtactgatcaatatttgtacaaaattttcaatgacacgtaattaatttggcatataattaaaattttacaataattagattttatattgtagttactttccatttcagttaattataggaccacaactttacttcttatgtaatattctatttaagataatcctataccatgcttattttttcttatcttttttgaaagggataaaatcgcaaatttgtttaggttaagtttaagtaaaacatatacatttaaattacatatgatttttttttaagtaaataaaaaaccctaaataaaacctcaaaacattaatcataaaaatctacctgtaaagcagtagcaatgcaatcttagtaatcgttaagaatcatggggttccatcttaaaattaattggtgatgagtagagtagtccatgttcttatatatatggctcaatactttcacatttaatccatgtgggacaataatctccaatattttccctcaagacggtggctattattcttgaatcaccttatcacaggccatgccatttgctcgcttattttttatttcggatctcaagcatctttgcaccatctagatttcgtgcggctggctaaccatctgaataggtgtggatcgaaaag

SEQ ID NO: 267471 - DNA, 1584 bp, Cannabis indica
ttttgtcattaaaatattcattaagccagccaggaatgagatgccttttcaatatccaatgctacaaactgttccataatcatatttctacatgcttatatctatatacatatatatatatgttacatgtaacccccaactttcactagtatagacttactctgcttttcatcatgcccattcctccatatatactttctctttctctttctctcaaagaaagattatttctcttctaaagaaaaaacagagcaaaatacagagagagagagagatgggaggtgggaattcatggagaaagatgaagaactctctaaacgacaccgtttcaaagagctttataggtaaatacttcaagttagaagcaagaaagagttgtttcaccacagaacttcgagctgggctagccacttttctcactatggcttatattataacagtcaacgcaaccatcatcgccgactcaggagggacttgttccgttgccgattgttccgctccggtcaaccaggctgccacgtcagattgcatggtcacgcccaacgctggttaccaagcttgtctttcaacaaccaagagtgacctcattgtggccactgttctatcagccatggtgggttccattgctatgggagtcttggccaaccttcctttgggcctcgctcctggaatgggcccaaatgcttatcttgcttataacttggtgggctttcatggaacaggcccaatgtcttaccaaaccgctctagctgtggttttggtcgagggatgtgtgtttcttgctttatctgcacttgggctcagggctaagctggctaggctcatacctcatacggttcggcttgcttgtgctgcgggaattgggctttttattgcctttgtgggccttcaggcccaccaaggaataggccttattgggccgaactcatctacattggttaccatcactgcttgttccaaaacaaacccagagaccggtgagtgccttggtgggacaatgagaagcccaacattttggttgggatcagttggtttcttagttacaagttatggcttaatgagaaacattaaaggtagtatgatttatggtattctttttgtgacattggtatcatggtttagaaacacttctgttacatattttcctagtaatccacttggtgacacaaaatttgagtatttcaaaaaagtggttgattttcatgaaatccaaaaaacagccggggccattagctttacaaactttaacaaaagtgaggtttgggtggcattagtgaccttattgtatgtagatgttatggccacaacaggcacattgtacactatggctgaaattggaggctttgtaaatgagcaaggaagctttgaaggtgagtacttggcatacattgttgatgcaggatcaactattgttggctcaacactaggagttacaacagttgccacatacatagaatctgcggccgggttgaaagaaggcggtcggacggggttaacagctgttgtcatcggtttctgcttcttcgtttcgcttttcttcactcctcttctttcaagtgtccctccatgggccataggaccttc

SEQ ID NO: 267472 - DNA, 840 bp, Cannabis indica
tgtgtgcttttacaaacttaataatactaatcatttagtttagtaaaagtgtggtttaattaaaaacctttaattaaatatagaataaaactttacaaatcaaatattattggaatatgaggatcccctactaataaaattcttttacaaataatttacaaaatgaataatataagagtaggttatacattcagtcatagaaatgggttgatcctgcttctcgaaagccaagacaacaaggttgatatgtacactgcttggagacctctggctcatggctaaacagaaatgctaatcttcttacctgcatcatgaagcacccgtgagtcacaatgactcatcaagaaaagctactagacaaaagtatagtaagtactagcgtacaacataatatacgtttcattgattcattacatatctagcatgtatatacgtatcagtacgtctatgcgaacatattcataacacatgtaagaacattcatagcaactcataattaacaattttactaaataaacattcattcaatccatagctatataatcttagtgctttgtaaagcactctattcatacatcattgtaatcacattatttcagtgttatattaagcactctacttacacaataccataatcacctgaactcggtgctttataaagcacccttcccactcgttatcaacgagctatatatgtcactatcattgctcgataacgggaacaataagtaataagaaacctatctttggtttcaacaattaattactcataacggtaatgaccgtatcttttacttgatcataatcgagtcacaacgatattaatcgtttcatatcatt

SEQ ID NO: 267473 - DNA, 1134 bp, Cannabis indica
ttcaggttatcgggttaagtcggtttaattggggggtgactttattttcaacccacccaatatacaaattgggcattttttttggtcaattttttcggttggtttaggtgtgttattcagtttaggcggtttacgataatatatgtacagccctattagataccaaattttttgttcaatcaacttctcttcaatacaattctttcaatactttttttatatcccccaaaattctatttttgaaaaagggttattgaatcttcaagaattactcgaggggctttctcataaggcatctgctaagttcccttacttttttttttgaaacgaaaatgtgcattgataacattagacctcacggtcattacaaaggatattgtttgggagcgaagaaacacacaatcgcccatatcgattgttagtgaaagcccagttagccacattatgggccattaagttacaagatctgtcaacaaaagaaaaattataaacatcataaaactgagagagttgtttacaaaatttagcatagttatcaatttcctagcgaatatccagatcgttgagcgaattgataactaccttagactcactctactaatatatttccaatttttttctccttagccacttccaaactcaagcagcacgcggccgcttcaccgcagagagcatcatagaactcaaatctagcagaatgaaccccacaaaccactccaagttgatttctagccacaactgcaatgcacatactttccatcctaactctaacatcacaatttagttttatccacccacacgcgcgggggggaggggggggggcgggcaccaagcttcttccagatacggggaaggagatggtgaataagaatctctgtaatctgcatacgagtaataaatataatcaacaatctggtaaatgttggacacacttcgattgtgtaccttatcattccgcgcccgccaaatagtatcgacaacaatcgaagcatacagaaacacttcatcgtattaatgccttgttttcctagaccccagatgaatttgatccagtcccacgcgaatgcctgagtcagaaattgggaagatcccccagggggacgattgccatagatgagtcgcctagttacagtt

SEQ ID NO: 267474 - DNA, 861 bp, Cannabis indica
tacttccctacgtctctctctctctctctctctctctctctcactctctctctctctctgaagccccaatctttactgtagtggacaaagagggaggggtatcatgtgtctgaaactgaaagcttgggaccaaacgttgtcgttttatttgtcaaacacaagacggtagtttgtttttagattaacgacgccgtttcgcctctcactgccttcagtcaaacaattacaaaagtctagatcgcagccaattatattcttgccttcaaaacttggttttattcctttattcttctggctattttcggtactctcttattcggataaccttttttatttgtttggattcacattctgtaataaattttgtgaaattatggaacaaagaaaggggttaggattggtttaacaattttttttttctttttttcagaaagactcttcaaaatgttgtttgagaaatataattcagattattgagtaaaattactaatgagaaatcaagacaaaagccacacaaactcatttgcggaataagagaaaagaagaaatttacttatacggaataggggtgcacacggatcgggttttcgactttttggggtttcgggttcgggttttcgggcttcgggttttggaagtgcacaaccgaacccagtattcgggtgtgcgggtgcgccgggtatcgggtcggattttttcgggttgggtgtagtcgggttcggatcctattggtattctattaaatctatttttttttttttttgtgaacctattaaatctatttactacatacagatagtaatgatataccttttttttgttttttggaataatagtaatgatattaattattagggccta

SEQ ID NO: 267475 - DNA, 1331 bp, Cannabis indica
aaaagagattgatgttggaactaagtaacccgaggttaatatgactcaggttaaggattcaaagaaaattggaggaagtggattagggaatgtatggcatcaacttcagttgccataattataaatggaaaaccaagataaaagatcttgggttctaggggcttaggtaaggtgatcttcttttcccttttctatttatattagtggtgatgtgttaggaagaaagattgacaaatcaggagagtctaagaagttatttggattcttggtatggaaggagaagatccaagttagccatttacagtttgtagatgatacgttactttttgtaaaaggcgagatgtcattgagtaatatggttttagtggttaatgcattctgtgcgatctcaggattagagagttaacatgagaaaagagtcaaaatatttaggtattttcttggaggagagcgtgatttctaggtctgctttatccaccgagtgtcaggtagagaaacttgctaataaaatatcttggaatgcctttacggggatcccctaatagaattgagttttggaggccacttattgaaaaatgtacaaagaggatggatggttagaaatgttccttcttgacaaagggggggggggaggagattaacacttatccaatcagttatttcctctcttcctatttactacctttttctatttaaagcaccaaagatgatgctacaaacatttgagaggatgatgacaaactttctttgggaaggtggtgatctttcgaaaggtgaacacctgcttgcttgggaggaagtgtgtaaacagaaagcggaagagggactagaaattaggagactggatgcacaaaacaagggattgttgaagaaagggctatggagatttccttgtgaaaaagattcacttcatcataaagtgatcaaaagtcattattgaatatcagataacttttgggacaccaaattaggtgagagaatgtcctccgaggaccttggaaaggaatttcatggcaatatggtaaatacttaagtttagtgtcatttcaggtagggaatctggttttggaaagatgtgtggattggagagaactcattgttgaattcctacccgaaattagcaattttggctagatcaaagagcatgtgcatcaaagatatgccaatagtagaggaaggtagctttagggtgatcaattgagactctaatttcaggagaaaatttttggacagggaagttttgagcctaaagggtttgttgcagtgttatgaacatgtgaacttttcccatatatcaattgattgtagaggttggacgccaaaatttggag

SEQ ID NO: 267476 - DNA, 775 bp, Cannabis indica
aattaatatattttttaaaataaaataattaaatatataaaattataaatattaaatattattaattattggatggacattatattggattggatcgattcagttatccatattggattgcatgtctcatccaacatccgatccgatccaattgaatttttaaaatttatatccgatccgatccaattatgattggatatccgattttattagattggattggatcggatgactttctgcacacccctatctaaaaatatatgaaaaggatcaatacccagatgaaaaataatcccaaaaaacaattttttttttttttaatctttctctcttaatgaaccagaagaatgttggagaagggagactttaagaggaagagcgtggaagtttataaatagaagaactgacgaagccttttcaccccacatacatatacatacaaaaaagttgaccataatttaagtaaaaaggaaaattgaaaaacgtaagagagagaaagaaacaaattgactgatttagagagagaagaagaagaagaagaaaacgtacaatagcaaagaggtgatctaggaagaaaggaaagaaggtcacttctccccttgtgctcttctctctctacctctggctctgggtctgctctggttgggtttttgttgtttgaagtaaggagagagagaagagagagaattaagagagagaaagtgaaagagaaagagaatgagagctctaataggcgcagatttctcctcttcatgtttctgtttttggctatttg

SEQ ID NO: 267477 - DNA, 1125 bp, Cannabis indica
agggaggcattcgatttcgatccttgatagaggagttggtggtgtagtgggagagctagaaatagaaatagaaatctcacatatacaaagagaattagtaaaaattattaatatatttaatcataattaaaagtaatgagtaattagttaataaaaaataaataaataaataaataattaggcctaggttcgggttaccccctttttttttctttttttctttttaggtttattttattacagcgacagtcaaatcacgggtaaatactatactatactattactgtccattgtcaaaggccttcgcgctgtattttgctctttgtaatgttaaccaagacggcccaagcgctgggcgagctgaagtcccgtcatttgcttgcacggatgtagtgagaaattaaacagaaaaggtaaattagtaaaaaaaaaaaaaagtcaattgtggtaaaattcccaataattcaacttttttaacaatgatgaactctcaaaatttaaattttagtggtaaaatatcaaaacccttttccatctaaattttagcacttaaatgtcatattgggatgtcgatttgacaaaaatgtacatgtgacagagagcatgaagtgatgattgcagggctaccattagccaaagaagtcggagcccagaacatcgaactttatagtgactctcaactggtagtaaattagatgtacggagaataccaaataaaaggtgagaaagtgactagttacgtatcaaaatctcgagttcaaagttttaaaagatactttattaaacaagttcttcgggaccaaaatactttcacgaatatgttggcgaaattagcaatagatctagacatggaaaagtacagactagttcccatagctcacctagccattccaagcacagaatcactaggagtaagcatcattgatcattcaacttcctgaataggccccatctacaagtttttgagctctggagagcttcagaatgatagagcagtcgcttagaaggtataataccaagctctgtgatatttgctcctatatggaaagttataccgaagagggttatcgatactgtttctgagtgttgcccctgattttgtccaaaatacgtggaccaaccaga

SEQ ID NO: 267478 - DNA, 981 bp, Cannabis indica
tttggaaggaaaatgtagcaaacaaaactatttattaatagacaaattgttcgtagtaatgatcaaagcttattatgtatcctaactaaatatccagtaaatgtctgtcaaaataaataaataaataaataaatccaataaatgtcataatatgtagggtaataaaaaattaatggcaaattacttcatatactattttttaacttttttttttttaaatttacggtttgtgtttctaaggtggtttcttcggtaatttttatgtgagttgctatacgaatttcgattgcaatttaagttgttctattagttgcaataaatatttctatgtagaatttcataaaaatacaaaaaataattattttaaagtgtaaaagtaaaagagcccctaaattattttattattaatatatttattgagtttaattgatgaaatatttttctatttaatttgttacttatttttatttttcgattaattatgtaaaatttcacctatatagatataatatatatgtcgcatctaaaagaattagtaagagtttggaagcttgataccgatactaattctcgtttttttatttttgtagatctaaaatttttaatcgaggttattaaaatcaatgattagaggtacatatatttgtggaggtacatatgttatgtctgtaatcaactctctatgtgttttttatcttataatttttcgtttatttctagaatgtgtaattttgctgcccacaatgtggctaaatgggccttcacccagaacattacaggattcgtggagctatccttgatacctagaactatcatttgtaatgactgcgaggtctaactatatttatatataccgctttggtttcaaaaaaaaaagaaagaagaagaggtacatatattcgatattcctttttatatatgttagatctatatattaattcttcataatataagagtgtgaaaataattagatttccaatt

SEQ ID NO: 267479 - DNA, 969 bp, Cannabis indica
atgacccgtcaaaatgcgatttccaaattcgcttatcatcaacattttctagtggggactctttttcttgttccattttttggctcaatattcttttctgaacttgtcctttgtttatccgtgcactcggctacgaaatctgccaaggcttgaccctttattattgtttagggctgataggtaatttcatactatcctagctcaatttccatttgagtagccgacaagaggcgtctggcttttccaagacttagaacaaaggttagtcggtatgtactatgatggggtgagcttggaagtataatcgtaacttctttgatgttaggagtaagcaataagttagtttcacgatcagaggatatcaactttcaccatcaattaacctttgtctaacatagtagaccaaatgttgggtattttttttcttctttgatcagcatgtcaattactccatatttgatgcaaggtatattcccagttcttctttgtgcagaggttttgataggattggaggctatgtgagttggttctctagttcttgaaaagcttctttacactctttagtccattcaaactttttgctaccttagaagacgttgaagaaaggaacacatttatctgttgattttaacacaaatctacatagtgcgactatccagctagttaagctttgtacttccttgacctttgtttgcggcttcatattcataagggcttgaattttatttttgttggcttctattccccaatcattgacaataaaacaaagaaaatacccgagctaacctcgaaggaaaactggggggattgagtttcttgttgtattttctgaggatttttaaacattcatctaggtcctctatatgacctcaacctgtctggatttaatgagcatgtcgtccatctatacttccatgttacactcaatctttgtacttccatgtgatcaagatgtttcttgagattatc

SEQ ID NO: 267480 - DNA, 584 bp, Cannabis indica
tttttttaatcttttttttctttcaatccatataatgtagtaataataaaaaattctaatataatataaagttaaacataaaaaaactatcaatttttaataagtgcacaattaattttggtactattttttttgcatgcgttcttatctttattagtacttaaaaaacatatggaaataatgaagcaataaattgtgcagaagaaaaatcaaaggatccaataaagtaaatccagaaattgtaattaaactctcagaaaaaagaaataaccaccacagaaaaaacaaaactaaaagaaaatattatccatgggttaatatacatacaggatcagaccctaatcatagcactggaattatggtacctgaaaagagatcattaaagaagattcaaataactttgaattattttgattaattattacccctttcctctcttacaaaacgaattggtaacaataattaataatatatacatatatatatatatatcactataggggtggatatcatccaatcaaatccaattgaaccgaaccgatccaatccaatcaaattataaaaagttggatattcaattacaa

SEQ ID NO: 267481 - DNA, 943 bp, Cannabis indica
atactacttaaacatttattattttttttatattttttgattttaatgtacacacatcttgagattcaatgggatatgagacaatgataatcaaataatacgaaattcttccgatgcgtacctgatttagtacaataaaaactaacattttcttcaacttgatcactttcttctttattattaaacctaaaaatattaatagactaaagcgtaaaataaaacaaaacacaactaaatctaattaaaacactccaaaagtttacttaacaataacaaaatctagaacctaacaatacccatcaatctatttaagtcttcttcaactgtatagtttcatacctcaacaatctaagaatctttgcacttgaccttctctaagtgatgtgggattgcatagtttacttggtatttacccttaaagatcacgagactactgactatcacagttacttctatctctatgttgtaatatagatattaggggtggacaataactggccagtcctcccctgtctccctcttgactcatcatgttagcaatctaaaaatatgaatgtgtagatgagaaagagaagctggtaattctttaggcaagcattgtagttttccacaaccataaattactaacttctcaagcaaaatgagtctttgaaaggctccttcatctaagtacttaagattgtcacaacatttaatttctatgctctttaaactcaaaggaaatcccccttctagaaagcattcttgacctccacaactaaacattttcaacttatcaagatttggaaatgtggtgtgagcaacactttcggctagtaaattaggtactagttgctcatattcccttatcacaagctttctcaacaatggaaaatgatttggaaacaatgatactttaagtcttctacacccatcaaaataaagtttcttgagacttggaaaa

SEQ ID NO: 267482 - DNA, 2000 bp, Cannabis indica
gaaaaaaaaatatagtttttttatggtttaagtttttggtataataataaaattttttaattatttaagcatataaaatacaaaattcccttataatattgacatcagcgttccgaattaggataatttattgtttagacgaaagatatgttttgtcaaattagaaattacagaagtaagaaaactagattagtagataataaaactataacgtcgtcaaataacatacaacagctagaaatgtagcttctaacactaaaaaatacctgaaatatctcaacaaaaaaatatatcaaaaaatactaaattctcacattctaccacattcaattaaaacaaaaattaatgaaaaaacttaaaaatactaagtctaagatgttaccctttgactagtaccagcatacatcatttaatatttaccgaagtttttcgaaaactgattataaaataaataagattaagaaataagtaaattaaagaaaaagagatctagattttttcatggttcgattgttaataaactctatagtctttaaagtattttttacaagtgtttatgccctaattgaaaaaaaaactaattcttcccttctcctaagaattcaatttctaattctttgcgtgaggaataatgttctatttataggggagaatcgagtatggatatgccctctaaagtttttaaaataacactttttgatgaggcaaaatacaataggagtttttacaaaaattattgaattttgggcaaaagtttataattttactgttacacaaatttattttttaaaaatactgtgtttttataaaataataaaacaacaaaacaagacaattaaaacaacggtagaataattagaaaataaccgtcaaaacttaacacactatttttgaaaaaaaattctatcccatagtaaaaaaattaaaaatttctatatgtagtattaaaatttaaatataaatttataattaaaaattatttaaatatgtatactgtaaattacttaaaaaaaaataatttgaaaacataaaaaaaaaaattgttttcatttttttaagcctaaaactgtgattttcaaaaacataaaaaactgtttttgagttgtgagattgagagagaggaagaagaccaccttcccaaccagggttgacctcttattatggcagaggaagaagacctgagaaagataaacctttccaattatggagcacaacccaccaaagcagtaacgaaagagaagcccaaagtggtggtaataatgggtccaacaggttcaggaaaatcaaaattggccattgatttgggctctcaatttcccgttgaggtcatcaatgctgattctatgcaggtctacaaaggcttggatgttctaaccaacaaagtcccactccatgaacaaaagggtctttacttacccaatcttctatttctcactttctttctttcttttcttttagtgctaattctgttttgatgttgaaaatggtgtaggggtgcctcatcatcttcttgggatagtgaacccaaatgttgaattcacagctaaagcgtttagagattgtgctgttcctgtaagttttgtttactcacttcagaatctgttcttttgaatttagattgtatgtttttgtgtaatatagtattaatgtttgagaaatttgccaaacttaacaatttgaaatagtaaaatttacaaaataacctcacttaatttactctatgcgaacatttccacagagtaaatctatggcagttttgactataatggttgtttatggtcacacggcataattcatggtcgtttctgtggccatactagattattttactaataattttttttacaaaacagtctttgttttgagcctttgtaattcattgacacatttagacaaacaactcaaggctagtatggtatgatgttggagcttatgctttttatttatctatttttctatggaaagtgttgaaagttcactttttgtcttctgatcatgtg

SEQ ID NO: 267483 - DNA, 1011 bp, Cannabis indica
ttgatggtaactcttaaggtaaggttgttgcaatgtgaactactactttactgttttaatttttactgtataatgtaatctgacatgttcgtgccgatttcaggatcctacaggtacaattgatgctagcattcaccacaaagttctttctcaaggagagtttgggaagatcatatccgttggttctgttttgattctccaaaaggtttgattttttgtcctttattttattctcataattagtgcttcttttcatgaatgttaatcatctatgccacggtaccattataggtgtttttcaattcaaaagataattaacagcaaacatggtgagactggtagaattattgaaccttttattccttttgaaggtgcctgctttcgctccttttcgctctacattctttctcaatatcaccttgaacaatgtaatcaaggtacgtttctttttgttcttgctaattagttagccgactatattttgatatgtaggtaaactctataatagatttctaagaggttgaataaattggtgaaaaatgagcttatagagaaagataacagtagttagagggctgatagagtagtttaacttattgtaaaccattggtataccaacaaatttagaggatttttaatccatagaaaatggcataccaacttgtggtcttctttagttatgttgaatactatgcaaagcaaaccaagactatgtcattaagtaatacacactttctctctttcgaacaaaatacaaatatgataatatctgtatgtttatctgtaattttttctttttttaaattatgtacttgtaaggaaaaagaatcatgtgagttcaaggagtcattcatatttctctctatgttgaaaattatcaggtcatttcaaaggatactggtcctcccattgaacacaattatgctccatcactaagatatgctgcaaaaagttgtggttggttacaatttcaatttcattcaattgtgattttatttatcttgcatatat

SEQ ID NO: 267484 - DNA, 1092 bp, Cannabis indica
ttttgttgtacaattattttttaagtgtttttttaaggtgcttttacatataaatttaactctatcaattcctttttcataaaaggcctaacgatttacaaccgagtcttcgtcacgttgaaaacagtccccgaaatgcttctgattcaataattcttaaaacaacatttatccttaaaaaaataaggcatgaatgtgtaagatccctaccatgagattttgttgaaaagcatggcgtaggttgccaactcgttccacttatcctgaagaaaatgaaaagctttccttaatatctatatcttcggtatcgaattttttgtgtattttcagaatattttttagttattttttatttatgtgcatttatcatggtgtatatttttagtttatttctcataatttattttttattatgtatgtgctattttgtagatttagatacatataatgggtttgagatttaaaaattgtgttttctaaaagagtgttttggaaacaaaaatttgaattttgtatgtgaaaaattatttttaaaaatgtgattggttgtagtgtaattttgtgtttttgagttttaaaagttggacttgtgattggttaggaatcttaaaataattaaattttttttcttgttacattggaatggtcattcatttctttttaaaatggaatagtcattccaccaaaatggtggaaagagcattctattggaatgtcattccaatactttaaaatgcaaccaaacaaatgaatggaatgaaaatggtttcctttccattccattctattttattacctccaaccaaacgccacctaagagagtatttgaagagtttttagattcaatgatttgaaaaatagaaaacataaaattgttgttttcattttttagtttaaaactcaaaatcatattcaaatttagtttttgaaaacactaaaccaatcaagtattcttacgtggattcctactttttaaattttcaaaaacataaaattattttcaaatctcaaaccaatcaaattcatttttttcacttattttttaaaaaaaaaatatgaaattttttaattttttaaaattgacacaatgtg

SEQ ID NO: 267485 - DNA, 813 bp, Cannabis indica
aaaatttatgttgtgattaaaagattattactaaagataatattttttagtgaagtgcaaaaaattagaatgtttatactttattatgtgaaattgatgtgttaattatcaactcaaaatttccatacacaaaatccttggcagctaactaaaatcaaacgtgtctaattaactttacaaaattaatagttgtatattaatattagggtttctcatgcgttagtttatagttacaagaagttgtttttttttcaccggccagacctgtcgatattttatgggcataggtgcaatttgattgggattgtgttttgctattgggattcgatttttgctactgtaatgagtcttatctctgcgacataattttgagtatacagtattgtttttgttacatggttttgagtattttttgtcttttattgtgatattattgttttgttttcattggtttttatttttattttttgatggttgccttcaaatagtaatcgctattagctagtgattggaaataataagttctttgtgactaaaagaatttttagtacgtagtgcagttatgtattttgcacaataattgaatgctcaagttataagtttgaatgaacatgctacaatattttctactgttatgtattttgagcggtaaatgaaactaaatgtaagtattcttaagattatatgtgatgttgcaatttttttcatttgattttacttttagtttattatcaaatatgcaatctgaaaattagctaggtgattgattatttttttttaattttatttctgatcgtgtctttaacaataatc

SEQ ID NO: 267486 - DNA, 696 bp, Cannabis indica
gccaaaaaaaaataaccccaactttacgtactcaaagaagaccacatttaatttgtatttagtacgctcatagagccaaaatttacgtaaaataaaagtacaaaacccgaaaacttaggaaaataggaccgaccacaaaaaaatgaaaccaacaaaaaaaaagacaataaaatgattgtactaagatagaacaaaaagcgaagatttttaagcttaaaaataatgattcagaaaagctgctgcttttattacagcacaaataataagtagaaaaaaaaaaaaaagcaaatctagagagagaattagattcgagaaagaaaaagctccgtatagtgttgagatcgaggtcgagctaaaagttctcaggccaaacgaaaaagtactgttaataatcggaaccattcgttaagaaagccaaaacaaacggaaattttctgacacattttgaaccaagacagctagaaagagaagaagaaagctggaacctgctgaggtcgtcggtaactgacattccggtgataaagataccggagattcaccggaaaatagaagcggatctgacgggtcgattagatcgggttagctcagtgaaaatgctgtactggtgttggttgcggtcaagtcgagtcgagtcgagttgagtcgagtgtttgagcttgtctgactcagtttctctctgtgaaaatgtcggacttg

SEQ ID NO: 267487 - DNA, 3179 bp, Cannabis indica
aacgcataaaatcacttcgacttctaatctttcatatttgaaattgtgccttacccaattaatttaaaaatggcccaattttaaaaagtagaagaaaccatcatcacgacctacttatcaaaaatagctaaaatcctcgactgtgggttctcctcacgtgtattccatatacatcgtatataatccaataattatgcgataattgttaggggtaagttggaagggagaaatgtcgttatgcgttaagatggcttttacgaaagggtaaaaaggaagcatcaccccatagcgaagaatgggaattgaaactacaatattttgaattgggatgatctcagggctaatgaacaaaagatgaggtcgctgcaatgacatgggctttgaggtagcattgtgaattaaattcaatctctcaaatgtagttagatcagacttttaaacccgtgagacaaggtcctcgcaagaaaagggctcgtctaactgggcattatccgttgaatctattttgttgccctcaccctctgcatcatcttcaacttcgtgatcaggtaattcaaagtcctcacccatttcttcgactttcatgtctggggcgattcgcggataggcaaaattaccttgggcagacaccgtggattggctatcctgcacctctaaggtcactagttctactaactcttgtaccatgcgatctatctcaccggtaaatagtgagccttcttgagccctatccattggagtcttctccttagatagcgaggtgggtatgaagctattactctcatgagatttgttagcaaaggccccctctcttgaatcgtacatctggctgtctgatagatcgcttatctaaaagatagaagatcttttcagcatggtatgagtgcaatttgaaaagaaagttttctcacccagacaataagatttcaaataaaaatgcaaggaaaaactaatcgcatgtctcaaaaaatggttgggcatatcttagtatcctaaggggcatgcgactgcatgaacattaagttaatgatatacttctactattttgggaactcaggtagtttttcatatcaactaaagtgcatatggattaaaaccccgaagttaactgattacatatgacctaagagtggaaactcagagacaaggtcaaaaagttatgctaggttaaacaatttcaaaaatgcgagtacgtaaaagggtatatcataaagatgcgggtattcaagagttcatcatagaaacccacgagtattcatatttcaagcacgtattttccaaaaaaagaaataccatattctgcctaatttttttaattctctcattagaccctattcatttcatacattttctatccctaaaatccaaaatgcatgccgaatactcaaggaaaagagaattattacaaggaggaaagtcactaaccttcaatgtaattctttctaggatattcttgcagatgatcgaacctacgaaatccccttcaatcagcaggaatttgaaaatttagaaaactttaaagagtttgaaattttgggtaaggagaaaagagtgagaaatgagagggaaaaatgagttgtgatcggtttatatctgtggggataaaatactgatattcctcattaattgggatatagacacgtggcaagaaaatgcctaaggtctcccaatccaacggtctccaaagaaaatgccgaagggttttgatgatgtggcatctcgaagaaataaagtaataattacagtcgtcattttgaaacccttgacaagacaaccaaaagtcaccatctcgtgacaataactcgcctgtctctctgtaatagtttccctaatgacgtagccgtcagtcgcgaaactaggggcatgtgttatagtacgaaatttttacctagaaactcgagattagtttcctataaaattgacacgtggatccaatccctaagggatggatgagctattaattaatgactcctcaagaattgaccttgcttgacctaaactcgcgagatgatgcgaccttaatagcgtctagtcgcatattgtgccttgcatagtataaaataagcaggaccaagaggagtttatacaagccgcgcatataccaagatatatgcgatgactatgtagccttctcctgcgattgagtacagatcgattttttacataatgaaattatcctaacgacaaagcatattcgatgactcaatagggactcgcatgtctcatgttgtcaatgcatatgaggtgtccatatatgcgactcaaatagaacgcagacaccttaacatgaggctcgttagccctccctagaaagataaaatgcacccaaagcttgcgagcttgtgtgagaatacgaacaggcaactcgcactctataggtcgcatacgttgcttacttattgaaacagatttaaaactattcttcatttattcttattacgtctattctaatttaatgttaatattaattgtaaaacggttctataatcgaccagttatgtgtaattaaagggatgcttgctttgtatataaaggagtgatccaacatgaataaactagacagaaattctttaaaacagtggactaagcagaatgtgatttaactgaatcattatatatctttgtgttcattatatttttctatttttgttctattgtctggtcagtcttgtttgaatactcgttgttttaagttgagtactcattattttctgttacatatttattatttatttactttttggtgttgtctaaatttctccgacaacaatatatatatatgataggactaaactttggaatttcttaccctacatacattcttgccatgccatgtactaatttgctcggttatgcgcagaaacaaagaattgttagtttttttaataataataattgtcttctatttcatgaaagtagttttttatataattttttttgaagtatttaaaagactatattttcattcggttactttgtattaattcacatgtggtctttcgctcatagaatttgttgagaatcatagggttctatctcaaaaccaattgacaatgagtggagtagctcatgttcttatatatggctcaagtctctaccaaatattctatgtgggacaatgtccacaacattctcctcaagatgatggctattttttgctcatcaatcttgaaccgtat

SEQ ID NO: 267488 - DNA, 1170 bp, Cannabis indica
caaaaacccaaaaactttgataagaattgatgatggtttcaacaattaatgataccattatagcaatatatatttatgcaattaattccatttgtttttcttacatgatcacttgtttgtggtttttgaggtccaaccacttagagctaataatgatcacacaagaaaaatgaactatatatatgtctagtaataataatatacatatatactcacctatagaattaaggtctaccaattaaatatgtttaatattcaccttatacataatatatatatataaccatatagcaaagttgaaattatatatcatttatataaataaaatatatgttcattttattgttctcatcatttgcaagataaatatatatttttttttccttttgagactaacatttaaattaagctacatttatagggtggtcccaatttgtttcaagtcaatatatataaatatatagggttgtagtaaatagtgcatgcaagctagctcatgaacataatcactatttggtagtctctattacctttcttaaaaaggggtccaatacaattcttcaaattccacaatgatgaccttttttctggctaaaaacattataagatgaagaaactacttaatttatattgcttttgataatattagtgtctttgtggtctctccttcatttcatcatgagaatattatttatttatgtatatatatgtatgtataattgtcaattcttcatgagtacatcaaagagtttgattgagtagtacaattgtatttttcaacacttgtatcaattaataatgtcccaaaatttgattgagcatattccatcctattccactctctagtaagatacaaaaataatagacaaaaacacacaatgaatgaactaggcaactagctttagcttcagattctctttccaattccctaacaaattatttttatagggccggtctattgagattttatgggcttaggaaaaactaaaattattgagcctttatttaaagagatatgtgatatattattgaaaattaccaaaaagatgtgtatttttaaaagataaaaaaattaggcttcctggcctgggtgggccttaggctcggggctgcacggaaattttttttaaaatattgtgtttttataaaacaacagtggaacacaaaata

SEQ ID NO: 267489 - DNA, 814 bp, Cannabis indica
gcaatgtttaagatgtgttgatgttttctgtccacgactgaattttgttggggtctttcaacacatgaatgttagtggataatacccttagatgcataaaaagattgcatatttagctctttagcattatcggatctaatggccttgataggcttagagtattgtgtacatgccatattatagaacatagggattatggtttgtacttcagctttagtttttagcatataagtccatgtaaatctagatttgtcatcaacaagtgtaagaaagtatttataaccttcaatacttataatgttgaatgggccccaaatatccatgtggataaggtcaaacatattttcatcaaagttgtttgatataaatgggagccgtttttgttttgcaagatggcaaatatgacaaaaatggttcttggaaacatgtgaatcaaaaacatgatctttattgaaattgttagagatgtacatagagggatgaccaaggcgtttatgccaatggtctccattatttgtagaaacaaaaatacaagtagaacttactattggaagggaatcttggagaagaacaaagagttgtccaagccttctagctgtcccaatcaccacactcggagaatgagcctgtaaaagacataaatcatggttgaaaaaaaccatattagtgggattttgaagaaatgttggaatggaaaacaaattaatgtgaaatgtaggaacaaataacacattatgaattattaattgggagtttatgtggacagtcccaattccttgaacagggatgttgctgccatttggaagtaatactt

SEQ ID NO: 267490 - DNA, 1346 bp, Cannabis indica
aatacttaagtttaattctcagttgtaaataaatatataagtttaatttttggcggtaataatacctaagttataattctagaacttttgtaggtacctgactgttaattgttaagtaaattgccacgtggcaattcctgattggtccaagtcattaaatatttatttaaaaaaaataattaaaatataccaataagaaaataacacgtggataatgacataatattttaacagttaggtacgtagagagttccaaaaatataacttaagcattattaccgccaaaaattacacttagatatttatttgcaactgttagttaaacttagttatttatgctacaaactagtcattttctaaaatactaatttttcggaacatctttatggtaatttaaatagttttttagtatatttttttttatgattgtatatgtaattatttatggcacttgtaaatcttaaataatttaccgtattaaaaatatcgaaatattttattttattagatgtgtgattatttttttatattaatggtaaataattatttaaacatatatttgacactataaattaattttaatttactaaaaattcataaaaaaaattaaataagttatagtcctaaataattagtactcaatatcataaaacaatttaaactaaaatactcttccgatgtcaaaataaataacaagtgtaccaaaacataggaagtgtactgtagactacctaatcgacgtaaccgcaattaataatttattaaacgaatataatatatactcctgtagtggttctgagtgtacaatcaaatacatgcacatatcattactttatcctttttatatttatttatttattcaacaaattattcctttatttttatatgcattaaacaatactaaaaatttactaatacaaacaaatatgtgaacatctttttaaaaaaaatgtctaaatactgtaataattaattcaaaagcaaaattctaatagaaacgtgtttgatttttataattgaatatttgaagtatatatgtagaccataaattattttaacaaatttaaaattaatatttagacgtaaatttgtcacacatctgaatgtcaacaagaagtttgtctataatttatctgtaaatatattattattcaaaaaaaaaattatattattatattttaacacactttttaaaaaaaaaaactgaaaactattacaaatttacaatagtgttttaaaaacctatgttaaatttggttcaaaaatattaaccacttataataaattctaactttttttctacattaaattattttaggttaatttagacttattataaaatttta

SEQ ID NO: 267491 - DNA, 753 bp, Cannabis indica
tagtcatgcatttggagtcttttggagggatgttagcatactttggtagaaaatagtggaagtcggtgacaagatagaacttaattacacattttgatgactttaaaggcagaattagacttggagctcaaaatgaaagttatagatctcattctcagctttccagaacatattgcatcgtccaattttgagttgtatagaagaagttattgccaaaataataatttgaacacggggtagaattttttggtaggaagctgtcgccgcggcgaggacgcgatttctacaagttttcaaatttttatcttttttaaagtgatatatttttaggggtatttataggacttttagagttcatttttagtaacttttgaactatattttgaaggagagaactcaagagaagagaagaatctacatctacatctagtttttctttttaaactgggcttagccgcttcaataggatcttttgttctggtcggaagagaaattaccaaacgtctaattttcatctatgattctgtttatgattatgtttgagattatggagtagtctttttttatgttaagggttatttcaaaactcgagacatgaacctttaatttttataatgaatgttaatttctagtttctattatatcgaattgcttctattcttctatgttcaatgtcatgattattattttaatattgtttagacgatcgctaagttaggttttactttaatctattgtcatcttaggattact

SEQ ID NO: 267492 - DNA, 1490 bp, Cannabis indica
tatatataggtgaagtcggttgagggaaatttgaaagatgcatcatcagatgcggtgaggtactgggtaaataacctggagagcagctattacctttgtggaagtgttgtgggacctcatccatgtccgacgatggtaagagagttccaatctgtgattggaaaagagacgaggaagcaagccatggagagatggggatccaagccagatgtactggtggcctgcgtaggcagtggttccaatgctttgggattattccacgactttattggagaccatgatgtgaggttgattggtgtcgaaggagccggtcgctttgggctcgaccgtggcccacacgccgctacattgaccagaggacacgtgggagtctatcatggagccatgacttacttgttgcaagacgcctatggtcaaattctcaatccacattccattgccgttgggtaattaatcttttcttttctcttttctccaatttaattcttcccaatattaatcaaatgtttttattatctttaaaattttagtgtcgtgcacacaaatttactggaatttaatgttgttgacatttaaaggtggaagcctcaaatttgtaaataaaactaaaattaaagggtattaatgtataaaaattaaaggctaatttttttgttgttatcaacttttttttttattatttttgtaatttttttttaaaaaaaaaattagacatccaaaaacaatgtctaatttatttgtgcactacaaattttttttacgtttagtcacaacaaaatttgtgattaaaagtaaaaaattttttgagtaattataaattattattgtgactaaacggtccgtgattaaatatatttttagtcacaatacttattgtgtctaaaattaaattagtgacgatttgtgtctaaattgtatgttttagttacaaataagtttttgttgtgactaaaagtcacatttagtcacaaaaaatttatgttgtgactaaaaagttatcactaaaagtagcagttttttgtagtagtgttaaaaaataattttaaattttttaaaaacaaaaatattttttaataatacgacaaacatcatcaatctagtgaagatactaaattgtactaggaaataaaaaaaaaagtaaagaaaaagtttagttagcaaatcgaattttttaatatttaattgtgtttgaaaaaaatatgttacgagtgatgcacatttgcacacatgtacgtaactgtttgaaaagtatttattgtacattaaaaaacacgtgtgaaattgagaactcgcaagtactaattctactctactatgtgccaaacaactaatagagttgggcactatattacttctttttcttcaactctcataatcattatttcaatttacacttgacttatgatcatcccatcatctataagtgttaaaaatctcttctaaaaaaaaagtgttaaaaaaaaaattaaagacaccacgcaattcattgg

SEQ ID NO: 267493 - DNA, 756 bp, Cannabis indica
ttgttgtgactaaatgtgtttttagtcacaatacttgttgtgactaaaactaaatagtgacaagtacttgtatctcaatactatgttagtcacaagtaattttttgttgtaactaaagattacatttagtcataaaaaatttatgttgtgactaaaggttgtcattaaaaatagttttcctttttgtagtgacttttcattctaatgatttttttttatatttagatcttttgaaatacttggcaagaaaatgctaattaattttttttcttttacttattttaataattttatcagtgggatttttcgcaccaagaacattgactggactattaattctaatttctataatggtgtatcaatggagaagacgacatttatcaatgtacaatgacatagaagatttcctccaaagtcataacaatctcatgcctatacgatattcttatcgagacattaggaagatcaccaaagagtttaaggagaaacttggtgaaggaggatttggctctgtatataaaggacaactttgtagtggtccttttgttgcagtcaaaatgttagggaaatgcaagactaataatggtcaagatttcattaatgaaatagctaccattggaaaagttcaccatgtcaatatcgtgagattgattggtttttgtgttgaaggaaagaagtgggctcttatatatgatttcatgcctaacggatctctagataagtacattttttcacaagaaaaaatgaacatctctt

SEQ ID NO: 267494 - DNA, 1566 bp, Cannabis indica
aaaaaatatcttacccacatatttctctaacaaacaattgttgactaagtagtcttcctatatgtgtgaacaaagcttaggtgggccggatctgacgtggacggcccagatttaacctcttatttattcttcttcccctctctctgaaagtggaaaatattctcaattcaggaaaaaaaaaaaacccaatttcgattccggtatgagttgagatcacaatcatcatcgttcaccggaataaagtaattccaattgtcttgaggtgaaagccatggcggaaaacggcgcttcatcccctaaaacacttcaacccacaaaccccagcatggacccaacgtcgacgacaacctcaacagtagcagcagcggctgccatggccatgggtagccccgctaatgtcactaacactatgatttctcaaaacccatcaaatttatcaaattcttcgatgaacccacaaatccagtctccttctactctctcacaatcccctcaaatttcgtctcctccacttcccccactttccaacgtctctctcccccaatcacaacaacaacagcaaatctccccctctgttggattggatttccagtcaaaaacccatcttcagccgcagcaagctcagaatgtaaattccatgtcgaattttcaactccagcaaagcctacaacggtctccgtcgatgacgcgattgaatcaaattcagcagcagcaaagtcagcaacagcagcttgggttgatgaggcaacaagcaagcttatacgggcagatgaatttcggtggttcggcttcaattcagcagcagactcagcaacaacaacagcagcaaatgggttcagggaatttgtcacgatcggctttgattggtcaaagtgggcagctaccagtgttgcctagcgcagctgccgcacaatttaatttgcagaatccgatgctaacctcggtatgacttaatatctcatcaatgatcattttacttagcatgtgttccagtgatatacatttttaatattctattttgtcttatatttagtaatttttggtagccaatcattaaaaaaatgttacttttttaaatttagccgtttaacaaaaatgcagcctaggcaaaaagctgcattagtacaaggatcacagctccatggaagtaattctgctgggcaggctttacaaggaatgcaagctatggggatgatggggtactcacaactgagagctaatggggctctggcttcttatgctgctcagcagcgattgaatccgggtcagttgaggcaacaattatcccaacaaagctcgcttacctctcctcaggtatacaataatacaactacctttattttactttgttttgttgctttgaggcttgcaaactctttctgcttctcttccgatgattctacaagtgctctgccttgcattcctcttctgtagatagcctttctcttcttttgttagaattgttatagatatccttatataaatctcattgtatgatatgacaatcttagcaccattataatgcttcggtttttcaaggcatgtaaatattattattagtattat

SEQ ID NO: 267495 - DNA, 834 bp, Cannabis indica
tttgccaccaaaaataaacattaggtatttaagtgtataaaatcaaaaatattaagtatttataccgcaatttaccctatatatatttagatattaggcccttttctctttttctttgaaaaaatcaatatgtatatctaatattaaacaattatagtatcaaaatgtgttaatgcaatatgtaacataaatataatagtaaggtatttttttttaaaaaaaatatatcgtagacctaatcaagacaatgaaattggtttaattcgactaaaatagccttaaatgattgaattagtataaaacctttctttctggttgaaaaagtgtaaaaacgaagtgtaaaagtagaaattgggtcgggatgaggtttctgtagccaattacaaacaagcaaagaagaacttggccgaatgttatgtgcaacgagaagttttttggcgtcaaagatcgaagcaattgtggttgcaagaggaagataataatagcaagtattttcatgcttctacaactatgagacgaaggaataattttgttgcaaaatttaaagatcattcgagtgcatgggttgactgggagagtgatttggatgatcttatggtttcttattttcacgaacttttttttctcttcccaaaccgactggagagaagtcacaagtagcgtgcaaactcgtgtatcatcccagcagaatgctaagctgctattactggtttcagatgaagaagttcggaaagctttgttctaaatgcatccggataaattcccagggcctgatggaatgacctcgggttttttgagaagtgttggccgattgttaaggatgatgtcatcaat

SEQ ID NO: 267496 - DNA, 967 bp, Cannabis indica
ctataaaaataatattaaaacaataagaaaactacgtaaaataaataggaaaataatattaaacaacaacaataaattaacaagtgtacaacaaaaaatacaataaaagatcatattttctgtaaataaaattataaaaatcgtaaaaatatttaaaattttatataaccttatttttataacttattttgctatctttatgtttttgtgaaataaatttttttaattttggtctccttttaaacatgaatggtcaaatttccttaataaaacccaacatgatttgatatgtcaaatcaaaagagtgtcacgtacgatataaaacataggaatagttttatcatttatgtgaaacaaattatgctataatataagatagttggtggcctaccaaagttttagaaggcacataagtggaggttgatttttaattaataaatacattatattctttgattttgataccaattatagatgaagaagacgaggtcacaacagaaaagatgattaagtaatgttaaaatctacaaaatcaaatgaggtggattataggtaggcttattaaccttgtttattaatctaatgtgacactttatgaattatcatatgcttaattttttttgtgtttccttcaagtccccgtaaactaatgttattgttattcttattcttattattataatttatattactattgtttttattcaaatttatatgagttttttgcggttaaatttttttaattattattttatttgtattttattatctaagcttaaattttgacggtaaaattctctaaattattgaactgcttacaaatttaaggtgtcatatattttttatagttaattgtcaatatagactgcttatgagtacactttggtacatgtattcaatttatattggtacacttaatattattattttaaaaatataaaaattattttaaaatttataatatttt

SEQ ID NO: 267497 - DNA, 802 bp, Cannabis indica
tttaaaaaagagggtaaaaatgaaagaggacaacataaaaagggtatagagtataatttcctctttcttcattctatataaatataatttttaattttatagcaaagttttaattaagttttgtttttaattattttgtattatttatagagttattgatgtaattaagtgataaaaattactaaaaatttatatatttatatatttataatgatatatgtgctcaaaatatatacagaaccatcaataacatttattaattagttgtttcaaaaacattagtcaaaaataggcaatgccatcaaagcttttagagtcttttaacattcttttctgtactttatttttggaaatgagaacaaaacattttttgtaattttcaaaattaaaacctgtttctttaatgttttaccttagataatcaagtccccaaccttagaattcggacccaaaccccaaactcgaatctcatccctgacccaaactcagactcgaaccttgatgctaacctcttaaaccccgacccagactaaatcatttgcattacgctccaatcaatcttacaaatttcaattatttgagttgtagtttctatttgttcactttagtttatattatatgcaaatttattcttgtattggactaagtttgacctctttcttattttcttttctaaaagatatgtgtgcttgagtatgaaatagtttggacaagatgatccaatctgtaagtgatactcagaaaacaaaaacagagaagtatgtgcaacaaaaattcaaaagtgacttatttatcattggac

SEQ ID NO: 267498 - DNA, 1041 bp, Cannabis indica
cgatgtctctgaagtaagggtggagtagaaacactgccccttgctctatatgatgctctgaccatgccatccaacccagggcaagccggtgcaccctttgatctctagtgggtatctcacaatgaacacccctcactagcccacttataagtgtcctgctaaaagtattaacagagaggacatatgcaggagagacccacctgtctccctatgatctagcatccaattttgaggctcaaaagattgaatgaagacgtgatccaaacctaacaccgaaggctgatcaagcctattcaaaggctccccattgtgaccttaactacccaaggggtggttggagaggacgataaaagttttgtatctccttctcctgacaggtgtagcatcctcaaccttagacttagtatcaggactcttagcccctggtcaacctctagatctacattaacatggggctgagtaacctcctctataattttaactttgccccttgttgccaccctggcaacatggggatcacatggcgatgctctacgacatgtttgtttcattctagccatggttgtcagtcctggatcacacaagataatcaagggacctatgcgagtgtcaactccctaatccaacactcagaatcatctgcatagagttctagtcaattgtacttaagggtaccttccaggtaaatcataatgtacaaggttagttattgaccaagtactgtcttaagtatatttacttagacaaatagtgagtcctaagttgtgcagtcaactataatggactcactaccaagtctcatactgagtttccaaggggaaccacacataagactacacttttacatgtctccaaggtcgtcatgagaccctagccgaggtcaacagaggacaaaaaattggctcccgcttggaaccttagccttggccagccagagttcccaagcctaaggggcaagccaggccccatgacccagcgtagggccggccaagaacctcagttccaggcataggctgccagcttacggggtatacccccttg

SEQ ID NO: 267499 - DNA, 974 bp, Cannabis indica
acattgataagagtaggtccgtcactgagtggaagtcattcccccaaaagtacatgaagatagaatcgttggcctttttttttttaaatcatgtatataaattatattatatataaatatattatatatatataataaaactattatataaaaaaccctcttaattgggttggccatgtttgttcgggttggtatgggttatattctcgtcgtgttatcttgatttgatattgttgagaatcatttatggggtttcatctaggaatggaaaattgaggctttttcgtaggtcgggtcggggcaatcctaccctggaacaatcgggtctctaatcgggtctttgccccgccccgatcgacccgccccagttaaattttttttgggtcagggcttacccgactcgacaatacatcaacttaaaaaaaaaaattaagaacaacccctttcatttatcacatagggatgggcaagactgattttaatcatgataaatcaaagaaaccataaacaagaaaccagctgtacatcctataaaaacattcgtgcattaaaagatcacctgagttttaaatatgattgtgtcatgaatcatcacaattatttaattgcttttcattttcatcactgatgaacacttgggcatggtggtcgactgcagcagtgggacatctcactattcttttgaatatgcacgcatatggacttaattatttgtgttttataaaaggattcgtacatactaatttgatatttatagtgtttaagtctattttctaagtggctacatcatattttattaatctaatgcttggaagtgtgaggaaatggtgttatagtttatttgtacaaataaatcacattttcgtgtaaacaaataggtcaattgtaagtttcttgagtacatgtataatttgtaagaaattaaacaaatgtaataaatgtcgtaactttataattattatatcatttttttt

SEQ ID NO: 267500 - DNA, 620 bp, Cannabis indica
agaaaattagagtagacaattcgaaaattctcacttaggtaatagtgatacccaattagcaatttactctatagttgggcaacattagtttgcctttgactctttcttcgttacagtttgttgatttttttactaggtcgcatacgattttttttattttctgtaaacaaactctcgatacttcttgcagcagcatcataagtttgagtactgaaggaaacctgttagataatttggtgcaagattggagatggcttaagtacaattcttctattaatttattgtgtgactcaaattaaaaaatttcttttgtagcatgtgaataacactcattttctttttctcacaaatttactatacatatctattttctttttgtgatatcattagggaaatttcattaattgaccctaataaaataccccatttcaaaatttataccctccactaatttatacaaattaattccactattactcatttgtacccaaaatacccctcaaatttaattttcctattctctctctctttccgtctttccctctttcactctctctttctctctctgtcgtttgttattccctctctttccctctctcgttctctctctgtcgtttaca

SEQ ID NO: 267501 - DNA, 912 bp, Cannabis indica
taacagaatattcttttatttttaagtatattctgttaaaccaagaaatgccgttagatagacacttttaatatataaagatatatatattactatattattcatataataatagatagaaatatatgacattagcatgttcatatgcaacttctaacaacatattcttggaatgtaccatgatttttctttaatctatggcttctggaaaaaataaaaaaatccactatatgatgctttattataaagatatccttctattttttttaattttacaaaaaaaaaaaaaacaaatttgtctgccctttaaaaaggtgtaagctggttttagattgtttccaatgggctctcaataaattcaaccacaataatatattattattattattattattattattattattattattattatttgtagtattatatatttaattgagacctagttttatagtaagtgattataaatatccaacatctacaatccaaattccttggctctctcatagctagcatatagagacatgggtggaccacacaacatgcaagtgcaaatataaatgataaagctacaaatatgtccctttaccaaaagaaagtaaaataaaaattatttgtgtctcatgtatgtgggggccaaatctgtgtctaaattctgggtttggattttgcagtctaggttaggggtctgtggtcggggtctgggatcctgggcacgtgatatagggtccaaggtcagctctggggtccagatttgcgatctagggtccacttttgggtctaggtctggggtccgagtgcgggtgcgaatctgagtctgagtttgggcaaaaattgggatccgagatcgggcccgaggtctagtctgggtcaggtcaggcactagaatattgatgaaagaaaataaca

SEQ ID NO: 267502 - DNA, 1044 bp, Cannabis indica
ttagtattatgttactaaaataaaaacatttaaacccaaaaaaggaataaacaacatgtaggtcccatctagcctaatttcttcaaggtgcaatgtataagggatgataagttgtgtttatggatagtttttgtgttgtgtcaagacttaaatattataagtaatgatgaagctaaattattttatttttaaaaaattacatgtaaattataattaaaaataaaaataaataattttttattttatgcattcgctctcatacagttttaagctagcttctttgttgattataaatatatttcaaacgacttatttattattcatatctaaaaattaaactgattttttttataaataaaattggtcgatttgaccagacccgtttaattcatttatataaagaattatgtataattttagttaatttatcaacccatttatcaatccaaacttgtttacaatcgacactatttttttaatgaaaatgttacttctattaaagatgaagcaaatcaacaaacaaaataggttgaataccagcatagacaagcccccatctgtagctaatttaaacaatttaacatgtttatatcctaaataatttatatgtaataaatataaaaatgtatactttcaattaaattgttgtcgtattagttttgagtttaggcgtgttaattcaaattaacctattcaataaataggtcatgtgtcaacccaaaaatactcaaactcacttaaagaatacctaaagttatttatttggtttgaattttaagtaaagttatcgtctctaacatattttgtcgccctacatattatttgtgtgcctctattgagttcatagatatacaaattgcttccatatcttttgccttttgtttataatattgttggttttaaataaaatgaaatgaaatgaaatgaaatcaaacttcatataattataagatgagttcgtatgcttgagggacatagattgtatacctgattttttatattttcaaagaaaaaaaaaagcattcaagagtaaaagaaactgtt

SEQ ID NO: 267503 - DNA, 1710 bp, Cannabis indica
agattttacctattctccaaagtccatacgctctggaaaaagaaagttgcatctgttcacaagaaccaatatgatagatgtaatgtggttagctttgtaaaagcataataaagctttttctcacttccaaaacctcaaccagtctaaataaaaaaaatagataacaagtagtgagaaacttcacattttttaataagacatcactcacagatagagattcaggatctgcagcacttgtgacccccaagaaaagggtcaatgagataatcaacaaccttccaaacataaacaacactaaagaatgaggatgagaatgaataaaaattgatgataatgaagaaagtgcacaaagaagttgattggctaatgatcagaattgtcatgtgcataatcaagttcaagaaatcaacaaactagctctagcaagcatataaatagcgtattatgtcaagctagagaaactacctctttcccaaagtgtcgctgaaagaaaccccccacactgtagaaaaccaagtaattacataagaaaactacttcctcaaaaaatatcaagaaaggaagcgggagcacaaggagccaattggataacatagaattagaacctatgagttaccaattatcacctttcttgggtctgatcatctgctatttttgaatttcttttcttccacataaatggctccagaaatatctgaaactgcaagcgaatttacgaaagagtgtaaaacttcattaacattatgaaaaaaaaaagagaagtaaacgacatagtttataatgatgaatgtgtttccaaaacatagataacaaacctttgactgtgtagaaagaatattgctcgtaataagtgcaattgggtttgtaggtatctgataggaaacatggagcaaattttctggtcacaatcgaagacagaaaactgccaagtaaatttaaataatataataacaatataaatgtatatgtatcacttttaagtttatgttcaatggggaactccattgataataagaggatacagcaagcaggacataccagcactggttgcccatttcttacaacgtatcgtttgctctgtgaaattggctgtatagcagaatcaaaataatcatggtcagtctccataaagtttcaaatcaagtaatcaactgtaactaacagtttattcctttaataattcaaagtcgtggcagagaagattaaaaatgtgtcaagcaaaatgactgtgaactagctcaacaaacatacggtttgcctcttcagtatgtattacatcctacagcaagaatctaagaaaacttacatattgttgcttatctctaagtccaagattatcaagcagatcttgtacctcaacttcactctcagtctgcacaaagtggaaaacctttaagattcaacaccgtaaatagcaaagcaattattttcagataagaaaaatattccagcgtccatagaaatccagaactaaagcgggtttcaataatttatgcacaaaaccaatctaccatcgaattggccccttcatcccatatcaaaccgttatgggaaatactcctcaactttccaccagctcttccctcagcttcaaatactgtaacgtcaaaaccgcatgacttcaacttgtaggctgcagcaagcccactacatcatgaagacacaaagtcatcttaaatcttcacaaacactccttaagccatcatttta

SEQ ID NO: 267504 - DNA, 1691 bp, Cannabis indica
ttcattttgtcaatccatctacgatcgtgagtctgtttgtgctcaaaataaattttaaaaaaaataaagagatattgatagcaaaactacttaaattttatggtttgtaatacttaaccacataaactaattttttagcgttaaaatttgaactgcacttttgttttggtttttatacttccatctaaagtttttgttaagtgtcacggtgtactgtttacgtgtacacgtgacaaatttttagtggtccatataatattaattataaaaatattataaaaaaataattgaaaaattataataataaaacaataataatatatatacattttctttttcttttcttcttctgaaataacctaaaattaataaccctaaccctaattctatctctttcatcctctctctctctctctctaccctaattttttcctccaagcttgaagacgagtcttgacccaatttctcaatcgtgattgcaaatagagccatcaagtccacgatttctcaccggtgtgacaattcttgtatggagcacacacgtctacgagagtacgaattcattgaggtcgttcaagctttaatggcggctgaggaggagaggttaacagagtgcgaaaactagaccttagggtttcaaaatgggagcttctctaccgtgtagctgagaatccgcttgtgatatttttacactaatctatgtgagataatgttctctaatatttttagattccatctcaaaaccaattggtgatgagtgaagtaacccatgctcttatatatggttcaatatttttacatgcgtctttacactatctggataggtgtggatcgatcgaaagtccgttagggatatgactctgataccatattgagaaatatggggatctatgtgaaaccaattggtgatgagtggagtagcccatgttcttatatgatcaatatttttatatttaatctatgtgggacaatgtctccaataattatgacttgagtcagtaatttagttttagtgatgtattttgaacaatagagtaaataggtttgtgcttgagaaaatataaacctgaggcgaaactaaattacaaagcctataaatttctttctgaaaaaaagcctaatgttacattctatatattttttttgtaaaatatatatttatatataagagtgtttgaagagaaaaaaaaataataaatataccaaatatataaataataaaaaagtataataatttataaaaatgtttatttattatatattaataaatagatttatatttatttatcatattactatattgttaaaataaattcagatttttaatatttatcgtattcctcgtaccatactaataataagtaataggggtatgacaagcatattctactaatactctactcgttgtcatttattgtcttcgtcttcggatcaggtaattgattaatatttttctttaaaattaataacacagattaaaattaatatttttaatataaaatagtaatattaataataataacaaaagaaaatattgggaaatggatagaaataaaactgagttatgaaatgggaaaaattacataaaccgttatttttggtaaatttttttacatttttacgtttaaagtttttttttattcaattttacattattctagaaaaacacacacacaaaaaaaaaaaacaag

SEQ ID NO: 267505 - DNA, 799 bp, Cannabis indica
agctccacgtgtaaggctcagattttagccattttttcctctgtttgtactctgcaactttataaatagaatggcctgcatcagacttgattgagctgatcttttacaccttgaatacactctgatttttgacttgtacaactgcttccaaagtgcaatcaagttttttttggaaaaaaatagaattgagggcagcgtatggagaagaagagtcgaagaccccttgccctaagaaattggggcttgggctgaatactaattggctccttttttattattctttttgttttttttccgcaacaaaacaataaaataatatataaaaataaattgattatatttttgttttgaaatgtatagtaatcatgatttgatttaattgaaaagaaaatatatatttagttgatataatgaaaataaatgagtgataaaaaaataagaaaataagaaaagaaacgcatttaaaattacatataattgaaatctttatgggcgactataaacaaccttaaaagtgaaaaaaaaacagaattttgatacgcttttttaggggcatatgattatgtcacccctaatctcacgcaatttttttgtcgctcctaatatatagtatttttaaagacgaaatgatctataactttaggagcgacttttgtcgcccttaatactcatatttgaggtagtgtttagaacctacttatatctcaattataattgacttacatgatttcataattttagaaataattttgtaattttaccctttgagtttacattcaaggctaatctactgtaattg

SEQ ID NO: 267506 - DNA, 1358 bp, Cannabis indica
gtaaaatatttccaacaactatagtggctatttaccctcaaaataatcttctgcatggtcacaagtgtggagagagctaaactgattgctcaggctaatttcttctccaagcactcgagggaagtactcatattgcttgccattaggaccgcgagaaaagtgcctacacaaaacacctctttcatcacgaaaatacttccgagtgtggagtgattagttgttccttactctctgaatcacattccatttagtttcatgatagagcctctgggtccctcccctaaggttgactgcaggtcccttcccccttacggcttcacaggggcctagaattattggacatgtgagaagaatcatgcggaggagatcgttctctcgcatttttttggattgctccgagtagggttacggttggtcttgtcagggccaccacctgcggaggagattagtctcctgcattgtttggatttctctaagttgtggtgcttctttcaacacttattgatcttgttgttagaattttatgccctaaataaaaacctattttaatataatcttattttctatcaattgaagattagaagtcatttaagtttacatgttgttttcatgtttatggtttaatatataatttctattaaatccaaaacatattgttattcacaattacagtgatgtcatcacagtggaaagtaattgtgattatatgcttcaaagactttaagtcccatgatttatcagtgcattggatttgcattgacgtgataatcaacgataaagcttacttatacattgatatgtggtatgtcctttccagagcatcagtaaagtatactagtatcagatgtatggagtatacatcggactggaccgacattgacaatagaaaagatatcataaacgtactgttataactctctaagtcaatatcacttagttgatcttagatcaatagatcttaatcttgagattgttagattctggcttaactgtattatttgtgttctttgacttgttcgttaaagttgaccaaatagatctttcaaatacttacatcttgagaacatgatagtacaattgaggtggagcgctaatcattgatatagaatctatagcttttataactacatagaagtgaaatgatgatttcctttgaacttggcttaatagagataaatggaagagctcttattttagtaattatattagtttactaaaatattatttataggaagctaagtgttttaaggataaaattgttgggaatattttaccaggatctaaatttactatcaagtatgttaaattaacatcctaaatatgaattctctaaaacaatgaaataaacacataagagt

SEQ ID NO: 267507 - DNA, 688 bp, Cannabis indica
taattaagtgaaatatataactatatgtaagaatcagcatgatatgatctctcatgaaagcatgattcatcatcttaacaatatgtacgtatatatatatacattggtttctctggtcatgcactgtcctcttctcctatatataatacttgttcatttttacaattttattttttatttcaaattcaagttttattttcattgtatttttgtcagaatgaaatacataaattatgagtagtcatgaatatttcactttgttttcgttttaggggaaattaaaatactgttattataatataaaaagttttattcaaatagctagggaaaggaatttccaacaaccatataaatatatataatatattctttatttaattatagagcacactttgtcaagcattgacattttcattggcttttctcctaatatgaccaaaaaatgggataaaagactatattttaatatcttatatgctttccaataaaagtgttatgtatgtatgttaattagctcaaaaaaaaaagtgttatgtatgttaattatcttctcttttcttattataaggaattatcttctgttttatttacttaaaatattgtgtaatattataaatattaataaatatattgttgtctaaattttttatttattactattaattttaattaatatattttttttagt

SEQ ID NO: 267508 - DNA, 1096 bp, Cannabis indica
aaaatttagacattccaccaatttgtataaaataataatattatttttccaaattacttaaagtatccttttcatttaatttcttctccctctttctctttctctattctcttggtttctctcttctcttggtttctctctccaccgaacacaaacatcgacctccaacggctacaaaccaagataactcaaccaccagccactccacttctcttcctccctcttctctcttcctccctcgacttctatcttcctcctcgatttctctcgctcaaccatcgtcgccacccaaaactcaatcaaacctaaacccaaaactgaaaaccccctcctctgctccattcacttaataaaagttcgaaaccaccaccaccaccatttttcagtgttgaacgcgtgccaccatcaccaaggataaagctcagaccaccaccgcaccaccatcatcaagaacgaagctcagaccactacgaacaacgacaacctaaacatggtcaaattgtaaattttctttaaaagtagatttttcatacattaaattgcgaattcgtgtatgttgttgagattagttgaatttttatagatttttgtagattatgtgtcttgttgatggtggtctgttattttcacagtgatatcgatgttggaaatattttaccaggatctagatttactaacaagtatgtttcattaacatcctaatatgaatttctaaaacaatgaaataaacacataagggtttaagaaaaccttacattgggtgcagcggaatataatgactccttccgttcagatctctagcccttgattcctttctgtagcagagcattatcaagatctgaacctggatctctttctctccttcttgagcccgattctccttcttgttgattggattcttcacagtcttacacactatgattgagataccacttgatgtgtgtgggcactcactctatcactcaaggtatgaaaatttgaagaagaaaagagaaggaatggtggttcggcctaaggaaaagaataggaggctcaattttctgaagacagaaattcatcaatctttaagtgtgagccatcactatctatttttata

SEQ ID NO: 267509 - DNA, 1413 bp, Cannabis indica
tttatttatttaagtaaataaataaatgagatataaaaaggatgttatgaaaccctacacccaaacctaaccttctctctctctctacgctctcagccttcaccagaatctctctctctctctctctctgtgtgttctcagccttcactagaaaagttttcaccgtccaagcccaaggaaaccccatgaaccccgctgctgtttctccgcccctcgtcgtcgattgcagctccaccaatcggtcgtcgattgcagctccaccaactcatcgctgattgtagctccgccattgtcgttgttgtcgatcctcctcgagcgcccagcagtctaccagaaaccttttatttctccaatatttctctctcaagatctccctctctctgtctcttgctcatctcccactcaacttttagtcttagatctaatggttttccttctcaggtgatttcaggattggatcgcgcgcgaggaggatcgatgataacgtaatcggtggttttgagtttgtacacgtgatcgatgacaatgtgattcgtggttatgagtttgctggatctgaaatttttgttttccttttgttatttttttaattattttttagggttagttttttagtttgtgttcatagttgtttatctctgaaattttagcagtatgtaattctaaagctaggcattcttacagcaggatttgtggtatattttgttgtcattttttttgtctcctgtgcaacacaatttttctttatacaacatgttctcaactcattgagagagagagagagaggcaggagagagaagagcaattattgttgacattatttagattttataaattgagttttactttaaaaaaaaatgaagtttgatgtttgtaccttgacaattaattaagtttaggaattttagtaaattttttatttggttaatttttgaaaattttgtacccaaccgaaataagacaaaacaaaaaaacaaaatattgatatcattagaaaataaatattttaaatttcctacaaaaataaataaatattttaaaataaaaaaaataaaatatatcaaaaaaattattaaaataaataaataaatatagtggcactttttgtgtgtcactatatctctaaaaatattaataataataataaaaaaaagatatagtgacattttttgagtgtggctattactttccaagtctgacaaaatttaactctataaacctatagtgacgcgcagaaagtgaatgtaaaagggttcagtgacacgtgtgaagtgtcactaaaaactatctttccagtcaccctcattagtgacgcgcgttgaagtgtcactaaacagttttagagttactcaatgtgtgtcactaaaacccatttttctagtagtgctagttgaacttctctttactacgtac

SEQ ID NO: 267510 - DNA, 676 bp, Cannabis indica
gttttttattttttttattttattttttaatttttttaattatttttttattccaacaacttgagtaagatgtagaggaatataatgtgtgatggtaagtgatgtgagaaaggacttaggattgtggagttagtgatgatagtgctttgtaaaaaaggatgattagcgccatttctagctctaccagacaaggcatagctgacgtagcagttatgatctgtggtcctgtggaccatatttacgtaagaattaatttgctttttgaccaaacaatattcgttgcaacagaaaggcattatcaaatttccatgtgactgagtactatatagctagtttaattatagcactagaattgtgaagaaaaacgtactagaatcatagaaataagctttgcgaaaaaaaaaagtaaactttttcagaggcagaaaacacatgcatgacggtacgtttagatatatataataatacacgcgaataccaaattattaaaaggatagaagaaaaagtactactaataaataaagtgagcaaaatgaagaccccacaccttatgattaaagtagtaatataaactgatgatactactaccaaacgtgtcatgcatggaatggaaattagccactgtgagatgaagtttcttggattgatcatcctttttaattatttgtttattctt

SEQ ID NO: 267511 - DNA, 1735 bp, Cannabis indica
agggtatgtttattatcattattgtcattattattatatcacttattgtttaccttctttgtatctttaaataatggaactggggaaatggacaggaacctatggctaaggcgaaaaaactacactgcagccacctatttcatcttgcatgtttgagatcttggtatgatgttactttttattttttggtttcttctctttctacctttttttttggtctttgggaggtgattattgaagaatttatgcgctagtgctgaaattacacaacattggcaggttggatcaaggattaaatgagatttatgcatgtccaacttgtcgaaagccactttttgtctttagatctgaagaaagatctcaagatgatgcaaatccacgcaatgcagacattttgagtgatgaacagcttgctcgtcaaataagttcaggacttgatacacaaaataatgctggaaatagcctgcctacaggagtaatacccaatcagatacagaatcatacagaaggcggtccttggaggttcattttcttaatttacaccagtgtagtttttagctgcaaaagctgcgaaaattggtgctctaatttagtcatcctcttatttttctgcaatagcctgctggccctaacattctagtgaggttgtagtggtggttgtctgttcgtttagggatcatcctatttacttcaccatttgaagagcttaactctttcattattttcctctcttattttctaaattttttgaggttgtggcagaatagtaaacttgattgggcacataagtcccattaacttgagacttctattaggagagatacgaaacatggttttgaaaaaatataataaaatctttttagataggctaatgattcttatagtttatgtaaacaaaatctaaaatagccgtataagcttttccaggaacttattattttgagaaggttgcaaacaaagggattccctttatatatgttgagcttttttctttttccttcctctcaaatataaaagataataattaagtttttcgttgcaccataggaatgcaggattagattcaagttggttgcacacttggccaaatcagggaattgatggagctggtccatctaatgctattagatcagtgggtctggggagagttcagatgatgatgaggcatcttgcttctgtcggagaaacttatgcccagactgctcttgaagatactgcctggaacctctggcctatgaatccctctcaggctgccgcaatggtcccaccaattcctcctgctgcaggtggtagaatccccagaggaactggtggtttgcatataaggactgcttcgcgatctgcaaatgacaacctagcaaacatgcttgccatggctgagactgttcgggaggttttacctcatatcccagatgacataattttccaggttcggtttctattcttcactccatattatctgtatttgctgagttatttggtctggacgatggagtaaatcatatctgtggctttctaataagtttttcagtagtgcctatgttggtagctgttgtatagcctgccaaaacacgcgcaagaaactgcaaattcatagaatgcaattggttaaacacaataatcttattcttttataaatttgactcaagatttatatagttacataggattccacagtcacatgaccctcttcagttttcttgttaactgaaaattttgaactctctgtagtcta

SEQ ID NO: 267512 - DNA, 766 bp, Cannabis indica
aactcatatttacagcactagtgaatgataaacgatcatccttgtttgggtggtttgagttacaagttggcaaactcaaagtcacgagtttgagattattttaaaaatacatttgtatataggtattttatttcaaaaaattgagtttatatggtaatgttattatttctgtatctttcattgtaaagaagttccatactattttcatacttggtaagatgtgtaagttaagaattaaaaataggtttggagatttttaacatgttaaatacttcatttgtaacataacttgatttttgtaaaaaatgaaaaatcagcattatattaacaccaaaattttattaaggcaatttattgaatttgttccttacttcaaaaaaatatatacatatataatggcaaaatatttcatcatttttataatatataaaatatatatttaaatttataattttttttttctttcttttatctgacattctaaaataattctattttttttaaatgaaatcttatattacaattgcctctgtctcttcatctcgtctctgttgttagtataataggggcaaaaccaataatatttttttcttttagaattgaaataatattgaaaaagacaatgcaaattaatgaccttttgttaaaactatagctttattaatttcgtataaattatttagagagtgaaagtacaatattttaacattttgagtatatttaccaaaatatccctaaaaaaaagtatatttaccaaaataaataa

SEQ ID NO: 267513 - DNA, 662 bp, Cannabis indica
acggccaaaaaagttcagggggcacgatttagtacatgtcaaagtttagggggaaaaattactaattagcctaaataatattgccatttaatatataatggtcgtctatatgagttgggaccatttggtgatgtcatctgtcgtgtgcaaccatgttggtatcgagaatgtcaaagaatatggtattgaaaaaaaaggtggtttcctttttgtagtgcgtgcactccctgggtttgtcataagggacaaaacccttacatggtgggaccctgtgtctgaaggatgccacgtaggatgatatttggaggcttttggatgtctctttagttgcccatatctagattacctcatgagggtatccagattaatcttgatgggcctttcatcttctgtgaaaaataatcttttccaaaccaaagtggtcaaaccttgtcgcatctgtaagttggacttgttggaagctatttaccaggatctagatttactaacatgtatgttgattataattctataatctaacaccctaaatatgaatttcctaatacgatgaaataaacacataagagattaagaaattcttacattgatggcagcggaataataatgacttcatctatttagatctctagcccttgattcctttttgtagcagagaattatca

SEQ ID NO: 267514 - DNA, 984 bp, Cannabis indica
aattaaaaagaaaattttaattaataacgatttccataaacctcattgattagcaacgagctgcatagtacgtttaaaaatcacgtaacacgcctagactagtttgggtgttacacttgaagtcttctcttttgtttctagggctctgattctcaatattgatcataaatcacgagttcccttttaaatgagccaagttttctctttaaaatttgtgaaattacgaaattgcccatttttgtcgtcgagaaggctttgtcgcgacaaagcttattccccgtcgtgacggctggagcattctcaacttggaaaactttctgccaagtcccgtcgtggcgaagctttttccccatcgcggcgaaagattctgcccgtcgcgacgggctttggcagaaaagaactttgcacattttttccttaaccttttcatctcttttcctctattcttgtgaatacttcctttaaacatctggggacctaaaataaaagaatcaagcataaaatagccctaaaactaaaaacaaaagtcaaaaactacccaaaatacgacccgaaacttagactaaaattagcctaataaattcccagaaactagatctttactcgccctcgagtaaaactaaaaattaagacaaagaaacaacgacatgacatgtaaatgagcctctaaataattaaactatcgctgccacctgtgcaacttcaatcatggttacaccagaatttcaatccaacaactctaaaaattaacttggatgcacaagttagaaaaagaaaatatttgttctgttttgttatcttgttttcttcagtttaacttttagtttttatccaaagaaatcctatgtagccttggaagccccaattttccattccctgtagactcggtggatgccatgaccctatgcacacatgggcgccagcggtccatgtagaagatcttttttgaccatgtttggtcttttttttttgtttcttagtttt

SEQ ID NO: 267515 - DNA, 1270 bp, Cannabis indica
atatatatatagatagatatataaatagattgattagcttgggatgtatattatatggtttagggattattttttatttatttattgagtttgattagatttagttagagatattgttagtggtatattttattaggtttatagcatatatgattggaatttttacgtgatttgttaaaaaaaaaaattattcgttatggtgatagtttaatatttaggggaaaaaaaaacgatattttttttaatcatgtgtagtgttatatttcttttatttttatttatgataatttaaagttaatagagatagtatcactatagttaaactttttaaaaaaaaaacaaaagtgatatatggtttacttgggttgatagtttagtgatagttttcaaatgtgatatatcttttttaaacctgatatttaggttgagtcttaataagtttttttttttttaaaaaaaaaactaatatttaatattatttaaaaattgccaaaaagagaaaatcattagtgtagaatgaagccaatttaaatttgtgcaatattcttttcatatgtttgcttcttgtttccacgcttacacaaaataaaactgcaatgcataataagtgtattaacaaaagaaaaatgaacaaaaaaaaagcagcatgtactaccaaaaatagaaaaagtagatgactaacggtgagatagagttgatgtaatgggtgagtgagtgagggtattaatggtcaataaaattaataaaatctataatactattacatgataataacaaagagagaaattatatattaggattatagttatatagataaataatagttaatgagaaaaaaattcttaattaggaactataattaaaagaaaaatatgaattcaatttaaattactataagtaataattaatgagaaaaataaaatgtcttaattaggaaccataattaaaaaaataatataaattcaatttaattaaaagtctgtgcatgtataaacgtatatactttcaacctgaaatataagtaaaaatttgacatatttcaatatttacaatacaatgtataatgaatattttaaaatatgatagtatagagtgtactagggtgggcatcatccaatccaatctaattgaatcgaatcgatccaatccaattcaattacaaaaagttggatatccaattacaattggattggattggatgctaaaagttagattctaattggattggattggttattggatgtcaatctcaaaatccaattaaaaaccg

SEQ ID NO: 267516 - DNA, 1218 bp, Cannabis indica
ttaaatatgcaacaaaaatacaaatacaaaacaacacgaattaaatatgtaaatcaagtagacacaaaaaaatattttcgacaattttaaaaaacatatacaacacccaaacaactttaatacatgtttaaacaactaaataacaacaaacaaatatctgtataactactatactttaatatacaaattacataataggcataaaaaaataagacatcaaataacaatcttacaaaataaaaggaatttaatagcaattataatacacttgctcaccaaaaatatatgtaaccttgaaaactaaacatatactcatttttctcttagttgaacaactaaatagcaacaactaaaaaatttgattacaactctatagttgtcacttttaccttacaatgacattactatttgtaggtttctctttatgtccttaatttataattgttttatttaatatcatctttagttttcaagcattatttaatttcataaaaacaaaatgacaggataagctccaaatgcgcatgtgcgtcctcctccaatcaactgtaagcggggaccacggtcgtcagccactttcttagcaccgtataaatgaaaagaaaaatgtgaaaacataaaaaagaaaaaaaaaaaaaaagcctataagactaaaattataaataaaaagaatttttagttatttggtgtaaaattcccaaaaaaagaaaaatacagaacaatcaattcaacaagagatttatttgctgtaaaaaatttattcaacattcaataacccaaaaataataaccattaatgttaccttgtatgtgatatgctatttcaacatgtagataattttaatttaaattatatatattgtaattatttaagatatatatatcataaaaattttcaaaaatttcagaataattaatgtgttgaacacgtggtttaagtaatttattgtacgtgtatttttttattatatatatatgtgtaaaatagacagtttgaatcttttgtattgtaaattatgcaaaagttctgaaaagtttataggatatttgttttttattattatttatttaaagactttgtagggtatcttaaattgtacactattatattaaaaatattaaaattaacactatttgaatatcaaaaataataaaaaaaatatatatatagagagagaaatttgtggtgaaacccctttattttttattttttatacac

SEQ ID NO: 267517 - DNA, 1359 bp, Cannabis indica
tgtatatatatgtgtgagagaaatatagtgatttatggtgatggtttgatctacagaaaggcaagagatagcaaaaacatgtatctctgactccaaagaaatttgtgtggtggtcttagtgtttgagagaagacatgtgggagatgatggtcacaacttggagagataatgagattgaagacttgagagtggaaatggtgtttgatttatatatgactttttcttagatgaatattgataatatatgaagagggtggtgtgagattggctcttgatgaaacaaagaaacaaattaatatggcagaagcatctttagagtttagctaggacgagagagagagagagagtatgtggtttattagcttggtttttaaatgatccaatacaagaaaagactattacactatatataggcctctatactcatcctaccgtaccccactaacctatattgtgaactctacactaacactcaatcaaccttaagcccatgttaatagctccctttttattcggtcaaggtagttgaggctcaccactttcgatggtagtcgtttactccttataaagactcaagtttgaataaatcatacatattttcttagtaaattatatattgacacataccctcacgaacacacaaggatcatggttataacttctataaccacttcattagggaccaacgtttctatccttgaaactaaattttgatttttgaattatgcacattcacccttacccgtcttaagctatattatgaaataatacaacatctccaaaatagctactacttttagtacttaatgttatgtatttaattaagctagataatgcaaaaacacttcccatatacacatctaaggtgatgtgagactaagacttcatccacgtggtacacttaaatctaagcttagtctttacttctcatatctcgtcatttaatgccacaagctcaagataaatcttcttttagtatctttgagtcacttattaagctatagtgtataatgcctaaaagcgtataaaattcacttacgtctagcaatagaaataattggtctcaattcgtaagggtaaaggcacatatatcttatgtaaaataatatggattacaactttaaaactatattggattctagacaaaattatagtacaaaattatgaagcttaaataactataaatctataatttatttaatagtaactttcgacatttataacatattccaagcaatcactattaccacatcgagatatctatactatagaaaataataactaaatatttttggttattacactactccaccccaagagtaatcaccatctcatcaacagactttctagcactaaggc

SEQ ID NO: 267518 - DNA, 1702 bp, Cannabis indica
attccattccattcctatttctattcccattcccattcccattcccattcccattcccattcccattcccattcccattcccattcccattcccattcccattcccattcccattcccattctcattctcattctcattctcattctcattctcattcccatattttcattcctcccaaccaaactaaattcaaacaaatatcatatctctgcatgagtacatccatatattattttcattctcactacaacaatcaatttcttaagttaaaattttaacttaatttcaagtgtttatgtatactcaagattaaggttttttattatttatgcatgtattattatttaaacgcttttatttagtatttatttttagaaaagatggtgagactcctatccctatacatcaaatttaactcacatttcaattggcttttggcatgccaacgtattagtagctccatgctttgagtaagccacaaccgcttcaacatctgcagaggtgtcttccgaaaaagtattaagtaaaattgataaagaaaaaaaaactaacaaaactaaattctactattgattgattttttttaaaaaaaaaatccacaacataaaagacaggtaattaacaattgctcctatatagaacaacaaagttgaagacatttcgatacatttactaaaaaaaatgatattaccatgacaaatttgctagtttattattatcaaattagcatacacttcaacatcattcacagaaatttattaacaaatctaccattcaaaactatatgagcacaaacaataaatgtaataatcatcaaaatgaatccaaaatatgtattattattttatccaaaatgggcaagatttaattcagtaaataagtaagtcaactcgacataaaatttgtcacttaacaacactacaatgtaaaagataaatcaaaatccacgatcaaatcgaaataatgaatgtctccacaagtacataaacgaataaagcaaaattaaaattgcccaaagaaaaacacttacatagatattaagttgtttcatgaagctagagaaattattgtgcttgaaatatttgagctaggagcaatcccaccacatatcctaaatgacaaagctttattagcggctccttaaatatgaaggcaaactaattggtaaattctacttagctctatagaagaaacaagaaccaaaagaaaataggaaaaataaaatcagcatttagtacttacctggtaggtactacatcgtaagtatgacctaagtaacctcttcttctgaaagctccttaacctccttaacctcttcttctaaaagctgcccatctttgttcttatcacacctaataataattttcaccattccctctttagatcaaaaacaaaaaataatagaagagagagagagagtaccaatgcccacatgtcaaagaatatctaatctgaattcaaggtctagattagtcatatcttatcaaaattttcttaaaacatcttcatttattccatcttttgcagaaatactcctacgcctagccaaagtatcatataactctcaaacttcataacccataaacgtatatacatatatatatatacaaacataaaactacctatacagtcactaaatttgtcttgatagagttttccattaacttggtgctgataaaatcgcttcgcaatcgatctcca

SEQ ID NO: 267519 - DNA, 1103 bp, Cannabis indica
gcattgtctagctcatagcttttgtttgtatgcagatcgtattttcaataagagtaatgctcctactgatcttttatctattgtaatgggtgaagcttattctcaaacaaagttgcaatatctctttaaaaaaatcaatgctattaccaagtgtggactagaaaagaaaattctttttttttgataattttatggcattttttatttatatacccatatatttagtttatttggttaaaaaatatcagtggcattaaatttaatgtcataattatgtaaattttctaattttttttttcaaatagttttgtaaatagcccctaaaaaagttaataacatattgatattaacgatttcttatatgttgccccgttagttttggtgtgtaacaaactttacaaaaataaattaaaccatgtatcataattatattagttttttttaacagtgaacgaaatttcattgaaaagcaataaagtttagtacattgtaaagataagatgataaaatctctattcaaactcattatttaccctaagtgcgtgcacaactaattcataagctgttttattggctgaccaacatacacgaattagggatgcctcaccaaaattagacagcaaagtggaagtattatctaaaagagaaccaagaccattataaagagaagatactagattcaataaaatattagttagatataatatgtaatacaatatttatacaaggcattttgattcacttcttatgttatcttaaatttggcagtgatgattgatctcctcatattttcctcctcttattgttgtttgttgattaatactactgactggtatgttgcaaaatgtcttcaaatgctatatctttagttcatccccccaagctttctaactcttttcttactctcttactcttgcagctgattactgccttcttgttgtgcaatatcatctaaaaacaatgtcatattgaggtgtgaagatccaccttcatcaacaactctctttgccatctccccaagctttctagctctttcccttctctccttgctttcttcttcttcattcaacacttcctctaaaacactcttaagagtttccctc

SEQ ID NO: 267520 - DNA, 854 bp, Cannabis indica
tgatctttttaagatcgatctgtataattaaaagttgaattattcataataatttataaatatctatctatatttatatcaaagagatgtgagatatttgaaagaaacccattgtttgatgtatttttttttaatgtgggaatgtggtagttttctcagacttttagtgggtaatatgaatacatttataaacttgagtttcatattttctcataagtgattctcttgcacgtatttttatgcaaatcaaaacttataaaaaaaatacataaaaatacacaaatacactaagatttagactgatctactaatgattaaaacaagaggttcccttcaaatacccgtgcatgccaacacttaccctcataacaaacaccctaaggggctgtttggtatgcagtaatgggagaagtgggaatggaaatctaaaagtttactatgtttggttaggtttttaatattttaatgttggctaagtgaaagtggtgggctttagtttggttggtaagaaaaaccaatgaaaatgtggttttcactttccaatgctattggcaaacacaatcttttgtattttaaaattattttttcatacatatgaaaatatttaaaatataaagcaattcccctaaattaaaaaatgatatgtgaagtacttttcttatttttttatatattttattttataaaatatattatcaatttggacataaatttagtctttgtaattatttattattgttaattatttttataaaattatatgaaaattaataaataaaaattattttgaacacttagaaagaaaaaaaaatagggattttttttcatttgtacacttcaaaacagtttttttt

SEQ ID NO: 267521 - DNA, 985 bp, Cannabis indica
tagtaacaatatgaatctatttgacccataaattatattattttgtagcaaccgcatacatcaatgaaaattataattatactacttatcttgtacaaaaggtttgaagtgtgttattttacagggttctacatatgaaatcattgctattattttttatattgtagaatttagaaaatgaattctataactacaaaaaatagttaattttagtgacaactttttagttacaacataaattttttgtgattaaatgtgacttttagtcacaacaaaatattacttgtgactaaaatatagcatttagctacaagttgtcaataatttagttttagtcataacaagtattgtgactaaaaatatatgggtcccaaacatatttagtcacaacagattgtaatttttgtgattaatacttttaaccacggactttttagtcacaacataagaatgttgttttttataattagtcaaaacttttttacttttagtcacaagttttgttgtgactaaaagtaagattttttgtagtgaattgctcaatattttaactaattgtcattattttcatttacagataattaaaaagaagtttagtagaagatgaaagctggtgggctcatgatctttagtatttaatcattttaagttggcaataagatgatttaaatttttaaatgttgttaattccatttttggcatatttaattgacaaaaatattttattatttcctattaatttcggctgaagtgtttaatatggttttcatatttgtgtatatctaaacttggaaggaaagttgtctagctttcctatttatggaaattaaggtaaatatggtaagttttgattacacacttattcttttctaaccagctgttaatctgatcttgtgttgagtttcccattttcttagatcaggtttcttgaagagaaaaccggagctaaacttttatttctataaaaggaaagttgtagttactg

SEQ ID NO: 267522 - DNA, 2047 bp, Cannabis indica
ggtgggggcatcttgaggccctcctcgccattgccaaaattttgaaccacttgcccttcattactagcacagccttgcaaaactacctccaaattaccagagaaatcatttacctcttcattcttactttcagcatttttccttcctcgacgagtcttcactcccgatcccttgatttccccaccaactccagagaaaaaattccaagctttctttcgagtgcttcttcttggtcgactaccagaacccgtccccaaactaaatttgttgttttctgcagccacatctcccgtagttccatttccatcagccttctcctctacaacagggcattcgggcagagtaaatttcgtgactgctgggtatgggtgataccacgtatgtggtttccttttttttgagcccaatagttgaacaatcatcatagataaatcagggggattacatataagagaagcctgggctttgtataaatcagtaacatctggcccatatagctgaaaaaacatcttttgggcttccaaatcatcattgggccatttaatatgagtgggctcagggaagtcatggggtgtttgagatctacacaaacaaaaagggggggatatctaagctttgagcaatagttggcccaatatcaggaatcagctcacttccttcaggcccaaaagagaaatcaggggttggcaaatctaagaactttggcccaacttcattcaaagccagctgtccattctccataatttccacgttttgcacaccagcaacattacctattgcaattccatctgccacctcctcataagatccatccgtactctgcaaattcgaatttgttgtaatgggcctaccctcttgtacgaatttccttttctgtccaccgtcattgtccttgactgcaacagtcacttgccccaaaacctggccctccgacgacgaagcagtggtgttcttgaccaagggctcctccgaccgcttatttcgtttccaggtgtgcctccgatatgatttagcaacgtcccattcagggacctcctccctaatcacaatagatctgagagtcccttttcctctcatgttaaaataattagaccgtcctgtatcgcttttaatccatgttccatacattggaaccgcaggaccttccgtggaaatgaccatcgtggtctgagcagagcaagctttatcccagtgagccagtttgccacaattaaaacataaatggggaagcttttcatatttaaattgaacccaagaatcaggcttcccatcagctttaagaaagaaccccgatggaaagggatgagacatccaaacctctatccaacatctaagataaccccttctaacaatatcctctttacgcttctcctccatcttaaccaggtttcccacttttttgcaaggattggaacattctcacttgataaaaaacgagtaggaagtccatggaattggacccagaactgtgccaaatcaaattcgccaacgaagacctctccttcaatcggccaaggtttaagattaagaagaacaccattgataatccatggtcttttttccattacaaaatggcagtcatcttcttcctcaaaaaagaatccaagaactccgtcttcgcacttcttcattcgccaataacccagcctcctccaaacaccagcaaggatcttcttcacaactgatgccggcatatccttacacccaactaccttacccacacaagccttactagccacaacatcctccaatgtaatatcttcaaaaagctctaacatttccatctcaagcccactatctcttgttaacagttcatctttctcagtatcaacaaactcaacttgaatctcttttcccttatcccccatactaaccagaagaaatctccacagcaccaagaaaaacgaaaaacaaacaccagagaaactccaaagaagcacacaaaaccaccaaagcaaagagcactaggaaacactaaccagagcagtagaaaaaacttataaacaaaacattaaaattaaagggcaggacttacacacgataaact

SEQ ID NO: 267523 - DNA, 1414 bp, Cannabis indica
gagttatatccaataccaattgatggcttaatggatcattaaattatataaaagaattttaaagggcacaagtgattattttcatcgtaatagaactccacttttgactcaaattgaataaaaataccaacctactaatgaagataaaagaagcacaaagctactcatgaggaagatttttatgaagatgaaaagaaacaccagtcttctaatgaagatcaaatgcagtagaaaagttggagccaatacaagtattacaatttatgtgctcctctcctaaataggcttacacttttgaaaattctattactattaaagatgcaatgtatatgtaaataggtcataactatgcaagtttttctcttggtggaacacttacaataggcttccacttttgacaataggccacaaccttggaacatgtaaaacatgcaagttatacttttttaaagttatgtaaaaatggaatggatatgtaagtaggctacaattttgaaacacttctaaataggcttatacttttgaaagtttcattactactaaagatgaaaaaagtatgtaaataggcaacaatatgaaagtcactatcttgctggaacacttgaaactttgtcactttaaattattataatgtgtgttttatatgatatatgctatccacgtgctatcattactagtatttatataaatatatgagaatgtaaaatataaagtatatatgagaagacaatagttctccatcagtatttagtgaaatttggtatatataagataaacatataggtttctctcaagataacatcgtccaaattgttaagtccctttctacaaaaatattaaagtagcttggtgatatttttatttttaaaaattttaattataaaataaaagcaaaatttttgtttttaaaattttaattttgaaaaataaaaatatattttataactacttttatttttaattttaaaacaagaaaataaatttttttctgtaaatattatttttattttaatttgttgattttatttaagtttagatttgggtctgaagcgccgcggggatgggcgatcagatccgaatctggtgttagggctaggatctattcaggtttcaaggtctagtttggagtgagagttcaaaatattaattatgaaaaataattatttaataaaatttagaaagtgatttttttttattttcaaaatttttaaaattttaattctcaattaaaaaattgttttatagaacatcattttaaaaagggaaaaaacaaaaaatacaaaaaggaaaaaaattacaaaaatactttgggccggcccattaaacatttatacagtccacatacaaatatttacaaaaataccacatgcactaagccttcagctgtacagagcgaaccatgaagatgaaaata

SEQ ID NO: 267524 - DNA, 586 bp, Cannabis indica
attctcaattaaaaattgaaaagtgaaaacagttttatagaaatgattttagaaaatatttttacttttttaattttaaaaataaaaaactgattaaaaaagtgttaccaaacacacccataatataagtacaaatacataaaataaatgtgaaagagaaagttttctcaacttttcatcattatttttaattaataaaaaagctatcaaaaagaagttgtcaaaaacaaagttatcaaaatctcaattaactataaaaaattaggcagtaaaaaggaaataaattctcctaaaataatactaatgataacagtagtccactaattgtatttttgtaagaaactctctcaaacttgaatttttaaataaattcgtgcgaatgctttaaaattaaaataatcgttttattttacgataaattaaaaaaataccttattcatttattaattaattaaatctacctctaatttatacttcttttatatgtgttgtacttaaaatactctgacataagaaagttgagtatcttgaagtgacataagaaaaattagtacagtgtttaaaaaaaagtaaaaatgatagactt

SEQ ID NO: 267525 - DNA, 1626 bp, Cannabis indica
aaaaaaaaaaaacaaaaattaatttatgtgtatagttcatgacttagccaacaaagcattttaattattctttacatatgaatatatgattgtgatagcaaccacccaataaaaagcatgaacattaattttttttttcatatagttttttttttcatatatatataataaaaaattataattaattaagacaccttttcaatctaaaactttatttattttgcatgccattaagttaattttcttttgagaaagtgacaagttttgaggaaaaaaagtttatctacactttatatgaaatgatacatcgatatgatgtaactagctatataaatatttatatatataaataggttagctataattggctttaatttatttcttttggaatttatttttattttatgtaacactttattcattcttctaaaaacaaacgctttattaaaagaaagaaagtgaaagtcatagtcttagatttatcatgcttaattaagtctaagtggaaatgacaaaaatgtctatatatataaattataattaaaacaaattaataaaaagaatataattaagtaattttaattttaatagaaatgaaaaatttacacaatacattcaaaacaaattattttttatatttatatttttacaatttttttaatagattttcacttatttgttttagaaaaaaaatttctttcttgctactacattattttgaaacaagcagaagaaaaaccacattttatattgttagcagcaaaataacgtcaaaataatatttttttaaaaaaaaataaaaaacaatactttgtatatttgtgaaaaaaaataataaatttattatctttatatattaataaaataatctcagtaataatacgatcattgttggaaaatattattagacctaactcaacatgtttgttcggggacgactgttctcacgctattgagtcgaacatatatcattagccaatgtcatgttaaacaattctatttaacaaaatttgctttactcactttattttactacaaaaaactactattttagtgacaactttttagtcacaacataatttttttatgactatatgtgatttttagtcaaaacaaaatgttacttgtgagttgtgactagaatatagtctttagttacaagttttcactaatttagttttactcacaacaagtattgtgactgaaaatacatttagtcacaataaattgtatttttgtaactaatacttttaactacggatcttttagtcacaacataagaatcataatttataattagtcataatttttttacttttaaccacaaattttattgtgactaaaaataaaatttaatatagtatttattaagtggatcaagtatatatatgtcatgagttgagtaatttgcggcataaatacttaaatttaacttccagttgtaaataaatacctaagtttaatttttggcggtaataatacctaagttatatttccggaactctgtagatacctaaccgttaaatattaagccattaaattcacgtgtcattttcttattggtatatttaaactaatttttttttaaaaataataaaaatttaatgacttggaccaatcagggat

SEQ ID NO: 267526 - DNA, 1891 bp, Cannabis indica
tacttttttttaatagaaaaaagaaaaaacagagatagagagaggtgtaattttaagtttaaaaattttattctttttttcttatttttgaacgaaaaaataaaggaataattagataaggtattttttatgtttaatgaaattttttttgacatttttataatttttcataaaaatatacgaaaataacaaaaaaaaataacatctaaataacaccaaaacaataataaaaaataacatatataataaaaaattaacaataaattaacaagactacaacataaaaagatcgtattttttgtaaataaaatcaaaaaaatcataaaaatatttaaaattctgtgaaatcgtatttttgtaattttttttttttttttgtgtatttgtgaaataattccaaaaataaatctaaagaaaaaagaattttcttaagtttaaatttttcctaatattattattattgtttgaataaattctctcctaatattattagacatagtctaaactaaaaaaaagatagagaggtgtaagtttaaaatttatcttttttatcatatttttgaaagaaaaataaatctaactccaaaaaaaaaaaaaaatctttaagcttaaaaaattatcttttttatcttatgtttgaaagaaaaaattagatctactccaacaaaaagaaatctttcttaagtttaaattttcattctcttattatatatttttttaaataaattctcatattagacttaggctagacaaaaacgtaaaaaaagaagttatcttataagtttaaaaatttgacttttttcctccaaaagatattttttcttatttcttaaaaaaaaaaaattcttttctagaagtttaaattttctctcttctaattatttttttagttaattagaatttttaatctttgaacattagcaaattaggatttttgactcctgatttaatacatgtcaaaatttgaatgttataatttagtagatattaaaatttaagaaacatgatttagtatataaataattataaaattagtaaaattgaatgaaattagataaaaatctttaaatctaacaatctcaatagttaagaaaaatttttaagaaaaaatttttaaccgccagaaaaaattcaagagcataatttagtatataacaacatttagaagataaaaatttaataagccattgttttactaaaaaaagaagaaaaagaaaatagagacaactttctctctcctttcctcgtcatctattttggtttattttaggttggaaaaatgaggtggcaagtttttattggagatttaaggaatatgcttttttgaaaagatactctttttacatggaagtaattatgtactttccaaactaagttaactaaaattagtttttagatttgttaacaaaaaattaaaaaaaaaaatgtgaattttttttttactatttttttttggaaataaattatgaaattttattaataacagtgagttaaaagaataggttacaatctaattaggacatcttttctgtcaaaaatacacattttttatgttagaaatactactagggatagaattataaaaacaaatcaaataatgaatcgtctaattctcagatcgtttgataaaaaaattaaaataaaatcaaatgagaaagattgcagtattataattaactttaaaatatttatattctattttatctctcacattattgattcatccaatctcataatttgagcactcaattattgtataaaatatttaacccaaccactaataacccactagtcgtatagataacttgttattactaacctctaataatgattttaatggtgagctatacaaaaaacaaaaaaaaaaaaaaaaactaaaacaaaccaaatt

SEQ ID NO: 267527 - DNA, 749 bp, Cannabis indica
aatcaaactgggaatattaaaatgcggaatttcaaaaacaaaatattacatagtcttaaaactaaatcaactttaaaattgatttataattgatttgttctaattcaaatagacgagataacaggtcatactcccttgtcattagctttttattttgaagcaacgcttcccgttgaattaacatctcgtctcgacgagaattctatgatcaggatgaaaatgaagagttactcatagaatctttagacttgcttgaagaaataaaagatgagtcacaagtataaaatgttgcatacaattaaaggataatgagacacttcaaaaagagagtaaaagaaggactctttaaaatttgagacttagtattgcgataagtattcacaaagatgaaatatgccgtatcaggagaatataaatgaagttgttatagcaccaggggtttataaattagcatggccaaatagctcactgatcaaaatcacttgaagtagagaacatttgagattgtattatcaataattgccttgtttgtaattgtttattttttcaaaaattatgtaattttaaaatatatagtattggaatttcagtcaattcatttgcctaaagtaatcataaatttgtactttaaaattacttggggattatataattatatattaactagacttttgaaaacggtagaaatataaaagtatagaaaaaaatatttaaaattaaggcttgaaattcaaaaaaattaaaaaaaa

SEQ ID NO: 267528 - DNA, 1331 bp, Cannabis indica
gcacttaaacttttgtgagattttcatcttggaattcgatataaaatgcatgacatgcggatggagaggccattaactctattaaaccttgttgatgtaactctttgcattcagtggacgccatttattgatgttctagattaatgcctggggtactagcatttgtagggtttaaatcttcattaagcttaaaaggaaggctcatgaagactattgatttttcaataaaggatggtcatatttcttcaggaactctccatgattattggcacatgagacttcgatgagctctttcttgatttgatgaaatgggtcatggggcgttaagaaatactttggtatggctttccatggagcaaaatattttttgtaactattaacgcacattttcattaaccaaatatgagccaaatagtgataatctcacatagaaaaataaaaacagtaaaaggaaaatatgaacgcaaaggatttttttatgtggttttgcagttaaaattctacgtagtccacgagtcaatcttattagatttctgatggtttttaagggccctttttcttaagattttttcgtccccctttttgatctagcttgcctctatttataatcacatagtaggcagttaatttcagggttgagtggtatttttacaacgattctcccctaaaatcatagggtctaattacatataacgtaaaataaatgcgattattatttgaatatcacacagttgtgattaatccgcttttacagggtcaaaataaacgtgtatcaaatacattgcaaaccgtatcatttaggatgtctcgctcggaatagagcagcgataatgagctggagcttgtcatatttctttccaaggttgataatacaaatttcaccgcttttattctggaaactcaacaccctatctgacaatcgcagctttaagtgacgaggtgatctttgacatgagcatgtcttcctatggcaaggtgaacgcctcgctatcagttgctctggttcacctgtttgttatacttagtttgtatactgtaaattatactctaagttttttcacgatcgttatatcctctccgcgtaatgagattagtgcctcgtcttgaatgcttgaagttacatggtttcttgttaatgcacaaggcgacagtttgtatatctttatctcgaagaagactattcagtcatccgagttataaacacactctgtcagttatgttttcaatgagttattcctcttcaaatgtaattataattacgtgtctaggttcatacttttcccagcttgacacgtgtcttcctctgatgtgctagccaaatttcaagtata

SEQ ID NO: 267529 - DNA, 1942 bp, Cannabis indica
aaatgttcaactctttattaatagtcagaaatatctttataggctttcaaggcataaaccataacatagagtcccacgcctgagactacaacccagataaactctggttcttcctggaagcattatgtaaatggctccttaaatgagcattcctctagcgcagggcttaccctcataactttggaagaatatcgcactcagtgtgccttatggttcgaattcactgcaatgaacaatgaaacagagtataaggcactcttagcaagacttcgattggccctagccatcaaagctgagacactcaagattttcaatgattcttagctcatggtcaatgaagtcctaggcgaatacaaagctcgagggcttaaaatgactgcatacttgagcaaagctaagaatctattagctcagctaaagcagtactccatttggcaagtttcgtgagaacaaaataatgccacaaccaagtttcgaactttggagatgagtctataagaaacgacacccgaacactttgaagccctaatgggcgccaaggttgacatctagtcgatctgagcacacagtgaatatggtttaggtttccatgaacttctttggaccttgattcctcaaatagatcaaggaacaatgttaggacatgatatttcatcaacaacaacccgaaggatcctaactcaacttatgggttcccaggttggaatgtcaacctcagcattgatttcatttcaccaagtaatgcctgaaaagtttaaaaaatgaacacttgggtgccgatactgccccgaggccattatgggcgcctatgttgacataattcaacctagcgcactccgatgaatctttctagagaagtcttctggattatctttattttcgtcaacaatgaagatacaagtgcttttgcaaaataaacgaagtcatttggagcccaaatgaaaagttgggcgcccagggtggcaactcccctctcactaggcaccaaggttgacgtgttctaaatgaacacatagttccatcgatccgattacgattctgtctcggacattattcttgtttgctcccaaaacaagatatgatacttgaaattagaataaaatattatccaagtggtggttcaacctccgggcaccaccaggcatcacaatgggcacccaggttgacattcaacctggagctcagtgtttcttcaatcaaacgacaattttgcttcgggcatcgatcttattttgcccctaaaataagaattagatgcatcggcagaccaatatctaatgtacatgtgccatgtgcaagtccaccgacaccatactagtgatcacctgcgcatcactcgtgcgtattgaataaaattgccaagagaactttactggtgtcaaagaatgaactaaggataggtattatattatccaagtatctcaaaatattcctaaagccaaagaaaacaagatttgggagcccaagttgacattctatgtcaatgtcaacctgggtgctcaaaggtcgacttgacctaatagtcactttcaacactgcacactgctaagtaaaatggtcataaattacttagttttatccaaataatgcatttcaagtagtatatgaaagctcttttcaaaacggataagtatatctcacattcttgccacaattttgatgtttggggccttaaaattggctcacgaattcctacaggattttgatgttggtatgctttgaatcgtttcttttatggtttcttgtgtttgtgtttgccatatttgatgttgaattcatagttgtagatttacagcatatacctatatttttttattccttgcaatacagattataatatatttttttttttactttgtaccaccaaattctaaagttttattcgtggtttaagttaggaaatatatatatgtataaatactagtccaataggcttgacact

SEQ ID NO: 267530 - DNA, 755 bp, Cannabis indica
tctcgctatcagtttatcctgtgtgcggaaggcttgtctgctttgattcgaaattttgaaaatagaggctggattatagggtgtcgtgttggtagaggagctccatcaatctcacatatgttcttcgccaatgatagttatctttattgtcgtgttttggagaatgtagctcaacatattgtgaagctgttaaactactttgagaggacatcgggtcaaaaggtgaatctattgaagtcttccatatttttcagcaaaaacacagaagatttggtaaagaacaacatatgcgcgatccttggcataccagaagcgagtgagcagtgcacatacttgggcttgccaaacactatgagcagaaataagaatgccattcttgaatttttaaaagataagatgaagaagagaattgagggttgggataacgagctcctttctcatgctgggaaggaggttctcattaagactgtagctcaatcccttcctaattatgcaagagtgtttttctgttaaccaaaggaatgtgtgaagaaatggagcatatgatgtgtaacttttggtggcggacttccaataaacgcactaagggaattcattggatgagttgggatcgtttgtgtgtctccaaagatcggtgggccttggatttcgtaagctcagggacttcaacatagctctcttgggtaaacaaggttggaggctgaacttggcccaaacccaagttttatatgtcgtagtttactggaagcaaagaa

SEQ ID NO: 267531 - DNA, 1219 bp, Cannabis indica
gccacatagtagatcctaataatttcatataataaattttgtagaatattgctaactattttcaatgagtcatctcataatagtattataaaggcatgattggtatctaataataattttcaatttttttttttattaattatcttttaatttagaatttcatcttttgttggatctcccttcttcgtgtttataatttagtcctcattgtttataaagttgtttcttcgtaattaagtacttggtggtgtgaagcatttttcattcaattttaatgtaataatgtctttactatatacatataaatataggagttactataggtgcactcaccagaagttgtaccaatgtccagcaaagaagcaagtccagagaatggacgatgatcctttgatgttcgaggtgatgtaccgaggtagccacacgtgtcacatgtcagccacagctcccacctctatcttaccacttgtgccaatgtcacaaacccaaagcattctaataaataataataatgatcaacaattgcaaccacttataacatcaattaatactactactactactactgccagtactactagtacttttccagaagttcctctaggaagatcatggctttctatggaatgctcaggaggaggaggaagtagcagcagtggcggtggtagtggtagtatagttcatgatcattttcatccggtattagatttggctgacgtaatgtttggcagcagtagtagtagtagtatggactttttgttccctactacttcaatcgaggaagatcataacaataagctcctacaacctgatgactctgagaaccacaaaaattaatgccaactagctaactaattaattaattataatttcatataattttaattattctagctaactgatttcatcaattagtggtttgatatttttatattttttttaattcttatctcttccctaatatccttaatttaaccccatgtaataaaaataaagtgtttaatgaaagacattataagggaagagcaaatatttaaacaatttaatttggatatataattatttatttatttattttttatataggggaacatcatactattctcttctctaatataatgatgattattcgccaccttattagattaatgtggtttattattgtcccggtgaggcggtgagtgataaaaatgctgtttctattttattagtgtatcat

SEQ ID NO: 267532 - DNA, 1383 bp, Cannabis indica
taaaataattcaaacgaccacacactcactagtcagtacatatatctagcagctttgaattgttcatcacatttttcatactactactacatacattcaattatttgagttggtgtaaagtgaaattgacaatcaaagtaagtttctttttttttaaaaaaaaaagtttgaaagtttgggttagacaataaaattaaatttaaatagttttcttctgtatatagaagagtgacatttaatcaaaagggcttgtttgggtttggaagagtaatcatgtggtgaagacttatttaatagtagccatcagaattaataagtctacggccatcggccaactattttcttccatgcatttcatcaatgaaacgaaagccactggaattaatgtttatcatttttatgtattattaattaaatatacacaaaaatatatatacgtatattaattatggaactctattattgatcaaaagaataagcaatcataagggatggatactgaatccaatggtcacaaataatacccaataacgatcgaactataatttttgttttctttttaattataggtgccggtcttgttgaggtagtagtaatatgagtggccatatactaactagtacaagtaattaagtagaaataaagagagtacaatttattttaaggagattatgtgggcaaaacactttttttatggacaagtcaagattttttttaccccctttttaaatggtagtttttttttgtaagagtaatgatggtgtttcttaaagtaagaattttgaataatttataattttgaaatcaaagtttaaattgcttattaaatgtgttttttctttccaggtttgtgtgaaaactattttgagctatgatttagtatttattataaaataatatagaataaataaaaaaaaaaataggagaagagagaaggcaaagagaaaaacataatgagagagtgaatgagatttttttcgattgtttattctaatggggtaagtctttatttatacaaaaatataactaaaagaatggaaaactaaatcaatgtaataaaagaaaatacgatcgagcattactaataataattaatttaataatttagacatccatatataatatttcataatacttctccttagatgttcataagaaatgcttcgttataaaccttgttgaaaaaatttggtcaaggaaaaacagtgtagtgtaaaccaacccccctcatttaggcattcatggagatcttctaatcgaagaatttcgatcttatatgtcatcttctctaatgttgatactagtaataattttgtgaataagtatgcatgattgacgcttgattgaatatgttggacaccaatatagtcattctccttaaga

SEQ ID NO: 267533 - DNA, 1124 bp, Cannabis indica
tcaatttggccaggatggtgctttaacttatgagtcaagtgatccgtaaactcaggcttaccctgcatcacttctgcaaagattgcagacaagatctcggacaacacgccaagaatgttggcctcaaaaagaacagtagaagccaaaccagaaccaacagcagtgccattaacaagagcaagaccttctttaggttgcaactcaaagaaactagaattgattccagccactttgaaggcttcctctgcggtgagggactcgccattagggccaaccgctttagaattaggtctgccggtgagcaaaccagcaatgtaggacaagggtacaaggtcaccggatgcagtgattgtgccacgtagaggcaaacaaggagtgacattgttgttgaggagcttggccatagcttccaaaatctcgaatctaatgccagagtagccttggagaagggtgttaatcctaacaagcaatcccgctcttgttgttgagtgaggcagagtgtgtgctgactcttttccactaccaaatattccagcattgagaaatctacaaacaatattaaaagtttgaagattagttaaggattttattaaataatacaaatataaaaagagaaagactagtcaatgctttaagccatgtattctggtttattactaataattgctagacataaaagaagtgttatttgttgtttgtttaaataattaatattacattttcttttaacacagtaaaaattaaagttcttttttagtaaggcagtaaattataagttagtaacaataattgtataatgacaattgtttgtaacataataataataataataataataataataataataataataataaactatgaaacctcttataatatccagttctactaaactaatcagacaaagtactttttgtcaggaaaaaaaaaaacacaatacaacaataacatttattccaaaataaatgtaaagatagtatatataaggtgtatatatttctatcaggaaaataaataaataaataataaaaaaaaggtaatatgtatatgtaatatacatttaatttaatttaaaaaaaaaatactaacgtataattaaaattttagtttcctctgctttc

SEQ ID NO: 267534 - DNA, 687 bp, Cannabis indica
tttaggttgacaaacaaatttcttagtaatttttctagaatatgcagactcatgctgtactcttccataagaaacccaaacaaatgccatttattttcttcaaaatatactcagacaatattatgatttgtgcctaataagtatgaacaactaacaacacaaaatttactagaccacacttgccaacataagaaacatttattgtactctatattctaattcatactatgtataatctgtaaattattatggtctaaattggagtagaaagcaaaagcaatttttagaaaatattttttaaataaaattgatctgaaccataagatccaaaatctcaacatatttacatagattaaatttacattacatgaacataaaattttatctctcgaagcctattagggtatctttttttcttttcgtataagtcaatgattatccaatttaacaatgctatgatttgtgaagaattcacaccagtatcttccaaatcaatccttaacactacaggacaagtgtaggcttgtaagattattctaagagatgatcatttactatcacagtgtctacttaactcaagagacactatgtaataatcaaaaatattttgctattattttctttactacgttatatgtatatatttatttaatcatcattagtaaactcgatgtggaaatagttgat

SEQ ID NO: 267535 - DNA, 1013 bp, Cannabis indica
taataccctaagattaagaaagtcgattagcaacactaactagttttattttgtattaatgtggaattatattattatataatttaatatatggaattatactgataaattgcattttcaaaacccgttggtgtactagggccattttcgtaattttgatctgagaagggtaaaatcgtaatttatttgatatatcgtgcttatggactacattattatatagtatgtttgttctgtctttctgcaagtgttttttgacaagtcaacgcggtatagtcacaaccgggtgttttgggctgaatcgggtttggggcccgaaatatattttgggattttatcttgtcatttatttgataagtgaataatatgaaaattattgcgtgtgtgatttatgacaattttgcccttgttgtatgcatatgtggttttattgccccaggggcattttggtcatttgaccacttcaccatatttttaaacaaaatgaattttgtagaagttagaaactgaatttctcgatttatcctaccctttggctgaacccctctctcttcctgttctatcttttctttttcaattttttggatgattttgcaaagaaactaaagcttgatttggagtggaattgaagtgtgttggtgcttgaagcttgatgtagttacttcaccttttcaactcttaatttagatgctgaatattgtgttaatattttgtgctcatgatgtgcctgggttattgaatgcatgttggtgtgaattcatttgaaattggtgatttccttgggttctatgtttgtaggtttataagatatgcatctagcatgttttagtgaaattttaggtttgaaattgtgatttaatttctgggaattatggtttaatctttgagtatgagcttgaatttgtggggtgttaagttgagggtttaaagctttgaattttgagtttgaagctggtggtttgtaatgatttttggaaagcttggttaatcgcatattttggtgttgttagagc

SEQ ID NO: 267536 - DNA, 1592 bp, Cannabis indica
aaaaaaaaaaaactaataaaatactccatagttatactacaaaaacttccattgtgccatttaatatctttatcttaaaataattgtatgaagtaaacatttccttaaatttcaattaattattaaataagattattcattttgatatttcattttcaaccataataggtctcttcttcttcttacaattactaaattaatttttgactaaaaaaaatattttcctaaaaatcccaataaatcccattggcggaactcaaactcaaaataaaaaataaaaaataaaaaaataatttgacttgaatttggacttaatttgaatttcatttggtgtgcatttcgatgcttttttttatttaatttaatttatatttctattttttctaaaattaattaattaattaattaaaacaaatatattttcttctctttttctctgttcattttcatttcatttgaatttcatttctcaaaaacgttactctctcttctctctctcctctgaaactctctctctttctcaccatctttatgtgattcctcggtctcatcgatggtaatggaaaagctttagattttgtttcttatgtgtggaaaaatggtcaatctttgagtttttggatcgatgatgatatattttttttactgattgattctttgtttacttcgttttttttaggtctgctttcgatcttcggttcagactgagaatcggtgagtgtttttgtttatatatgtttattcattgcttattttgaagtttttgtgccctaataaacgaagtcttgcttttttctcattaggttgacttgaatactcttgtaagctgttgaggattttgattttgagcttcaagtgttttgatgttaatgaactattttttaccgttgaagttgtttttttattttttattattcttatgggatttgattttatctttattgatttcacattatgctttatgtgtttttttttttaattatgatttggttctttgatttgtaatatcatggaagaagatgacttttttgtttgttgagaataagaataaacttatgtgtcaaaaacttcagataaacaaatggtgatatattcgtttcagatgattctagattactttggatttgttctgtggccggccttgtgagtagattccctgtttctatcatatgttaaagttacactcctttttttgttgtgtgtgtctctgtgttcttcactttattgggttttgagaatttagtttgaggtcaggttgtgctttatacggtatatttgattttgtcatgattctttatatgttgccgtcttgcttgtttgttcttgttgattagtctcccctttctattagttttctataactaggattttctaaattaagggagttaaaagattgaattttttcagtaagataacaatatatctatatctatatatatttatgtagtgtgtttgcactcttgggttggacttgcttccttttatgttcgttttgtgacttggttttatctgttgctggaactcaaaaagcttttgattagtactcgtgctcattatctaaatttgttatgtgatttttggtatgcttttcc

SEQ ID NO: 267537 - DNA, 2020 bp, Cannabis indica
atttatttatttatttttttgataaaaaatgtgtgaaaaaaaaaatcaacaaatacattaaattaaaagtataacaaatcttattaaaaaaaagtatataacaaatctaattaaatatataaaataaaatataaaaaaaattatcaaaggtactaatgaatgacagaagattaaatataaatgtaatatttattatggtgcaaaatttgatttatgatatattttgtattaaatttgacacaattagtatgtgtcaaatttagaccacattatacaccaccactaaagtccactaaagtccactaaagtttaattttatgaacatgactaaaaaatacaaacacaatatcattataaagatcaaagggtgtaaaataaattaattagtaaaatataatataaaataatattaaagtctaatataaaaaaaaatatatgtggcaaaatatatattatgaaaggaaagaaataataccatacttgaattagatcgtgtgttttgtaaaagttaacgattggacttccactactacaacatgggcctttagaggttgtttttcagcctaatttttaaaaagagaagctaaagagtaataatacctgcctagatcgaaattgacatttagaggcagttttttgataaaaatcgtaggtatacaaattgataatacctatgccatcacttgggttgaaaaattttcagcatatataattacactcatgtcgtcggttattagcaaaataactggcaccatagctgcacattttattgacacgtgtgcacctatgacgtcagttatttcctaataataataactggcggcatagagtgtgtatatacaacatcagacttcatcttccccactttgtcttcttccttccttcaacacgataacaaccaccatagcagaaccacaaaaacccacgaaaccctcgccaactaccactaaaaattactatatctccctcatttctacaccattttacgccatttttcttttaaaatcttttattttcaatacctacaactatagtgtaaaaaagtttggtttttttccctctatcactgtaactgaacccattaaaaaaaagtggtggtaaaactccgaccactaattttggtgaagaaaacgttaaagctcaacgtctattagagtataaatataatttttattcattttattaatgtatattgctttatttttcgtttttgtaattttctttagaatttttccattttattattattaagttgttgtgtgtgcatggtagtcgaattattgtcgcaattagtcgccggattgggcttataatgtaaatatttattaacttgatatataatatatatgtatatgttttgtgtaaattttgtaattgtactgtatatatcacattgggccgggccgggttggttcaatgggttacaaaatttccagccgtgatcaacccaatagtaacgggtattgtaagcttttcaacccagcagatattcgacccactaaaagagagcatgctcggcccattttcaggttgggttggtcggtttggtcggcccatcgggctaaatgctcacccctatatatacttttgaattgttacataaatatttgggccaagatgcaaaatggccctaaatttaacaattaagttaataaatgtccaactttaaaaaaaaaatttaacaaaatgtcgattctgttaaaagtttgataatgaaattacaattataattttgaataattaagtgtttggtatagttattttgcacaatagtatattatttttatgtgcaataatatattaaaaaaacttgaaaggtagtgtatatatatatttttgaaataactgaaaggtagtatatatattagtttaagattgtagtatattattttaatgtgctatggtatataatgaacgaaagacggaaattaaaaaatgtgaaatattagtttaagtttgaggtatagttatatttcactaggaatattgtctttatattcattagtatatcatgaaggaa

SEQ ID NO: 267538 - DNA, 881 bp, Cannabis indica
aaatacattattctagaatcaattcagtatatataaggaaaaagaatgaaagagattattctagagaagtaattgtacttaggagcaaaaattaagattttttgttcacaaataaataataaacttcttcatcaatatttaaaagatcgagtgtataacttctatttattattattattttaaaaatggctggaaatgtgtgatgattgttatagttaaaaaatggaattgtaagtgggtggtattttttttttaaaaaaaattattaagcttgtaagagatactctattataaccaaattaattactactatagattaaaaatcaaaagctacaaaaatgttcttacttttaagaacaaaagtaatactatcacctaaagaaaaccctttaaatttaaatatcttttatgatttaaattgagtttcaaatttagatatgtgttatcttttatctcacatcaacctcaattaaatgtttagattttaatatttcatgttggaataggaattaaatttcaaactccaaatatctataaatagttagctaatactgctacttctttctttcttctcaattgctttcagtaaacatttttttttaaaaaaattaatctcgttatttacttaagtaatctattatagacgtctcaagtaaaaccaaatctaaaataatccaacttctattttttttaaaggtaattttattttttatctaaatattacacgaatattaataggcctgaaacttttgatgactgataaatgaaaaaagttcaaatttcaagaacgacgtcgtttcttttaccgccactgctttcttctccttcccaaattggtaactaactgatctctgctggtttttttattcagtttgtctcca

SEQ ID NO: 267539 - DNA, 840 bp, Cannabis indica
aaaaaatgaaaaaaaaaaagaagcaaaatgctaaccaaattgtgacattaagaccttaaaaagttgagcaatcaaaactagtccccacaccagacgaaagaaagcataatgcaccacttaggagttgtaaggaaattaatcccattgagtctactgagctgttaaacactgtacctgatgttggttaggattagttgagttagttcagttagttttatctgttatgttctgttatagctaactgtttttcagttagttttcttcactcggtgaactctgtacataaacccctgtatacatgaggacatctctcgttttggcaaaagtatttccttgcctcacacttaacttcaatatgtagaattttaacattactctagtagatgttatgttagttggttcctaaggcttatgtcaacaaagttagttgttatgttcaacatattctcaatcattgtcaggattataaaaaaattcaaaataatataatgtacacataaataaaacaatatgcatgtaaattgactatttgaagaactacaaattattttaaaatttctcattgaaaaaaaagaaagaaaacaatttacaatatacgaaaattagatatgaccataggagtttagttataattgattaagattttttaggaaaaacaaaaaattgaaagtaaaaaaaatagaaaaactttaagaataaaatatagaaacttttatttaagtttttagaaaaatgacacaaaataataaaaaacaacacatgagtcactcagttaagagcataggcagctctctttgtattgggccagactttacctgtaacgccctaatctatagggac

SEQ ID NO: 267540 - DNA, 1274 bp, Cannabis indica
attgtttaatccacaagaacttggttgaatgaagtaacatatgaattagataaattaggtaaccaatggtcttttagaacactaattctcaccaaatcttgagcttccaataagcttcgccaaatgaaacttgggtaagaacctatcgttcaactttaagaaaagatcccataggatagtaacaagacataaaaatttggccaaccaatgattgtggattgttttgaagcctccacccttgtttccccaaaagagaaatattgaaatctctaagatgacaaaaatttagatcccctgctccttagggacacacatatgatcccaactcatccaatgaatacccttggtatgattgttcgaggatcaccgccaaaatctacacatcatacttttccactcctcacacattcctttagtcagtaaaaagatgctcattgcatagttaggaagagattgtaataccaacaactccataattcaaaaaataaaaaataccaataaataataaacaataattaaatctagcaaaaagtacaaataattgtaataaatactttactttctaattacatcaaagtaaataaacaataatttttatttttataaaattattttttaactatattatataaatgaatatttttttgttattgttatctataatttttagaagagacacgtgacacaaccaaaaagtaatcaccattttaatataggcctaagtcggatccagaatgggcccaagcccaacaaaggcccaagcttggtaaaggtttaagacttcgcctctaggacatgtcactctctcgagatctgaaagcctcccttgccttccgggacacgaaagaactgaatacctcttaatgaagataaaggcctacctggaggcagacagaaaaaatgacatttggatgtccaccacgggatgagagccagatgtctaccctagaacgacatgtcctcctctctaacacaagattagatattgtcccctacgtcagatcatagtagtgtatgtacctccaatacccattttagtctaacagctccactgacacctttgtttgttaggtgtgatttccgtgcaacatgtgccttgtatcgaacggtctcctcatcactacagaatcatcatcctgggagcctaacatccttagtgggccttatagtcatgtatatcgtgtgttttaccccgatagtgggctagcttttacaaaaaaacccaaatgggtcacgggtatgattagaccctaattctagcctatataaacctc

SEQ ID NO: 267541 - DNA, 685 bp, Cannabis indica
caataattttcactgcaactctgtctttcacactccctcctggattcaaaaactcacatttaccaaatatctgaacaaacccagtaaatcaaatcaataaatcaataaaaaaaacagtttcaatttcattaaaaatttaaaattttgaacagaaccagataatttatacacaaacaattacactaatacagtcaataatcgaaattaaaagaaaccctagtttcttacttcgcagccagttgcttgggataagctattaattcgaattagaggagtgttaccaatggcaccgattaaaccctctgttgattttttctgaagtttggtcttttttttggaggaagaagacttggattttaggttgcacacgaaaagagatgccacgaagacgattgagattgccgcaacaatagctccagtggttctcacaggcgccattggcggtggcaatggtggtggcgaatttggagctcgattggtaaatatgtctgtgtttaagggcttatatgtaaaatcgaaatatatctgtttcgttaaacttgttaaaacataagttttgagttatttttacggataattattatataaatatttttaggtgattctacaatgcacccttttaaaggatgtactgatacacccttgacttgtttcggcatctagaagaattttttagtctaattat

SEQ ID NO: 267542 - DNA, 1829 bp, Cannabis indica
ttaatttaatctatatgacaattattttatgagttggttaacgtattatttttactaaaagtttattttttcaattatatgaggtttaatatttaattatactaataataatataataccgaaaaaaagtattaatcccgcttttagcaattctcaatttaatatgtatatatatttatatatattataaatgcagggtaatggactctgacaaagatggtaaactgaatttcatggaattttgtgagcatgcttatgaaatctacaagaattatgtggaatatgaaacttcttggcttcaagtatcctcagctgaagagaagtttgcagagcttgacatcaacaaagacaagtataatatattataatatagcaaaaatatgtatatacattatatacataatattttgataaattaataaataataagtaatatttcaatacttgtatattatgcatagtagtggtgtacccttcttttcttcttactaattttgacaaacataaatattttaccaaaaatatttgggaaaatttagctcatacatttttgaactattttattaccataattgtattatttaaacaataaggtattaattaaattaattctaagagaaaaataaccaataatccaatatcagctcatgtgtaaaaaaaaaaatacaaaaatagttctgagagagagaaacataaaatgtactataaaatgatatatatatatatataaatatttatatatatatacagaataaaagaagtaaaggtaggtaggttttaattttgtatgtattaatatgtatgtgacaggtttttgggagttgaagaattgattcccatactcagttatcttcatcctggagagctctcctatgctaaatattatgctggttacttaatgaaggaggtaattaataataacttatgccattttctattttaagaatataattgtatcaacattaataaaatttaaacattctatatgtatatttatataattgattatattattttaagaaatatgtgttataactacaatatacatacacaaaacaaaaattaagatgtaatttttttaggtgtactcgaaaatacaaaagtagacttatatatatatatatatatatatgtttgtaagttatataatattggtgatgaataattgatcattagtaatgttgagttatattgtatatcaggctgatgataacaagaatggaaaattgacacttgaagagatgttgaaccacgagtctatattttacagcactgtttataatgatgatacttatgaagattttagaggatgatttccatgatgaactataactataaaattcatatatattacttcatattcattcattcatgtaattaattaatttaatatatgtaaatatttacttttttttttatcatcctgctctattatggttacatttttctttgattactaataggtgtaaacatttcttttttagaattaattaattatagttaactattttattaaaataattaattaaatatttaacaagatctcttttagcaattaatatttataaataatttttatttatatttaaatccttactctaattattttaacaattaagccttttaattataatatttacaataaaatttattttttacaaaaattaaacttttttttttacacaaattaaaattctcttctcataataaattttcaaataattaattattttgttacaattagatgaacgatgcctcaagctagtcaatcgataacaattgtagccatttttttttcaaaaaattcttccttatttcactttttactg

SEQ ID NO: 267543 - DNA, 1732 bp, Cannabis indica
  modified_base (92)..(92): a, c, t, g, unknown or other
aaaaaaaataataaataaaaaacttttataaaagtgggacgtgggttaatgtaaaaagttttgagcttagtttttttttttttttttttttnttttttttttttttatttattggtcacctcatttgttaatttcttgaatattttacttcttgttgctgcctgaatttcttctctcttattttgtctgtaatcttttttactttctctaccaaacctcaagttcaagaatcaatggatcaagggattggacaggtgcaatggcaaagctatcaacctcaaggcattgaaattatatgtaattaatgttcttctctcactcacgcgcacacaatagagttctacctttgattgatatcttaaaatatatatgtttgttttagaggtaatgttatttttcgttagctattttagtttttgttagtatactaatttttatttatttatgcagagagatcaacatcaacagtcatcatcgaggaaaagtagatgaagcagacatatttttttaaaaacatattcttttaatctagttgaatatatatgtatagtagaacatttgtataaatgtgtacttaatgatttttacagcccgatcatataagttgtaaagagtttgtacagtgagataactcaatacttaccttgatgtaattttgtgatttgcagaatatcaatgtaatttaattttggccaaattaataaaagaagatgaatattttcatatgcgttaatatgaaaatttgggaaaaattcaaatttgaatgaaaatttttaaatagtttttttaattttgaagaaataaaaaaagataatatatataatgattaaaaaaattaaattcaaatatatagcaacatttgtatagaaagtgttgcattagatttatttacatatgagcctaagacaacacttctaaaagtgttgccatataacttatacttttggtaacagtttaggaggcaacacttttaaaagtgttgccttttaatttttcttaattaaaaaaaagtgttgctaaatttactttttctagtagtgcttgttcggttttaccggtaaactttccctttttcccattcccttacctattgttgtggccggaacgtttagcatttgagcttgaattataaaggtaatgggagagttgggcatatgtcccaacagaaggagcttttggcttgccaggtttttgctcgccttctactcgctgaatagcttcttcaagtttgatgaagccttcaacatggtcaagaacatcgctcattgagtctactggaccgtttttccttatgtctctccagagctcaccgaggacttcaatgcccccccgtattgcggacaactttccatcttcagttacccgtgaaaccttagttgcctccgtcatgaatctgtcgatgtatgctcagagaggctcgcctggtctttgcttgactttaaccaggtctcccaggtgcaacggaagttggcgagaggaggagaatttcgcatggaactccgaggagaaagctttccatgagttgaactttctaggtgccagcttgaagtaccattgctaggcggcttccgagagggtggcaggaaaagaggatccatttgcccttgcagatccatttgcatctcgaaattcttgaggtgggaaagaggatcttcttttccaatgtacatcttccaggttggcattttaaacttgtggggcaacaccgagagattaatttcggaagagaaag

SEQ ID NO: 267544 - DNA, 1448 bp, Cannabis indica
tgggtcattgtttttagttattttacttctgttaattatgcagttacatcttaactgattttctcaagtgcactttaggacaatgtctttgtcaatgttgttgcatcaatccaataccgagcccttgcagacaaagctagcgatgcattctacaaacttagcaacacacgttcccagatccaggcttacgtttttgatggtataaatcgagcatcccactttatagttcatgataagaactgataatattcaagtatatctgtatatttagatgtccctgactaattacttttacaactagtattgttgactaactgaattctttttttttccttctcactagtgattagagctagtgttccgaagctcaacttggatgatacttttgagcagaaaaatgaaattgctaaagctgtggaggaagaactcgagaaggtaatttcctgagatattaaaataatttagtcgaactttactcttggtgtgcctttttattgtattcatgcttcaattctcttccaggctatgtctgcttatggctatgaaattgtgcaaacacttattgtggacatagagccagatgagcatgtgaagcgagcaatgaacgaaataaatgctggtacagttcataaactgatgatacagtttatatgcaaagctttgttcatgctctttttaacagatgctaattatcaaaccatctaattgaacaccatgaatgaattaacatgcttctatttaaatcttcagctgcaagaatgagggtggctgctaatgagaaggcagaggcagagaaaattttgcaaattaagagggcagagggtgaggctgagtctaagtatctttctgggctgggtattgctcgccagcgtcaagcaattgttgatggattgagagacagtgtgctgggcttttctgttaatgttcccgggaccactgcaaaggacgtcatggacatggtccttgtcactcagtattttgacaccatgaaggaaattggtgctgcttcgaaatcatctgctgtgttcattcctcatgggccaggcgctgtccgcgatatagccacccaaattcgtgatggacttctccagggttctcatgctcagcagcagtagtttggtacatctaaagcttctttccatgcatgtccaattgttgatgtcttatatacaagggtgttcctttcttaatccccaacccctctttagttttctatgatgtgtctagtgtttttgtttcatgctactgaaatttgttcatattcccattatggattttataggtataaatattaaaggtgtgttcatttcatctaatttgcattattttgtttatagtgcactcaatttgcaccaagttctgattttatattttagattcaactcaatccgcacaagagttctaatctaattgacgttactttttgatattaaattatttaatattta

SEQ ID NO: 267545 - DNA, 1279 bp, Cannabis indica
aaggaagacttgttgatagatcagggatgttctatcgatatactgattaacccagttcctcaggaattaggacaaatcttccattgccaaagggaggacatacctttccacaaaggtcaaacagcgaaaactgttagatctcagcaaccagcgacattgggggctggccagggatctcaagctcaacaaaaaccccctctgtttatcctccagtcagactcctctagtagtcctgtggctgaccagactcctccagcagtccccatggccgtccacagaagaacactccctctccaagaggatcgagtcacccgaaggtcaatttttaaccgacgactaggaacgggtggaaacactcaaaataacaatttgagaagtgaagttcatcacttcagacagttagatccactaaactccaaaaattggtgtgaactaccctatgtcaacgcacaagctccaccagccaggcagagaagtgtgggtggctaggctctgcccagcttagggatggctgaccatgtacaagcactagagtcacaattggtcggccttgagtatgccctctcccaaggtatggtcaactaggctctagccaattcgaggctgcaactcaatcaaagaaggccaatcaattaggcccttatagtaacagacccttttgtacaaagcacaattgaatcaaatacgagacgtgctcaagggtctagctggtctaaaacctttagaactcaaggtagacagggcaaaggggccaccattcttggcatacatcaatgccttgcccttgcccaaattcaaaatgtcggcttggaagatgtacacaggaaaagaagactatctagtacacctgaagtactttgatatccaaatagatctcctacaagtacatgtagatgtgcgatgtcgtatctttccgaaagctctagttgaaatagcccaacaatggtatttcaagctggccctaggaagatttatttcttgggaagagctctcccgagagttctacattcagttctatgcttcaagacaaatacctgcccgactagagaatcttgtcaaaataaagcaaagacaagatgaacccttgaaggactacaatcaacggttcatggctaaggccaccaaggtcacaggcctgacagaagaaggttgatatacagccatactcagaggcatcctaccgttgagtgacttttggaaagatatcaagaggatttcaacgagcaatacggaggagttccttaagggagttgatggcttcataaagttagaaaaagct

SEQ ID NO: 267546 - DNA, 1121 bp, Cannabis indica
cttcactaaaaaaaaaaaaaaaaatgtttatgtggtagaaaaccaattataagttcaaatagaggtagggcacatttaatccaatctaattcaacccaaccaaatcaattcaatatctaattacaaaaaattaaatatttaattacaattagattagattgaatgttaaaaattaaattctaattaaattaaatggattattggataaacaacatccaattcaattacatttatatttaataaaaaaaatatttttatacaataataattatcaaattattattgtaataatttgcaataacaagttggatatataggaatacaaaattagtacttatagcaacaaataattttataaataaataatgcataaaataaaaatttacataagagaattatacaaggtatcaagatttattttgagactcatttagtaagtcgtacaagggttgtattgtattaaataataaataatattatgtttggataaattaatatactgtattaattattacgaccaaaattttaaatacaatataagttgtattatttaatacatcacaaatagtccatattagcttatattataatatttaaaaaggatccgagatcaacctcaatctttgacgcagaccctaaccccaacctaagacccaaactcgaaaacaaaactgaacctgagcatgggacctgtgacctaaacccggacccagaccccgccccaaactcgggacccagacccagacgtgaatccaaaccctggacccaaacctgggacctaagatccgggtcctccagacctggacccgaacccgagttgtagtcggtgttggggccgagtttattaaaaatatattataactttattcaatctattaatacaaatcaatatcaaacatagtattgtatgaaataatactaatacaatacaatacaatctaacataatataatacaatacagcaaaacttgtgacttaaagtgaaaaaattatgactaattataaatcataattcttatgttgtgactaaaaaagtccatggctaaaagtattagtcaaaaaaattacaatttgttgtgactgaatgtatttttaattattatacttgttgtgactaaaac

SEQ ID NO: 267547 - DNA, 1019 bp, Cannabis indica
atacattttatttaattgtttcttaaatctgtgtttctgtatttcataattaataattttggtaattatgtttgttaattgatttaatctggttttaatttaactaataatattttctcttgtatatatatttctgccactgagagtagtactactcttcttcttttattttttttgaaagttctttatttagttttatatattttaatttaataattttattcaatactgtaataattttaatggagtttagaaactgcaacttaccaaaattaatttttttttccaattaaatcactagaaaactcctagtgtaggattgttgaaattaaatgtagatgtatttattagttgtgattggtgctctagtagttcatgattgtggaaaaggttttgcaatttgtttcttttttttttcttatatttagagtgatgaaaatgttgtaaattttgtatatttcctttcccaggttgtttctcaatgggattgtatgcttagaattattaaatttttgtatttttcagatgtatatcttcaattgtaatgtgcaatgatatagtaccatatgttttaacaaaatataaattacagataaatagaaaaggatattattttaggtaaaagaaattcctaaccaatgtactttcttattctcatcaatgaagttttggtcatttaaaaaacatatattgaaaatacagaaacgacaacattcgtaaaacgacaaagaataatgaagaagccgtggaacttctcaaaaacgacaccaacataagttgcatggatcttaatcattggacttatgcatcaacaagcccataattctctccattattaattggaccttgctagctcagttttggagggaccttttcgtccttattgggcctttctataccattaccattaccaatacgaggaaattgtactctataccctttttatattgtcctcttttatttttaccttcttttttaaaatctatcatttttacctctttttgtaaacattgtaccaa

SEQ ID NO: 267548 - DNA, 864 bp, Cannabis indica
tgttaaataatttttaaaaatatgtccatgtaactgagaataaaacatggttggaattgattctaagttcaaaactaatgatgattcaaaaatgaaatttgaatgagggtgtcccaatccgagagacatgcatgaaaattagatatctagaaatgaatttgatttagttggactggacggtgtaaaggagtttaggtttgaattgtttttagaattaagaatcttgttttgtatatgatacacttaataataaccatgcatgcttgtcttgtccttactccttaatatatttaatttgtatggccccacatcacatttcagtggcagttgacatgtggttcgctacaatcccagacatggcggcctcagacccggtttcctaggccggtgcaatttttcccactttgccaacccaacccaacccttgcaacaacctcattattttcttttcctattattatttagttaattatatcccagtttaaaaatataacatttaataattaatatatatatgaaaatatggtttaattatattcttaacttttctaaaatgttatgtttttgcctaattgattttcataaaaccatatctaaaattttctcaaattgaaaaattaaaacaaataatattataataataattgtaattataaatatattttaatagtttcacacttcttttttaaatctcagttaatccaaattctctctccccaatataaaaaaaaaagcataataattaacaaaatcaattttttcattaaaaaaagtgagaaagaacacatgcagtataagttaatttagaggcactatatttatcaaatttaatacttgaaatggaatatccgttactttacaaaa

SEQ ID NO: 267549 - DNA, 1249 bp, Cannabis indica
ttcttcttcggtctcagtggtttccgtctctccagaagcaaaaggcacaaactttacgaaccgcagggaattgtaggtgaaagcctgagaaagtttgggtttggcgacttttctttgggtaaaggaaacagacaaaggtttaggataattggagatagaagattgaaatggcggaagcgaagcttggaaagagggaactctggtgctgagagtagccatggctgccattaaagctaagcttgaagttagagaaagagagataaggatagtgtttagcagtaaagcttcagacttctcagagttccattttcaatgggggaaagaacaagaagaagaagaagaagaagaaagtgggtggaggagggtaaatgggtttggattgatctgaaccgttgaatgagattgagtttgtaggatgatctgatggtcaggatttattttttattaatttatcttattattaaaataaataaatatataacgtgaaggttctcgaattatttattggcattttgttggtaaggtaatttgacttcattttttttttgccaaaaaagggtaattttgtgatgttaccatcaacattcaattacaattttttagttaattttggtgcttataaatatatactaaaatatttttttttatagtggtgcttgttatatttataacactatttctgtaaatttttgaagaatttcgaataatttttacaattccaaagtagatttaaaatttagatttaaaattttttaaacatttattatagtaaattgaaatatgagaaactctgtttttagtactgtaaactctgtttctattcaaagttttttaaaatattatagggtagatattatatttatgacgaatactgctttgaaaaaaaatattctaacaaattatttcaaacatgaaagttgattaagaggtcccttttaaatttaatctatgttgagatcttggagtttgtggtttaagttaaattttcacaaatcgtttttcataaaaaacccactttcactttctactatgatttggatcatataaactagggctgcacatttagacccgcaaacccgaaaaacctgaagactcggctcgccccgacgccaaaaaaatcgaccaactgaaaacccgtatagtcgggtctggttgaacccgaaaatgactataacgggtttcgtgttcaggtcacatattagataatttcggtggtcgagttagaacccgtaacccgaaaatgataaaa

SEQ ID NO: 267550 - DNA, 701 bp, Cannabis indica
cattatattcttgtgttattcaatagaaattatagtgttttttgtcttttttataacttcttgactttatgatgaagttggttttatgtttcacaatgtcccaagcttttacaatgcttccttcagtaataatagttggttctaagattgtgtagacatgctggttgactcttggagttttctctacccaaatacctcaatagaatggaattactggtggatgatagtgttgagtaattatgtttaaatgaaaaattctcaatagggacttcgttttcatccctcccatcttcttttgtgttgagtcaagaccaaaactcagtgtcttgtttgtcaatttctttgagaatttgttaatggagttatgagattacccatctatgtgaagtttagtttgtggaagttttgccgctttcgattgtttaataagtatactatttggagtcaagcttgcaaaaggtttgcctttcgtgattgtctaataaacattttcttttcatacagaggttggttgtttacgttttaattttgtttttgagacatgatgccttttctgctactttaatgctggcacatgttgatgttttgtaacaatgaacatcattcataacatgcttatttaagaaatcagtagattatgacttgtctagtactcgtgagttataataaaagataattttgtgttgttactttgcaggtgg

SEQ ID NO: 267551 - DNA, 659 bp, Cannabis indica
tgttccgactatgttgtcatctttattagtacgtgactgcttgatttaatgatgttgcactctagtattaaaagaattaattacccgtttttatttattttctcaatttttaatttatttatttaattttgtttttaaaattattagctaattaataaaaaaattcagtatgacatattatagatgatagtctaccaattttgataaacccaaactaagtgtttcagtaagttttttggattgggttgatttcatgttcctaaggtctttttcttctctttgtttttgtaatgactgcgttattatcttgatttctgcccacttgatgtgtcatgtctacgtggccgatatcagcgccacatggcagtatagttcaccaacaagaaagtcaagtcatctacttagcacttcaactaacgaggagtcccgacactcaaacaggatgacaaatgacggaccagccacctcaaggaggctggtcggccacccctagtcgaccttatggccagcatagacaagctagcttctggacaacactaggtcggccagcctgcatcctgtagatgcatggcctgccaaacattagcttggcaggactttgatgtatagcttcatgcgtggtcagcaagctagattgtgaattgggcctcaatagtcca

SEQ ID NO: 267552 - DNA, 1040 bp, Cannabis indica
agagaatataaaaaaaaaaaaaaaaaaaattccccatataggcatatactgtttttttttaatttttttttttctaaatttacgatttgagtttttaaaatggttgcaacactatttgtaataggattttctatataatttttttattgtaatttaggttacagcgctagttgcaatagaggttgctatgtaaaatctcataaaaatacaaaaaaaaaaaaattttaaaagtgtaaaaataaaaaaatttaattcccataatgtgtaagattagtattctcattaaaacattaggagtaatataaataaatatattatagagaaattcttctaaattccaatatatatatatatataaaatatatttatataaatatgcagccgcaaaatgggtaggatatgttggacgagagtgaaaagattttttttctttgttttccaaattggagtgatagtgattagtgtggcatggcatggcatgtgttattgcatgtgtgaccatgttccaactaatcatctccacatgccccttttcttctatttcctttattatgtccaaaattggatctctctactctctaccacttttatcaatttaaatatttttcatctttcaaacataactactttggttaattcatatattattgatagaaagaataatagattgagggaaaatgatcttcattgattaacaattatgttcgagtataaattatatgtaagagagaaaacaagagaaaaaactaactaaacagtatataatgttatatcagaataacaaccataatagaaagttataactaactcataactgcaacattatctaacagtcattacttttccaaacttttaataaaaatagtaactttagtaacaagagaatcggtaaggaattaaaattaaaagaataaaaatggataataatacatccatgttcctaagtgattgcaatgtaacgtccccgaatcaagtctccattgggtccttacacccacggaatgaatggctcttatacacgagtacgtcactctggctgc

SEQ ID NO: 267553 - DNA, 2719 bp, Cannabis indica
aaccatgcaacataaaataatttttgatctttattaactagtgaatttgattatatttaaatgggttttatttaaggcacaaaatccaacactgcgattatgtgattatagggttatgagattagagtgctatgtgaagcactgaaaatatgtgaatgaatgtttgtttagtgtcatgatgaagttattgactataacatgctataattttcttatattgcgtgatatatgtgtttgtattgatgttaaactatatatattaacatgctgactatgggtgaatcacgagtatgtatattgtgttgtgatgtgaatatttgtgtttttaatgcttgtgttctagtagcttttattgcacagtcattgtgactcacaggtactttgtggtgcaggtaaggaggttagaatctgtatttggccttgagttagatatctctcagcgatgtacatatcagccgtgatgtcttggtttcccagaagcaagatcaacccctttttctatgtaactttacttatgtattattgttttttttgtaaattattataaagaatttttataaacaggggatctccatattatagtagtacttggtatggaagtttttattctaatttgaaactattaaggattttaatttaaaccacactttttcctaaacgaatagattagtgagagataagtttgtaaaagcacacacgtagcatccctgagggccagggcgttacaagggggatagctcttgggtgtataatcctggacaacataatgcatagaagggatatcccaataccacctctaagaagtgttaccaagtaagaagttgaacaactattaacaggagtgcataaaggctctacagtatttacgccagggggcaaagctaactgagtgtacatgggatcgaactggtgcattgacctggcctccaaaaggttggctaaccagggcctcagcaggttggtcagccatggaattaacaacctagccaactactacctctacacgctagccagccatagcctcttctaactgaccatgaaatgctccttcaacgttgctggccacctgatctgtaccctggctggcccaatctgccaacagtctgctctcgtacttttggtctactatgaccaagaagtaagccacatcttactagtaaaatcccttgacaaaacagaaagaagaagagctaagctaacttaaagtggcatgcttgccagtaaaaagttgccaagtacttcgacaaacaaatcaagaaaagaaatcctttagaggcttaatgctctgaagaatattccttgataataaagatcatgcagcaagcatgtttggaccaaaatgaaaagttccacaccaagttacaaaatgacaagcacaggtgcacataaacctcgcgagtacaacgagaacttgggtttggctcttctaccaaaatattggaatagagaacatctcgttaagtgctctctctagccaacatgtatagcagttcctttaatgtttcaccgtctaggaattcactaaagagctagtacccatcgctcttcagcgatggcctcccatcactcttcagtgatggcctttccacggtaagtcctatagaggtagccaaatataaaagagctagtatccatcgcttttcagcatggcctcccatcactcttcggagatggcctctgcctgacatctcaggcaggggtagccaaaacatgatttcaaaagcggccattaaattgtaagcttttgttacacgtaagaccaattgtgttaaagccacttgctatcaaagataatttcttaaagttattcattttttcagttccacatgcgtacacccagtagcacccccaagaaaatgtccacgcaaggaagataaaacttggtgaattgtaagtgaccaagagactgtaagtctacgtgctcacttgggggcacccacaccatagaatgcatcaaactagcacagagaaattttaatgcttagaataagctactaaacctgcctctaagtcaaatgcaagaaaactttagcttgacataaagaaaagtaaatttggatacttatatgtcaaggcaataagaagatagctaggaaaatcatatgtccatagtagaaggctttaagggtaaatatagtagtgttcgaaaacagagtgcctataggaaaaaaagcaagaacatgaaagccttgaggcaaaatatgaataaaaaatcattacaaatgcataaggccaaagccacgcaagaatcgtacagccagagaagaactggacagagttcctatagggaccacataccgagctaaatctctaagccaaggcaaagttccttgtaggctccaagccttagacaaaactctgggtaaccgtacccaagggtacttgccagataatgtcattgtacaaggctgtgtatcagcaaagtaaagtcctgagtataacaacttggacaaatgtttagtcttaagtcgagcatttaactataatagactcaccattaagtttcatacagagtttctaaaggaatcacgtatgacgctaaggttgcatatgcctacaaggccatgataggattcttaccgaggtcaaaaaaggacagaaagctggccacctgcttggaaccaaggcctaggccggctagggttcccaagctttgagagggtcaaccagggtcccatgtcttagccaagaaccgaccagggtcaccaaacccaggcat

SEQ ID NO: 267554 - DNA, 763 bp, Cannabis indica
cacacctaaagataagatttattagtaatatctcaaaaactacaaagtatttaacttatgcataaatagactccctcttataagatctcaaaaatacaaaatatttaacttatgtatagttgttttaatgggtagtgataagtggtgtaaaagtgatgatgttggggagttagatacttataattgatcggacaagtttgagattagtttttatgtatatttttttttttgaagaaaagcgaacgtattaataagcaagttagaccactaggtcattacaaaataggtcctaaggtaatttggaattatccaaataactatactgattgtgggtaaaattccacttagccatattatcgacaagataattacaagccgagcaacaataataaaaaatagaacccgtaaataaagaagaagtacttaaattgtgtcttgagtagtttttaatttctcatctagactccactccattaagagaattaatcaccactcgagagtcactttcgacaataacaaaatggtaccccttctctactgccttctctaaggcaaaacaacaagcagccgccttgctacacaacatatctataaaatcaagtcttgatgtgaacggccaacaaaacttccccttgtgatctctaacaacattagcaatacacatagcctccattcctactctaatatcacaattcagcttgatccagtcaagcagaggaaatagtagtaggtacttggaagaaatagtagtgacatgctttat

SEQ ID NO: 267555 - DNA, 1541 bp, Cannabis indica
atcacataacttcacagcatctagattatctttcacattatgtactctcacaatgttagcaccagccaaaactccagcagtgacagaagcaacagtagcaggatctcgatcaaccgcagcagagcgagaacatatttcacctaaaaacttcttcctagaaggtcctataagtataggtgcatgagacaaggctaaacttttctttgcaatttctgttcgaatgttcgagagttcaaaaagaatatccaaattttgttcagtattctttgagaatccaatgccggggtcaatgactatcctccaagctgggataccagatacttcagcatctcttagccttaagtacaattcagaggcaacctggttgcaaacattatcatactgcaagttttcactactctgcatagttgatgggtcccctctcatgtgcattgcaatataaggtaccttaagatctgcaacaaccttaaacatgttagaatctatctgcccagaagatacatcattgataatatgagcccctttgccaactgcttctgaagcaacttctgagtagaacgtatccacagagacaagttttccttctacttcaggcatttcgagaatggcttctaaaacagggattaatctggacatttcttcttcgggtgatatcagagtagccattgggcgggtagattgtgcaccaatgtcaatcatatctgcaccttcggaaatcatcaagcggacttgagagactgcttccccaatagattgaaactttcctccatcactaaaactatctggtgttagattaaggatacccataactgaggttttttgtgaccagtcccacaaaactttattaatgggcaaaaccctcttcataccttctttcccaattagagagtcaccacccagtttcttccaagtttcaaaaagatcattagcatgagtagcaaaagagtgccagcaagcaactgtatcgttctcaacagctgatcccagcaaatccaacactggggctattacaaatggcctttcccaaattctttcatgtgggatggtaagaatatcagagttgaacctaagctttccatagaacaatatgtctaaatcaattggccttggtccataccttataccatcagtacgacccatgtccctttcaattttcttaagtgctcccaatagctcatgaggtccaagtttagtaaaagctctaatagcagaattgagaaagtgtggttgatcagtcacataggctggtgcagtttcatataaacaaccatgtcttacagcatctatgcccgatattctcattaagcgcaaggcttcgtcaaaattatgcagcctgtcacccacattgctacctaaagcgatcacaacttcttgctcctgagaatgaacttccacttttacatttgcagaagaatgcaggaaagcaaaatgggacactgcatgaagattcaaagaaagaaaactatcaggaaactggctaaggcaataacgtccatctaatcaatctaatgtttactgaagacattgaacaaatccactct

SEQ ID NO: 267556 - DNA, 701 bp, Cannabis indica
aagtactgcagagacttatgccactcatgctgtgtgtgcggctttgtggtcattttttgtctcaccattctcttcctaatcgcattcttcattttctccctcatatttcttcctcaagaacccaaattcacaatcactaacgcttcactcacacaattcaatctctccaccgccaccgccgccaactccggccacaacaagctcttaatctacaagctctccttaaatatcacccttcgtaacccaaataagaaggttggcttttactttgaccgagtcaaagtcatggccaactacagcaagaagagattcgccttagtgactttaaacaacacgacgccgttttaccaaggccgaaagaacactacgatattgcataacgtggttcttgaaggacagcaaacgatgtcgtttaaggaaaaagatgatgaacagtataagttggagactagttctggggtttactctattgatgtgaagcttgctcttaggttgaaaatcaggtttggtaaaatcaagactgggcatctcaagcctcccactattaactgcaataaccttaaacttcctttactttctagtaatgcaaatgagaataatggtgtgctcaattttaagagtgtcaagtgtaaaaacgtacatatcttccttagtcgatattgatgtgtcatatcttccttagaaataaaaatagtattaat

SEQ ID NO: 267557 - DNA, 771 bp, Cannabis indica
acgtgtcagtgtcaattagttttgacatgaaactatattcactttatcaaattctaacaatttttaaaaaatccataaaatttaagatgtcaaagtttagatatattttttaaaaatattttcatatttcctaaaatagtttaattcttttaaaaacttgtgtgagattaaaagaaaagaaatagagttaaaaataatgatgattgtgttaatttgtttatatataccagttgtgacacgcttcctctgtcctccagaaatacccctcagcatttcatcacctaccattgtatcagcacatacttccaaaccaagaatctgcaattcatctcatcttaaattaataactccactaatttctttttgatctgtaactaaaatcatatatataatataattaagctttatttctttaaaaagctatttttaccttaagaacataatctgtcattacacttgtctcttggccctcaattgctgctgcctacaatacaataaaattaagcttcaaactttgtataaaccaaaaaatatcaatgattagtaataatttttcattttttgcttaccttcatgtacacatcaacatcaggatcaggtttgatatttgcttctctttctcttctagacaattcagataacatgtctgaaaaatatacacatatattaatataaatacataaagagaattaatgatgaacatttcttcatcataaacacaaaaatataatatgaacatttttttttgaacttaccataacgagttccaac

SEQ ID NO: 267558 - DNA, 997 bp, Cannabis indica
catttctgcttctgcaatattaattataaaaaacatgaattagtggcaaaatgatcaatctaactacctatttggatagatacattttcttcaatcatatacataaatgggaagtggggtttaacattcaatgagatacaatagacaatagcatatcttaaaatagtttcctatgttggatcggacgtagaaaaactccaccatgagtagctcatgtgttatgaagcataagcacatctcaagttcaaagcttgcattgactaatctaatagattctagcagcacacaacatgatctttaactttagcttgttaactatagttaagtaaccagcatgttaagtccaggcagaatcagttgtctaatctatattttccactctcgataaacagagaagaatatttgttgtcctaaatgtaagagttgaatcgttaccttaatgtattccacaaaatcagaaagtaaatcctgacttccaccttgcacttcattttctgtagtaccttcagcatctatagaaaattcacctttccacttttcaaactccattgctgcagcttcctcctccttagccttttgggccaatgcttcttcctcctgtagagacagaccatattgtttgtttgttattttattttattttattctattattttgttgttgaagaagaaacagaccatattgttaagcaaaagcatggaaaaatggaagaccgaaataatcagctcaaacttccaacaccaaagaaacaaaagcacaatcacccaccatcctacgctcttctgcctcacgctcctcctctttcctcttcctcaaatcattataacaatcttgttttgtttgccttgattctcgtgcagcttgttcagcctaaccacaatcaattcaacaaataagaaagaatagcattcacatgaaaataatgaaaacaaagggccaaaaccaatgtcaagtttctgatgggaatgattgataagcttagaattaagcttgtcaa

SEQ ID NO: 267559 - DNA, 1480 bp, Cannabis indica
cacattttcccatattgcaactcttggcctttcttttcccatgcatgcctatttttgtggtattaacttcccattaagttcttggagaaaaatttccaaaaactatatatataagcctcattttcttttcattctttacttgtctcttttgaaatacaaaatttctctcaaagactccttagagtcgaattcttgtgagcttgagttcttcgtggattttcgagtttctgacatccacacttggtgcgcggactagctcgatcctcttttcgtctttcaagtgggtaagtagttcgaagctttctctctctttttcattttttaagcttttgccattgttgagtttcaagcttttatgaacttcttgaatccaatgtttttttgtgcattataattcgttcaatagttttaggattcagaatttgtaactccttaatgaaaaagattgaatcttgagctttattttgatattatgatctttggggtttgaataacatgaaaaatgtagtttgaatctttataaaatacattttttgatttgtttaggggcctggccggcacttgagatcttgagtgttccattgtcaattagccatgattatcaaacatgccaattgacatgatgtttctctttaatccagggacataccaagttcttgtttggtgtcatgtgaaatgaacgccatgattccaatattcattcatttcttgaaacttcacttgacacaatcaagacattggttgaatcatatagccactcgaggcaacatcaacttctcatttctccttgttcttatctctgttcagtttattcttcaagatatgatattcttctcttaaatccatctttcttgcagtaatagcaattctttccagttagatttcttgacttgatccttgtttgtaccattctaaggtttcctgaattctttcttgttcttcctcgaacaaataggccttcaccactggatttatgtttctcatcaaatttcttttgaattcaaattccttaacttcagatatttttagtgtatctttcccataaaagtatagtattgaataaatgttcatataccttaggtagtgaacactgagtagaagtattgcatgatcctcttctttaattctgacccctatgttgttttagtccagaatcaacttgttgaaatcatctagatgcctttgaagctatttagtctcattaatctccattatgtagagtctcttcttcaagtagagcttattggctaggttttttttcatgtaaagagattcgagctttttccacaatcctaaggtggattcttcatcaacaatttctctaagaacttcatctccagacttaacatgatagcactatgtgcatttgtttctatttctagatgaaccttcttgacatcatcttcttccttagagccaacatccataattgaatatgtaaattattgatgcataaggagtcctttcatcttaatcctcc

SEQ ID NO: 267560 - DNA, 1291 bp, Cannabis indica
agtgtattcttggaagatcaaaactttctctgcatctgcaatctccaacaatggcttcgggttagtgcttccgctcatcttttatcatcatcttcttctttaatttagcaaaggttctatagatttatgatttaggattttctatattaaagcacttttagtaatatgtttagatctgtgatttatatatttcttaagtgttttataaatcctaataagtggtaccagaaccaccttttgataaatttattgaagatctgatgattttgtttatgaaatttaggaattttgaagattaaggttttgatttttgttcagccaatatttttttttctatatatcaaattcctttggctaattaggatttttgccccctgaactttgacatgtaccaaatcatgccccctgaactattgaaattgttgaatttaaagacttttttctaattttagtaaaaaagtctaacatagatgaaagttcaggggctataatttagtacatatcaaagtttaaggggaataatttggtagatatcaaaatctggggagcatgatttagtacataagcaatcactaaaatagtaaaattgaatgaaattagacaaaagtccttaaatccaacaatctgaatagtttagggggcatttttaacaagcttaaaagttcgtaaaaatcctaattttagttcacatacggatgtgatttgtactgtatttcatattttatggcttctgtatatgtatcgtaagtttaaatatatgtttcaatttatatatatatatatgtccagtaccattatatctttatctggcttcagtcttgttttccgttcctttctttggcttcaaatatatgtatatatctgtacaattttttcatatagagttatacatatattacttgttatttctgttttgtttttggttgaatgcgagacaatcttttttttttaaacagataatgcgagacagtttaatatatctttatatattaaaagtgcttatctaacgacaattcttggtttaacagaatatacgctacaaataaaagaatattctgttaaatttaaccccaaaagaaccatttatcattttcttttaacgccgttaccatccccttcttcacacgattcttttcaaatggccctaaagctagccagaatctcactcccaatcccaatctcaatcccaaacaacttttacccattccacatcttaccctttcaacactccctacatcagaaattccaatcgcataaatttgaatatcttgatcggaggtgaaaattccct

SEQ ID NO: 267561 - DNA, 1121 bp, Cannabis indica
aaaaaaaaaaaatcaaagaaaaacttttgttaatgaataattgattacacaaaatttcaataacaacacatatacttttcaaatttatattttgtaaaaaaaaaataaaatgaagaatcgtgaggagaggatgactacattgaaaaaaaaaaattgaacaataaaatttaattagaatttttatactctgaactttgacatatatcgaatcatgttaattgaacgttttacttcgttaaaaattcttcctttatctattgatattgttggattcaatgatttttgtcaaatttcgtttaattttactaacacatcgattgtgcatttattaattcgtgctctcaaattttgatgtatactaaatcatgcttccaaattttgacatatgctaaatcaagtcccctaaactttcattcacgtcatgttttcattataaaaattggacaaaagaacttaaattcaacaatctcaatagttcaggaaaaaattttagcgacttaaaaaattcatggaacatgatttagggcgcatttagaaagcgtaattaaatttgtatataattggaggtcattacacaatttgacatgtttgtctcactatgtaattatactataacaatataatttgaggtaattgaagaaatctatttacactccaattattatggccctatgagaattgagtataattacactgtgtaattactaaaaaaaattaaaaatattattttcttgtgtaattactaactattttgtcaaacaagatattaagaattcatatgtaattacctcatcgtatctaagcacaccttttattttaaaataaagtgtaattaccaccctaataatcatacagttacttttaaacacacccttagtatatgataacaaacttaattatccaaaaatatctgtataattttaaataaataaaaaaaaattattgttactattattattttgaatatattttaataaaatttaggattattttatttttacattttaaaatagtttttttttttgtatttttatgaaaatcgacataacaaccaacaaaacaatctaaatcacaactcaaatctacataataacccacatacaaaccgtaaaaatgaaaaa

SEQ ID NO: 267562 - DNA, 1939 bp, Cannabis indica
tagtgctggtagtgggtgatatcatggtcaatagcacaaacagttagaacgttcttactcatctattaagcattgtaaataggtgtatgggcgcctaaatacaagtcggtattatatgatatgttttatgcttttcttactgagtctgtcgactcaaagttctgcttccatgtgtaggtaaaggaaaggcgaaagctgaacaggattgatcctggctgagatgaagttgtacatgttgtggcagcgcgacctggagtattcggtctcgggacatctggggttatattttgtagtcgttggcgacctggttatgtattttggtgtattttgtttaaaagtttaaaaaaagagatcccggtacttgtaaatgattatgtaaagtttataaagtttaatatttaatataaaagttttaatttgacacattttttagaaaaattctttgattagcaaagatagcactataattcaaaaagcactgtagcgtgccttagcattagggcgttacaatgtcactgtcttcagtattaagtttttgagaaggaaaaatcttttcatggaacacaacatttcgagatacaaaaaattgtttgttattgatgtcgtagagcttataccctttaataccttggggatatcccataaaaacacttgtacgggctcttggtgaaaatttgcttttatgagtagataaagttgaggcaaaaacgagacacccaaaagagcgtagatgttgatattcaggcagtttatcaaagagtaattcgtaaggagttttgttgtttaataggggagtaggatttctatttattagatatgcaacggctaatatgcattcagtccaaaatttaatgggcatcttttattgaaaatataaggatcgtgcaacattaagcaagtgctgatgctttctttcagaaacaacactttgctcaggtgtttaaccacatgagaactcatgcataataccttgcttggaaaatagttccttgaaaacaagttctgtgcgttgtcagaacgaaatactctaaaaacttgcttgaattgagcttgtatgtaggtcaagaattgagacataatgaagctaacatcatatttatgttgcattagaaaaacccatgtgactctagagaaatcattaactaaagtaagaaagcatccatgatttgtgtgtgacacaatgtggtatggtcccgaaacatcacaatgaataattttaaaggctttatcagaaagagtattattgcattgaaaaggaagttttctttgtttagcaataggacaaacataacatggtgtacttttatgtaaatcataaattttacagttcaaagtatctttaagtagattcaaacgtttgtgagacaagtgcccaagacgagagtgccaggtctcagcagagacagagataacttgactggaatttggtgtagtatcaagaatgtgaagatctttgatagtattacctcttccaatcgtcctcttgctgacattgtcttgcatagtaaatccgtcagaggtgaaatgaacagagataggagaattattagtgagatagctcactgacacaatgttgtatttaaaggttggtgcatacaagacattggttaagatgatttcactgtctaatttaactgtcccactttgattcacggttaaacagtcattgttaggaagaatgcgtttagttgagggtatgttacatatgcattgaaaaagtttgacattagaacatatatgtctagttgctcatgtgtcaaaattcaagaattatgcaatggaggagcacaattatgggataggatgatacttggattacccgtagaggaactagggtcattagcattcataccattttgttgtgcagcaagtaaattcagcagttgccgatattgagttgtgaataattgaggaagaagtgcatggtttttcagttgaa

SEQ ID NO: 267563 - DNA, 856 bp, Cannabis indica
acagcttcaaatactcagtcttttccagccgattcaagtttccaagctactgctttcaattgtaacacttctagtaatcctgttagggataaatctcagtttgcctctatttggcattgtcgtcttggccatcctgcaaagcaggtgttgcacaaggttctaaattctgtatgtcctgaaataaagtgtaaagatcacagcttttgtgatgcctgtcaattaggcaagatgcaccagtttacattcaaatccacttccaataaaactgtttctccatttgaaattgtgcatacggatgtttggggtccatccttttattcctcaagagatggctataaatattaccttagttgtgtggatgattacactcgttttgtttggatataccctatgcaatccaaatctgaagttactatcctgtttactcacttccaaaatttagttgaaagaagattcaacaccaaaatcaaaagtgttcaaaccgatcttggcaaagaatacttgcctctttacacacattttcaaaatcttggcattacccttaggcaatcctgtgcccatacgcaccagcagcaaggacgtgtcgaaagaaaacacagacacgtcgtcgatatggggctcacattgttggctcaggccaaaatgcctctcaccttttggtgggaagcatatgctgctgcagcttacctcattaacagattgcccaccccaattctacacatatgacaccatttgaaaagctatataaccacaagcctgactataatctcctaaaggtcttcgggtgtactgttttccccttctctctcttacaatcaacacaaagtagcctttagatcaagtaaatgtctttctt

SEQ ID NO: 267564 - DNA, 2004 bp, Cannabis indica
gtttgtgtagcttagctgctaaaacggtgatccacgcgtacagcgactccgctcaacattaactcttcaaacttaaaaatagaaaataaaattggggtctatattatatccagctgaggtgtaccacagaggattacttaccaccacccttgtgtaaatgaatgcgcctcttctgttttcctcgctactagtttcgagtttattttaaataacgttctagaaggaaaagaaaaatttatgacattatggttttacgtgtttcatatttaatgtcaatatttagagatatgtatttgttgcataattaatcaaaaatttaaacaatttcatttaatggccaaactacctcaaaatttactaaagcactaattttgtctatttttttctttttcatttttttcatttttatattttaaaataattttttaaataaaattttacacaaaaatctctataacaactaacagagtaacttaaatctcaactaaaatccgtatgtcaacccatataaaaactagacaaaagttcaagaacataattgggtagttatcaaagtttgggaagcatggtttagtacataaacaatcactgaaatagtaaaattgaataaaattagacaaaagtctttaaatctaacaatctcaatagtgtaggagactttgttaacgaccttaagagttcaagaaagcatgatttggtacatgtcaaagtttaagagacaaaaatcctaattagtcaatattttatttgtgtcgccttattacaatatcactaatataattaaatttattaatcataatttattatatattattagaaattaaacaggtggcgtttagtttggagatataaaaatataagaataaaaatgataatgggaattggaataggaatggaatggaataaaatttaaaatacataaaaaaaattattaaaatttttcaaatcttgcattgaaataatctttccttatatttcaaaatggaatagtcattccaccaaaatagtagaaaggtcattctattgaaatgatattctaatattttaaattgtaagcaaacaaaggaatggaataaaaatggtttcctttccatttcattaaattataaaacaaacataaaatgatgaaacaatttaatatactctattaaattattaaaataaaattgtcataactaaagttattttgacaaaaaaaaaaaaaagcatagggttcatttcgctaatatttgtaaaatttgtaagaaataattttcagataccttaaaattaatcttgccaacttgcatacgttaaagaactttcattttcaatccaaaaaataaaacatagttaaataaaataaaaatgccaaagttcgatatttggtgagagaagcacaaagtccctttctttcactcaagtttagcttttgagaaattaatgcctcttaatttgtctcacatatttatacaataatatttatttattttaattagatataattatataatatatttaattatatgggttttattcatgggtttgactttttgttttgggaaattcttattatttaaatatgatataatcactccaactaaaaacactaacactaccacaaaatagagcaaaatataattaaatagagggaaagctttgcgtgtgtagttcaaatcttactacaacttggattggaacctctaataattaattatggtatcaaatttgttagataattactaattaaaaatgtcttaatcacaactgttattttcaagttaatatttaaggtttttataccataacatatataaacattttgaaattttgtatatttcctatttgttttggtatttagaaaattatttatgttttttttttttttttcataattacatacgttagttattaaagattacttgaataatttttaagtttataatactgaaaataaaatttttgaacaattacttattataagtataagaaaaaacagtcggggcatgtacaatataaaatata

SEQ ID NO: 267565 - DNA, 1022 bp, Cannabis indica
cgataatctagggtggaaatttcctatcaatattcttggcagaataaaattgtcaacatgttgaacattatgtcacagatccaagagtttcgtgaagactcacaatagataaccgaagttatcataaatgacatgagtctggtctattcctacaaggcgcaattgattagttaaacatgaagtaccaacagcaaaaatttgtgtttttcattatttaaaaatcaaatactagaacaaagtttttactaagttgaaaatgaagtgagacttaaacacacttggctcattcaaaaaaggatgaactccatccactacaccaatggcctatttgactatggtctaaggaccatcacgttaagagtggtgagtgactctttgatcgacacaaagtgacaagcgagtctcttcgttcaagagatcttttccaaattgatctagagactagaccaacaattagtgattggcatcttggttgtaagtgagtctcctatgtgattgagataaaagttctacagcatcacagcttcgtatccataggttaaaacaaaaggaatgtggtcgatagcagtttttcagtggttcagtaatactacagaacttctggtagctcttcatgaggtgtttggtgcagaaatttgtgaataggtcactatcaaactaagtctcattcgacactatcttttgagtaagtccgcaaaggcatataatgttcttgactacaaaatctagaacttttttcgaagtaatgtgacaagtggttctgctacaccacatgggcactaggtaatgttgttgctctttgtgtgttattttgatgctaaactcctcaaatgttggtgaaatagcacgattcagcaacacttagtttactcaagtgaagaaattcacccactcttcgtgattgaagctcggttgcacactaggtgatgaccagagatcaccccgtcaaggtgctcaccaaatgatgaattgaccttgcaacagctgagaagttaaatttgatgcatgggtggagtacctca

SEQ ID NO: 267566 - DNA, 1007 bp, Cannabis indica
atgtaagaacacaataaaaacacataattattaaggaaatattaggatctttctttattagattaattaatatgcacgaatttgtatgagattatatgtaattaacataactaatatagaatctaaaaacatataattaatatggagaattatatatttcaattaaataaataatattaaaaacagctaatagtatcaatcttagttcaagtatttctaactcgaaataccatgtctcctctttcttgttcttgccaaacaagagattcaacctctccttccatcactttccctcctaatttcctctccatccatccatttctccttcctattcctaccaaacatagtcttaattaacaccctctcagtctaatttagatatcaagtagtgttattttgggccaattatatatagtagtgatgtcgttttaagaaggaaaagaaaacagagaagacacatggcagtggtctcatattgttttgagtgtgagacagagtaggtgagtactgaatatatatatatatataatataatatccaaactcattgtggacaaagcctgtcctcctcactataacacaacaatatcttccatacctacacgttaaacctttcacctcatgaacaattaatcttaccaaatatattattattattatatataatatggtatctatcatatcatataataatactatgataaatgttatcatacttatattcacctgttatattattattaaataatataatatatagattaaatatttgtaataaactaataatatgtaacatatggcaatttatattatttgtcattattttgtaacatataggagagttacttattactatgagtaacctccaatattatcaccaacattaagagtgtaaaaagtattacacatcttaatttaaaattcttaactctatagaagttgtagtgtgcataagttacatctctttattgagtccataacatctatagaggttaatttgaatttcaa

SEQ ID NO: 267567 - DNA, 1057 bp, Cannabis indica
tagggcacaaaacccaacatggccttactatgaaaatattttgtattcttatcatccgcattgagccaatgaattttagaccgctgtttccaaaagacgtcatggttatagagaagaaaatcaagattggattggagcgtggaagccagcttgatatcctcactagagataagaaaattggagtgaagagcattgatagagttctcaagagtatgaatgcgagaggataagcttttaaaagaggcattccaatctttgatggcagcaatacaagattgctgcttagaaagaaaagacccgaggggagtggtatcagattgaaaagaaagcttgtttcaattatccttaaccatataaaaaaaaaaagaaggctcagtgagccaaaaaaaattcaaacaaaaatctcttgtgcctaaaagtgtgcaaactttcatcattaagaacaatcttaagaactctatgttccgaaccatagaatcaaagatggtaaaggacagccctaggaaagagagtttgccaactagaattgacaattccccaatccaatctctcatgaagatggccatgtttccaagtgtaagggttaccaacaggttggagaggagatagggaaaatttcttaagaaaatttctaaaattgatcatagcatacgtagggacattattagaacaagatctatcaccaatggacaagtaatcattaaaatcaccaaagatgagccaaggaagagtaggagcattatcataaagatgatgtaaaagaatccaggtgtgaattttatcatgcacataaggagaaccataaaagcaagaaacatgagtggatatattatcattaatagttacaatgtagtcaatatgattgggagagtaattcaaaatattaaccttaacatcagaattccaaaataacaaaagaccccccttaaacctttcctagggacctcaaaaacatggtcaaaaggtaatctataacaaaagttgtccccacagccagcaagacatttagactccataacaaaaagaaaattaggcaaagtctttttacaaaaaggga

SEQ ID NO: 267568 - DNA, 541 bp, Cannabis indica
tactaccatccaccacatggtatttttaatgttccggcctgcatacgattttaagtttattaaacctaattggaagagagctttgatatagacttttggaagcataaattttgagagagaaaacgaccttggagtctactgctattgattttcaaggagaccttttcttctatatttctaattagtctattgtaattgtctataattacaattataagctaaactcatatctaggattttcaatggagattgtttgatgaatgaaattttcatctttcttcttctattgattgtgtgaactaattttatttgtgcttatattgcatataattgattagccatcttttgtatgagaatcaatataaaatttgaaaactgaatattgtatgctataattgattagtcatacgtttcaatacaaaacgataagatttgtgtggcttgcgtagcgtttgaattattgcttattactgattatatgtttgttatatgtcaaataggataatgtcgtatagttaagattctttatctcttaatcaga

SEQ ID NO: 267569 - DNA, 1418 bp, Cannabis indica
taaggttttttgtttttttttttttttttttgcgagatttatataaagggactaaggtaataaaatttcccactttacaaaatctctctatatatacatatatttaaatatatttatatatatatgcatacgattaatttcatcaatagttcataattgtttgtttttaccaaacataatgcacgcacgttatggaatatatgactccccacctaattaatataatttttctcataaataaatttttacatgaatagacactcaaacattattaaaattttctccgaatgcattaagattgttaggttaaaagttatttgtctaattttattcaattttagtaacagacacttaatataaattatactttccaaacttccgtccacgttagatatgcccgttataataaaatttaataaaattcgacaaaaattgaatctttaataatctcaatatagtttaggaaaaaaattttaacaatctaaaaattttaaagacacaattagtagatattaaaatttgaaaaaagatcctaattattaaccttaataaatcgttaatttttaaatttatatacatataacatatttaaagagtttaggacctatagtgaaagtaaattatgcaaatccttattttattaaatacatatttatattaatttttaatttaatttattttaattaaaaagtactatatatataatattgcaacttaaaaacacatgaatatatatatatatatatattttaataatagaagaaaaatatttgtttataattatgggttgcaaattaatatagtactatatatagtactactccaaggtccatgcatgagaataatccatccgacaaataaatttataaaattttgacttttttttttttttttacatatccgacatatatattcattaaagatgactttaacgtaggaaagcatgcaaaccacaattaaacaaaatagcaaattaaatgaatgatatttatatatataggaacttttctacctcaatacacgtttttacgtaatctaaatatctataataattacaataacttaaaccttacgatattctttgttcatatcaataattttctttcttgcattgcatgatatatattcttatctggattatatatgatatgtaccccaatttaaagtttgtttatttatatatatataaatatatatttaaggcggtgaaagtgaccaccatacaaccacaaccacaaccttattaattagggtaaatattattttggactttgtgttttgcaaaagttacagattggatcctgtgttttgttaaatgacaaaatggaccctatattttctaattgataaaaataggaccctgatctgaattttagacaatttttttttaattacaaccaacttgaagataattccta

SEQ ID NO: 267570 - DNA, 818 bp, Cannabis indica
gtgttgagcatctaaaacttagactttctcgtccattgtatcttacaactccaaaatttatgctaaattcataaaattcacattatttaccatattatctctcatttcaattcatatgatgtatatgaccattaaaacctaaaacaaaaagaaaacgagagtaaacttgaacaaaaataaataaagactactgaaacacatactaaaatggactctaaaaatgtataaaaataaacttaaaaaattctcccaaacttaacatttactctcccttgagtaaagaccaagttaaactaacaaaaaaaaaaaaacaaacaacaacaacaacgaacacacaaagtaagccactattgtcatatacactacattgtctttcccatgaaatctcaatcgcaatttttaatagatttttagctcaactacctcaaagttcaaccttaaagttcaattaggaaaataaataatatgactcacaaatgaccccaatatttagactctaccatatatgctcaactcataccaaacaattttacaaactaatttttcaatatacttgcaccatttaaccatctctactaatgtcaacaacaaatactttgaaatcagcatgactttaagaggttatgacattaggcttaagtaaaggtagataaaaatgtcacttaggcttaggctcaactataccatagtttttttgtattccaataaccttaatttcatcacaaaactatatcattcattccccatttaatacaatgaagagagaaatttatatttttggaacccaaactaagaactgtttactattcttttttttt

SEQ ID NO: 267571 - DNA, 755 bp, Cannabis indica
ttgttttttttttttttgacaatattattcccacacttggaagccaactaaaaaggacagaccactctagaggttacttgaacgaaagttcaagggaactgagtcctaactcctaacttctcatccaatgagagagagaactatgttattatatatacaaagctaaatctaattgtcaaaaccaaaactaaagtcgaatctcaattcattaaaactagctacatagcccacatttttgagagtataataattcttattttgttattgtactaaagattaacgtactgaatatatatggagaaagaaaacaaaagatttgctctgttggtaggatgcaactacccgaattcccaatacgagctccatggttgcattaacgatgtggttgccatgaaagagagcctggtgagagagttggggttcgatccaaaggacattgaggttttgactgatgaggcagggtcatcatcagtaaagcccactggtgaaaacatcaagaaggctcttggtgaattggttgataaggctgaagctggggatgtcttgtattttcattatagtggacatggaacaagaattccttcactcaaacctctccatcccattggtagtaaggatgaagctattgttccttgtgattttaacctcattactggtatctttctttctcattgttacattaccacctacctatatatactttatttttgacaagatgtttaaattctttttcatctgaacttgagtgaaattta

SEQ ID NO: 267572 - DNA, 978 bp, Cannabis indica
ttatatagaatagatatattattgagtaaaagacaaagaagtaaactgcaatattatttgtcacaaaaatttacaatgtaatactgtctatggattttttttcccttcttcttctaagtcgccaccttatatatagtatataccccattttgagtatattatcattacccaaaatagcacaatctcccaccacatcccactctgccccccactaagaagaagataagaaaaatgacccaaattattttaacgaaaaaggggaaagctagaagactttcgagtgagttcgatatcaattgtatacttttccatatattattcccaaaaaaaaaaaaaagaaaagaaagaaagaaaaagtgacaattacttaagctatatattctcatttctcgccatattagctagatctccattactacacttttgttgagttagaaccacatgcaattggatattgctcaccaagtaaaactgttgcacattatcccttatatacagtacgtcatcacccacttccactactatagctagctaagagtgaagttagaagtaaacgaattaagtgtcagcaaccacatgcactaaaataattaaggagtgagtgattattggccaccgaggagcctagggaagaataactgaaattaactcaggcagttttaccaattgaaaagaaaaggtttttgataaggaattgatattccaattcctaaaattaattggtgctattggtgaaaaactcaatctctataatattttccactcaatgtgggactacttttaagaagcaacaacccaggcacgcgtaaatttcataaagcagtcgggccatgcatacgcgcccaatgcacccgccagctgaccaaatattcagacctcatcctcatgatctcactattatcgaatacaggccacatgaagtgggaaagactggtatgattttcttcttttgttcttcttcttttgttcactactctg

SEQ ID NO: 267573 - DNA, 812 bp, Cannabis indica
ttttcttttttctttttctttccatatatgttatagcttgctttacaaacaaacaaactcttttttcttgcgggtccggcagttgtggcgtcgtgatctgtgtaccctttattcaaaatttaattttaattataatttttaaagaaatttgtgagatggagaagtggaaatcggcaaaggagacatttttagaggtagtatagtctttactagctgtaaaggtccactctttatatatataagcttccttccttccttactttccccacaccatgacccttatttgactctgtggactaggatacctacctacctactactactacctctctctctctaacctttttctttctctaaaattaaaacagaatatttttttggttgcccaatttccacctagagctagatgatcttctttttgaaaaaaagttgagaaaaagagtgatctttgcttctctgctcagctatggctcctcctccacatgggaaggattctgggttttacagacaaggcaatgactggtacttcatctccctctctgttcttttttatatgctttttttggttctaatttgtagcttttagagtttagagacctttgaatttgggtaaactctactgggttcttgttattactttccttttagtctaatttttgtttatataaactcatttgaagacttgaattgaccttgttctctttaattaggctgacccaattgtggtactatcttaaaagttttggggataattaaagatttgttattttcaacaatttcattggtgttgacaggttttacaaggctggatt

SEQ ID NO: 267574 - DNA, 633 bp, Cannabis indica
tgtggactgtataaatgtttaatgggccgacccaaagtatttttgtaattttttttccttttttgtattttttttgtttttttcccttaattatttattagtatgcttttataaaattaataaatttgataaaataataaatttgatcaaatataaaattaaatagttattagtatgtttttatatatgtgtatagttaccaaattaattattttaaactcgtaaattatttgaaaaaaaattaaaataaaattaagatgatatttatcaactctctcaatgtagtagagattagatgagaaattacaaactactcaagtcactgtttaagtattttttttcttgatttgtaagatgtattttttttttttaatgttatttagatttgcaataatgtaactcataatgtggttaagtgacttacccattaaatgtaaacgaaatactttggaattttttttaatgacccaaaggtctaaattctaatgttactgtttaatattaaagctgtttcttaaaaaaaaaaaaataattcatttactgttgtgataatttgtttaaatactaaaataaaacttccctgaaaatacaaaagcgataagaattaagtcaaagaaaaataaataagtagaa

SEQ ID NO: 267575 - DNA, 1615 bp, Cannabis indica
ttgagaagaaacaaaccggccatattgatgaattgtataaatgttttttgtttatttatggaaaagacataactttcatttaaattcaattcaatgttttggattatatgaactttttgttgtttgggtagtcttacattgatatgtatgattttatcacacatattcccttcttccttttttatttcaatttcttttgatccaatcaaatataaaattattactattatcaattatttgatcttgcctttcattagaaaattacaactaatgtacataattaaaacaaatttaaagacaaattaataaataattagcaatgccaaaattaataaaattacaacttaagaatcagaaaaataacagagtaaaaccataaacaaataaagcatgaaaataataaaatcaacactaatatatattggttgaagtcctatagattaatgaaatctaaggctcttctccagttctagaaactaatagtatatattaactgagcaagaacagtggtacaatacattcgagagattctctctttggtttctcttaagatgtttacttttctaacactcttacccaaaaaacttcttcatcaagagaagcttcttcatgcaaaactcaaaactcattctctctcttttctttgtatctctttctctctacctttcaatctcactctcaaaattatctcatgtattttgtatcttctaaagatgaggatagtggtatttatagatctagaatatgaattcccaaagtcggtggttgcaacaactaattaagttgttaagtgagttccgacttaacaactcctcgtaataatatctccacgtcagctcaaattggagcttcttcggatgagcagcacgcttcctggacgaaagtcccagactaaagaagtgtgttgctggagggatgttccgaatagatacaaagatagttggagcagactatccgaacatccttctaggagagaactacaagtcttccgaaatttctttccgaaggaatactaactttcttgaggactccatccagagtggacaaggtagacttctaaaactccttttcggacgacttctagctttccacaagaatctttttggagaacttttcatttggatgaactataccacaaattccacctaattcctttaaaataaaaatgatggtgatgaagaaagtatgcaaccatcatggttggtgttccagatatctcagtatactaacttttgagattaatcaagtccaagcagtgcttgaacttgttaactgttagaaccttagtcccatcgttagcaagattatcttgtcatctgatattttctaattcaatcaatccttctttgatcttttctctaatccagtaatgtgaagaccgcttagtttaatttagaaattagcagttaattatgattaattatgaaaattatttatatatttaaataattatttatgctgttattttaaaattccgaatgcatttttatgtcatttagtaagatttcatattttgcatttacggtgcccgacaacatggaaatcggtgtttggctcagtaaaatcacaacttagcatgttagtattgtgggacggttatttagacattgggaat

SEQ ID NO: 267576 - DNA, 1280 bp, Cannabis indica
ttggttcaaatctactactaacatttatttattgaaagcagccaacattttgttcttttttgcaagaaaaagacttaattgaaagcagccacattatccttcaaaaaaaaaaaaccaaattagattacttgttgttattattatcattatttttttaaaataaaaaatattgaacgttgctattggttatatcattactatgatgtgatattttacgaactattaatatttttttattaataattattaaattaaaatatataatattattaattacacctaataacaatacgatatttcgctattggtatcttttaatattttttaaaaatatttgttagtttttttttcccactattattacacgctataataatcacttagctcaagtgacataatctcaactgaccataagaccatctctaatagatggtatatatttcgagttaaatttaacctaatttttgtatttgtactttattgcacaaagtgtaaattaattataaaaaccaatattatcattaatattcattgaaaatatacaaacaatttataaatataaaaatatttttttattaatgaatagtattaatgagtggcaaatagttaattaaaaagtgtgtcatttattgtggactaaaatttagcacacattttagatcatcattgaagttaattttctacaaaatgttctaaaaattgacaatacaccacatttatatatctcgattgaagatgctctaaagggtattagagtgtgtgaggatcatagcctcataggatggattctcaaataaaaatttcattatatatacataaaaatatatttattatcaatttataaacttttaattaatgataataaaaaattcacatagctatggaaatcatcaagaaaccatcaatatgccattgaaaaattgtcgatatgagtcttctctaatcttggtacgcttaccatcaataaaacatcgatatattatcgataagccatcgatataatgtaaaaaatccagatctcaccggaaaaatcagattctgtcgtttcgtaaaaaaaaattaggaacatactcttcaaaatgtttaaaaaaatattgtataaaacacttaaccattattgccagcgtaacgagtttcgtacggtcattatgcgtggttcgtggtttaagtggaatctccgccgaccatcgtggttgttaataggttgtttttttaaaaaaaaaattgaaaagagagagagcagaaagataagtgagttagagagaattattttttttaag

SEQ ID NO: 267577 - DNA, 2059 bp, Cannabis indica
  modified_base (1963)..(1963): a, c, t, g, unknown or other
taataagaaaaccacataactttcaaatctggtagcaataattattaaacaaataaaatcttaaccaaaataataagaggattaaaacatactagaaaaactaatgaattcttagaaaaataaaaaataaaaaataaataatgaaaattttaaaataatacctaaatagaagcgttaaattaaaattcaaaacaaaagaaattaaattaataaatacataaaacatatctgaaaaaaaaaaatacataaaacacatccctaaataataggcaaccatatacccaaagattatgtaggccatttaatacacataaattattaatattaaaaaacaaaaactcctacaattacgataaataaagcaataataaataaataataattaagcaaataacttaattaacgtaaattaagcaagtaacaccctcatgcagtaatcggaaggcagctccaccaccaccctctcttcatcagtgtcctccatgactatcaacactgctacaaaacttatgaaagaacgaaaaacaccaaaattgaaacatcaaaggcataagaaaagctaaccgacgttcaaaacaaactggtcactcacaattgatagcagagatttttagttaagggaataagaaaagggtatgatagatattactaaaattaataaggtcatcacaaaaacagagacaactaaacatactcatattcggaaattgaaagacataccttttagtaattaacaaaacaatagaaattgaataacctggtgaggatcgttctcaatagaagaaaggcagccaacataaagcttcgacacagatgactaggaagacttgccgtataaatcctcgataggattacgaaatgaaggtctatgttaccgtcaaaatatcggacgagattattctggtgacaaggtcagaatcctccgggtgtgagattgggtggtatcatccttcgcgttctctgacaaccgaaatcgcctcacgaacttttcgctttcctgttcatctgactggtacacgttgccaccggatgataccgacgacgtcaataccataaccaggcagctaactgaagcccttttaacttcgtgtgtaatataaaaaattaaccaaaaatttgtaaagagacaatattttaataatttttattttatataaaatttatatttttaattgtattaaatttttttaatttcttttttcaatttatatttttaaaaaatatacttatcaaattatgtttgaaatattattacaaaaaattaaaaataaataattatataaaaatttctttaaaatatatatatagatttaaaaaaaatataaaaataaaattaaaataagtattgaaattaacataaaataacgtgaagaaaaaaatataaaaagaatattaaaagtaatttttaaaattatttattaactagaccatacaaagtctcttaattaaaaaataaatctcaaaattcttttcttcacaattaagccgttgcttaatgaaaaatcataaataagacaatcaaattttagaattataattgattaattaaaaccaattaaccgagttgggaagcagtattatctcaactagtgtggggaccatgggcctatataatcaagcttctaataagcagaactagaatttaccaagtaaattttctaacttattaatgcgtccttccaccactatagatttggaaatgtactcttaattatatagaacactctatatgtaccaagatatagatacgttataaattattcattgttacaatccaaatagttaaagatcctctatagatgatctacatcaaatagggacaaatttaccgttctatcctttaatgtattttatccttaaaatacttagctacctataaatgatatttcagtaaactaatataattactaaaatgaggtctcaatcatttatctccattaagccaagctcggagaaaataagngttttacttctaaatacttatagaagttaatgaatttccatatctatgatcagcgctcccactcaattgaactccaatgtccttaatctgtatgtc

SEQ ID NO: 267578 - DNA, 2350 bp, Cannabis indica
tgagatccgaacaaaaataagcgagcaaatggtgacttgtgataaggtgattcaagattggtgagcaaaaatagccatcatcttgaagggagatattggagagagaatattgtcccacatgaattaaatgtaaaagtattgagtcatatataaaaacacgcgctactccattcattatcaattgattttgagataaaactttataatttttaatacaatatatatataaatacagtgatcgttttattagagattattagagcaataacttcaactaatgatgaagaaaattatgaaaaatgaatatttgattgtgtacacatatatagtttatagtaatatttttttttcttttttcacaaacgtatgttttatatttgaatcattcttgatatcttttcaactataatgtaaaaaaacaaaaatatattaattgtttattcaaattttgacaatagtaacatagtaagaataacgacgcgtgtcacaaaaatatcgggactgaattgatgaaaaatgtgtaatgttatgattgttggtgtagaccgttagtcatgactcgttggaagagaattcttacgatcacttttccccctagcttgagcaaggtggctgcctttaggggagaatttagactaacaccctcataaataaacgatcaccacacacttacgggatcaaatcagtctacggggtagataccactacccctacctcaaatttaatgatatacaaagggtgatgaagttagtctagggtgtactcctaaacccctacatcctcatggtccaagaagttcattttcctacataagacacggtggatatgccacatcttcatgacgacaaggctacccacaacgtcgaagatcaagtggaaggggttgatatctcaagggtaacaccccaagatggcaactgtcacccccttcacaatgggtcgacacccctaattaaatattggctactaccccagaggaggttaccggtcataccacactatagagggaccctcatcgtcagtgactaattcaaatattcaaactccacaagaagctcaaagatggttacgtatacaaactcgcgaaaataacaggatattatcataagaatcgggttttaactacctccaaaaatgaaggagacaattgaaatatctccgcaatggttgcatctcctaaagcgagaagcaccgacatttttccttatataaggggtcacctatgacctaaaaaagagatctaaaaatttgagtacttagagaaaaagaattatgtcattgttatccattgcattcaagagcatatttttgattttgtaattttgattaataaaatataaagagagtaggctattaccgatatttggggttgattttttttttttttttaaatttctaatgtcattatttatatctagtattatttttagtttaaatctcatttattataattatgtgtcggttgattcggttgattgaaaatttagtcaatatataatcctaataagtgtataataaattaggtatacatattgtaaagaaaatattgagtgtttcttatattggaatcacccctaaatcttatatctgttttgcttaattacaactcttattatatgtataattaatttcttcattaattagagataagctacatattctactttattattaagtcttcatacgccattctatgtaacgaataaaaacaaaatcctcatatacatacgtacgccacatcgcactaacttgtactattctattattaattttctgataattaattatatacatagatataatataagatatgatcaagaataccttaatacataccagttgttaagtaagttaaatttggtaattttctttttggctaattaggatttttttctccttgaattttgacatatactaaatcatgtccttaaatttttttagctgttaaaaattctctagattgttagatttaaggacttttgtctaatttcattcaattttacgcagtgattgtttatgtactaaaatcatgctccccggactttgatatctaccgaatcatgcctttcaaatttcaatatgtattaaatcatgtctcctttttaacgaccttacaagttcagatgacatcatttggtacatgtcaaagttcaggagaaaaaaatcttatttttaagaattgggaaaggtgattcacttgttgaaaattaattaataatacactattttttaaatattattattaatgatatcattatagcataatattattattaatttttacttttaatatatatatatattcattttataatatgtctctaagatctttaaattaatgtaaattata

SEQ ID NO: 267579 - DNA, 1486 bp, Cannabis indica
aaggaagttggcacatcaggaaaagttctctcgccaaatggagaaaatgatggcacaactacaagctagactgagcgatatcgaggaagactccaaggaagacacttcaaaagagcatgtgaacaggataaaaagggcaagccctactaacgttgaaacctcagctcgtgcaaaggataaagggaagacaaaagtagacaagccccaacataaaattgttccaaacctgaacacaataaactatcccttgcagaaaaagtaggccaccgatgcctccgggcttgaactcccttctgctcgcaagggaaacttgtgcataattaacgataggcttagcactctggtgcaaatgcctgctgttaagggaaaagaattgccctagtgattatgttaactaggatgatgggatataagagatttctcttgaaaacagttggtttattgttgacctctggaggcgtcttaatgccaaaagagaaaaatctaaaggagaaaaggcaagaactcaagggaatggtctccaaaactacatcaatgatagaatttgtgggtataagattctgaatagtgataccaagaaattggaagaacaaatagctactttgacaaaactgacacggaagcatagtggagccatttctgactcagaagatgaggatttaaaaccacatgtctagtggagccatttctgactcagaagatgaggatttaaaaccacatgtcaaacagatcatcgaagctccactacctgaaaacttcaagatgctacaaatagaataatacgatggaaggacggaccccatggtctatctgtctaaatacaaccatctaatggaagtggcaagagttagtgatgatgttaaatgtctttattttttattgacgttaaccaagtccatcacgaaagaactccacagttaagtgtgcttgacctggagtaatttcaggatgggtgacctcctaggaagttttcccaggaagcgtgcgagtgaggacaaagcacgctggaaacactcgtgttggtctgtagggtcagtcgtcattccatgaagcagacatagtgacgtactcgtgtataagagtcattcattctgtgggtgtaagggcccaatggaggcttgaagcgaggacgttacaattaccctaacatgagcggtttaatagcctagggttactaccctaatgatatatgttatgtaaatgctataccatgttaaatttatgagtatattaagattcagggttatgtgttcaaggcataactgggttggactcggtaactagaaccgagatgaaccgttctaaggctttattgtatttagacgtgtgagcgcacgtaggtctatgttacatagacataaataggcatgtgagcgtaacgtgtaggtctgtgtcatacaaacataagagaatggcattaatgtttatatagtgtgataaatatgtttatcaatatttttatattgtcttgctgggcttggctcac

SEQ ID NO: 267580 - DNA, 582 bp, Cannabis indica
aataacacgtcttgaatgtgctaaacactgttgatgtccaataacaatacttattttttaaagataaaccatttaatacaaaacaacaactaataaagattaaaaagtacctaagaattcagtcaattccattcatagatttcaaacaaactcaaactctatccattccattataaaaaaaaatatcataatgtggatgagagagagggaccacactactctctctctttctttgttttcatcaagcaccaaaacgacatcgtcttgtaaattatataatcataccaaagtctcaaactttcatcatcgtcttacagttcaatctcaacaaatatgcttctctctctcgtacaaacctcttcatcatcatcttcttcatcttcatggctttcattttcatcaaattattacttccacattccaacccattcttcttcttctacccttttgcccaaaacccttttccctgataccctgaaaacattgttactctattcaagtaaaaaatcatcacttgggtctgcactcaaatcaagaaagtcctcatctttacaaaccatatctactattcaggcttctttg

SEQ ID NO: 267581 - DNA, 1530 bp, Cannabis indica
cttatatttttagttaattcacaaatatgattggatcacaaaaatgtgtcacataatattaattatttattttgctaaattgtccatattattaaatatgatctaatgtgtctcttcgacttaaaaaatgaactaatgtgttaatattattctagtaatatgtaatttaaattaaatatgtaatatttatttgcaactaatatttattgagtactttatctttattgaaatattactagacgtactttattttaaaaaatatgtaggaaactattaatgttcttttgatactataaaattgaacatttcttattccatggtaaactcagctatataaatgtaaggtaatggttttgcataaagaatttgtcttgatatctagtgatccacgtttgtcatataattaaatgatttgtgttagaacagtgggtgcgtggattcttagatttatagtattctataaaaaaaaaaaatatgtttcctaggtacatacaaagggaacctcttgtacagtagaattgtcctttgtgtcaggttgcatgcaagccatgcgcatctaaaacatatcagatgggatcccttccacaaccagattttgtggaatgatcattatagcattcgctcgtctatactagttaaggctcactgaaaactcttatattaatatgatattattagttttgggtctaaatagtgtccaaatgggggttaagaacaagttagagcaccgaatcatctagctcatgaatctcaacatccttaggagcattgatgaagtatactacatggaatctgccaatagattcttctacaacaatctgtgatagagataagagcacacatgcgagagcatgagtcggtgtcacacctagaatcaatcccttttgatgtcagcgatgttcttgcccctacattaataattagtgattttcctcacattcatggagatagctccattctaattaattccaacatacctggtatataagtcttgtacaaagaaaatgggtagcctgaattgtctttgactaagattatcttattataaaatctcatttgtgtcctctaaaagaagcatctaggtcatgatggttacattacctatacaaactcacctcaattgatggcctagtccacaagagcatttagaagcagacaaaggatgtgaatgactattttttcctcacaaatggcttcctagtctctcaacacactaccctcacatttagaagagcttgtcttgacaataattgctctaaagtgatgaaaggtacactagtaggtggagccctctcatatttgtggaaattccccaccttaatgagattctcgatctcatccttgagctaacaatgttcattggtgttgtacccaacatcagtttggaaaagcccttattgtctacatcttttttgctatggtctttgagcattagggagttttttagttgtggcaaggaggatgttcaatgtaacgccctaatgctaaggcacgctacagtgtttttcaattattgtgcaatctttgcta

SEQ ID NO: 267582 - DNA, 658 bp, Cannabis indica
taaggacatccgcaaagcaactgatttttctcttaagattttggatcagaatttgatggcttatcataacacattctattatatatcataagaggtcgtgggatttcaaatttgagttataattgtgaccaaatatgtttttcacacaataatgtgagtgcattatctactacttagtaaaagtcacataaatttaagtgcattgctatatagccatgatatctctttgtctaaattttactaagggggttttgacaaatttggagacaaacaaagaaaaaaatgataattttggtttggcctagactaaacttgtgcttgaaactttgactattttttttttcattaagaacttcttttctttatgagctactttcctttttagcaaaagcaaaatttggaagttaaccaagtaataatctctactttcctttccaaacatcttttagttcaaaacctccaaatattgtattgggataacccatatagatacatttaaagcacttgccacatcaatttgattagttaaaaaagaaattgacattatatatactttgttattgtattttttgtaccaactattacttttgttgatatcaaatgcaattagattaaagaacaattagatctatctggaatttgaatagttttgttgaga

SEQ ID NO: 267583 - DNA, 705 bp, Cannabis indica
tctttggtgtaaagatctctatgatcaaggggttgtttggcgtgttggcaatggtagatgtatttcaatttatggtgatagctggattcctttaactactggctatatatcctcctcccctagatttcttgaggaagatgccactgtttctgcttttagaattgatgggggtggctgcaatgttctgcttgttcatgacatgtttaatcccgaagaagcaaaagttattttgtctatcccttggccgttaaacgatactcctgataaattggtttggggtcttgagaatcatgactattactctgttaaaagtagttactggttagcggttccgacaagcacctttccttatgcctcttcttcaagtaatccttataattaattggtggctaattctttagaacctaaatcttcctccaaaggttaagagttttgcttagagactttcttttgattggattcctactatgactaatcttcaaaagcatggtcttcaaattgataacctttgtcttatttgttctattgatttggagaccacttgtaatgtccccgcttcaagcctccattgggcccttacacccacaaaacgatggctcttatacacgagcacatcactatggctgtttcatggaatgacgactgaccttacaaaccaacacgagcggggagatccgataaaattggaacgatacagagaagatt

SEQ ID NO: 267584 - DNA, 863 bp, Cannabis indica
taagggctcaaatttttttttttccctatggcccactttgtttcagggccggccctgtgtgtgtctatatattttatattgagtgttttaattagtttacagatgatgttttcaaaattttgttagtgtgagatataatatattatatatgtatgtatatataaatttttaaaaatttatgtatataatatattaaatagtaactagttactttttttcattcattcatagattttttttactaagtagttacttatttgtaactagttactcataaataatgtaactagtaagtagttaaataattaaaattttaattttattgtacttcattatattgttagttgtgagctaattttaaaggttctaaataatttaaagttgatcagattttaacttgttatacaggtatatacattctctaagtttttgtcattaattatttatcaatgctcaggctacaaatgatgtaactcatctgattcgttcagatttaggctatgtttggtgggagggagggagagtaggatggatggagaggttagagaggatggggagtaagagggatagagaggattgttaatctcttttgtattatttggtattaggtgtgaagtgagaaggatggagaaaaaattaattagtaaattacaaaattattctttaaaaataaatttattattttttaagggtaattattgtattttgcaaaatatattttgtctttttatacaatccttctaaatttggaggaattaaattttgaaggttcggagggagaatgtctccctctatctctcctctccctcttgccaaacaagtgatttagtctatccttccatcactctccctccacccctctc

SEQ ID NO: 267585 - DNA, 972 bp, Cannabis indica
ttggccgagtatcccaacgacagtagatggtggttgtagggatttctttttatgcaaagtggttcttgtcatatgggttagagagagagattgaattatttataggttttttaggttttaaaaaaattaaatggtaagggtattttaggtaaggaggtattaggatagtattgtataaaataaattaatagagtacattttgtaatatgaatttttattaagtataagaaatgaaatttttctttagatatcttattccatatgatcttattttaattaaatatatatagattattttaataattgttaatatgatttttttttttaaaaatcataattttctttaggataatcaaatcaaaacatgaagaagatggatctctttcaatcaataatttttttttttctattctaaggacatggaaatatactttaggaaaactagataataataaaatttaaagtttataattgtaaaaacacttattttactttcttcatcacaccaaaagaatatctacaaattatataattaaaaataaaataagaacaaacttttgaggatagacataaaagttataagataaaataattttaagaaaatgattaattactagagcttatctcatggaaatatttggatctttgaataaccacctgagtgaagtaaaaacaacacctataagataaatatataaaatttaattaacatgtgtttacccaaattttaacgacaatgacgtgtcaagagtagcaacacgtggcacaaaaataccgaagctaaattaatgaagaatatgtaaagtcatgaccgttgggatgaacgccgaccatgaagggtgtcatgaccgttagagtggaagtcagacagtgagccttacccctagcttgagtaaggtgggcgtcttcaagaaggaaaaacgatgtactaataccttcgtaagcggaatgaacaatcaccacacacttacg

SEQ ID NO: 267586 - DNA, 737 bp, Cannabis indica
taataaatcttgttaagatcccaagtctatttttcacacatttccagatttaataataccatctaataaattaattgatttgggcaagtaatcttttttgtaattaaataataataataatgattaattaattacctccattgagccaaagaacgagaggtttttgatgagaattttgttgagcatggaagaaccaatagaacaaagccttgtgattgttgtgaggagtgagtttaacgtagccagcatagtgtgcaaaactcactcctttgggttctcccggcaagttcttcactctgtccgcctccgcctccgcctccgccgtgaattttgatctctccgccgccgcggtggttgtacagacttgtagtgcagaccatagtgaaaagtagcaaataataactgttttccaaacaactgccattataggagagagaaaagtagagtttttaagtagtagaggtgagacttgagagagtgggtattattatgtgtagtgatttattttatatataaacaagaatggtgtggtgtgggtgtgggtgtggggacaagtacaaagagacgttaaaacgacactactatctctctttggtctttgtcgttgtcccactctctccctctctctccttttatacaattatttatttgtttttataaggtgtttcttccttttccaattattcattttcctaaatttcacattacaaattgataatgttataaatttagttaca

SEQ ID NO: 267587 - DNA, 853 bp, Cannabis indica
tgtatactgtgtacattataaaaagtgtgtaaattgccatttgtcacgctacggtatattttttacttttcttgtttaaaaaataataaaaattgatttgatttgggtagtcacgtttgtgacagtgttgatgttcttctttgtttttaaaacaaaaaataaaaaaactgagaattatgagtttaagaccttacccaaacttcttcttcttattttagtttattttcttcattttcttttcattttttcttttatttttaaaaatttcaaccacatttttgtagtgtttgcggttcaaaggtggtttttagttggttatcattcttattgttcagttttttttttaaaaaaatccatttccctcttgttgttgttaatttctttttctataaattttggtcattatatcaatggttgtaactcgtctggtctcatcttctccaatagtaaaaaaaacctaaaaaataagaaaaaaacgtttgtaaattttccatgggtaagaaaaatttcttagaaaaccccctagccttacatctcctatggtttcgaaaaggaaatcagtcgttgattctttagaatagagaaaatcaaaacatttaaaactgatcattgaagtttcatgttggaatttgttttactaggatctagatttactaacatgtatgttgattatattctataatttaacaccctaaacatgaattcataaaacaatgaaaataaacacatataaagttaagaaaaccttacattggtggtagcagaataatatggctccttccactcagatctctaacccttgttcctttctatcataaagtaataacaagatttaagactggatctcctttag

SEQ ID NO: 267588 - DNA, 1034 bp, Cannabis indica
tcacatgagaacttcatacacaaatgctgaatggaagtcaccgcaacaaagtctactagggtcgaccagcctaatgtggccttataagcagttggatagcccaccactatgaaggttgagtgtttaaacacacttgcttcattgtcccccttaagggtgattggcagttggactttacccatgggaactagggcatcaccattgaaaccttacagttggatgggacatggagttagatccacctcagtgagtccaatcgcctggaatgcgagtttggacaaaatgttaatggaacttccattgtccaccaaaactctataaccccatttattagcgatctgtgcatcaatcagcaagggatcattgtgagggaagcgcacattcttggcatcatcttctatgaaaatgatcggtagattcatcattctaggacgctgcgtgggagattgtaccaacgcgtatacttctccttcttccacttcccttaggaatctcttttccgcattacgagtacttctggtgagatgcgatccacctaaaattgttgcaacatatccatacacaggtggtagagcgagcccatgaggatatggagttcctcgtcctagagcaagcaaagccaccccagctggagctggcgaagtaagaagagcaggtactgatattccaggagcttgagggcatcctaccacttacgaggaattttttgcgccctactgtcttggaagtatcatctgtccctggactactccccatactggatagataatcgggatgaagagccagtgccctagatttcttgctcggaccaacatttcattctcatcatttaaatactcacattcattagtgggatgacccttctgtccatggtattcacattgcttattctggtctcgcatgttcctcccgcaatgcaacatatgcgggggcttttaataatgtaccatgttgcgtgttgccttataaatattctcctgagtatctattagacttgtgtactcggtgtacttcgaatcgtacttctttctcgc

SEQ ID NO: 267589 - DNA, 1117 bp, Cannabis indica
cccaagattgaaatcatccaaactaggcataataagctgatctccagcttgatttgaactcaatgttgctacttcactactacccctcatcatcatgtcccaatgtgatttagttcttttggggttatgatcagaaggagaaggagtaggaggaggtcttaagcagttatcagggactatgcaacccaagtaaccagagttataatcagaatcatcattacagaaaaagaagttgttgttgttgttgttattatcatcatttggtggtgatgacatgtcattaatagtatttaatgattggttaaggaaggttggatgatgacatgtcataacaatctgaggtggagtagtactattctgattggtggggtttttactagtagtgctgcaaatgagctcatgagaaggtagtggcaaaatagtagtactattgttgttagtatcaaagggagtagtagtattattaagatgatgatgatgatgaagagagtggaaactagtgttgtgatgatcatgagtagtggtattagtagtgtaaataaagtttgttctggcttgtgtgcctttcatggacagagcagctctgtcataagcaagagcagcttcttgagcagtgtcaaaagttccaagccaatgcctttctttagtagttgggtctctaatctcagcagcatatcttccccaaggtcttctcctcacaccaagaaatcttcctggctcagcttgttttctccttcctcttctctcaccaggttgagttggagatgtgttcctttgaagtatggcaaatcccatttgctgatgatgataatgaccattgttttcataccctgctttcaagggtttatctaaggtttttgtggtggtactggacattgtagccagaaaaagagaagaagaagaagaagaagagagtagaaagaatgatcaaagaagagaaaaggtctttactttttctttctagttttgaatgaagtgagttgagaaagtttgtagggaaattgtcttttaaagaaactgatttgatcatggacagaaggaaaaggacatctcagttgtcattctctggaagaccatgatcctattcaatccactttttaattacctttttattttc

SEQ ID NO: 267590 - DNA, 694 bp, Cannabis indica
ttccaaattgggatttgcttcacatctcccttcttgtaattggtattggggtcccatgccttcattataactggtctcctattaaaaaatatgtatcccccaatcagaatagcatccctgctctcaatcgaatcaaatctaatgataaaaatcccatatgctagcattttaactttgtctactttgtcattccatagtctctttgcaaacccctcaaggatgtgcagaggagggttggaacctaagacatagtagaccagagagggcatccaatagttaacttcctcttctatatcctcccaataaatcttaacccttttcccctgttcagaacccttaaaagaattttcaagattcctaactatagttgcagatcgtagcacagggggagtagcagacatacctctagcaatgttactgttacattgcttatttgcttggaaaaagcttgaaaaatctttctgtatatcctccattctttgaatctctttcaaagagctacggggtgagagaggaggttggaataaatcgtacagggcacaatctgattccagactccttctcccatgcttcgcatcaacatcgtcttcttcctcttcagatttctccaggggatcgataggtcacctcctccatcattgcatgcgagtcacacttgtatcaccattcgaacctttcttctttagtttcttgg

SEQ ID NO: 267591 - DNA, 1634 bp, Cannabis indica
acaacttaaattagacattttcaggatatttattttatgatattttaattataattttgaaattatatagtttattttatatttggattttttttaaaattaattttgaaaaataaagttgaaaattagttttaattaattttagaccaacttaaaataagtaatcttcattattaaaataaatgattacttaaaaatatatatttttttttaaataatgagcttaaacatgggatattcgatctctattattggttctacatggttcttgttttaatatgattcatcccaaatagatgttcattcattagcaatttaacactgtagaatctcgaaagataagtattattgtaagtcttttattcttagtaacgatcaccgcaatagtgactgctaagagtatggcttacaaagagtgaaataatagtagaagctcgtgaaataggaatgaccttgactctcgcataaacgggacaacgtaagattctctttttgatcgaataaaaggttgctagaatggtgtccattttagatgagctaactactctattcaatgaatgatatctttgacttttgcttaaacatgaccctgatatcagtttgttggaaaccttagaaaataatttaaacatattttattttggcatttttgcaaacatatcttcaatacttattattttctgaatgtgtatgaatttatttgaactaagtaattgatttctctttattggtatttatagtgtcaaaatgttgtttagtaatcctcacttactcaacgcatttgcaaatgaacttgaaagtgcaaagatgattatagaatatttttaggttcaatgactctagagacccgatcggaggccaaaaatatcataacaattttagttagtaatattgatgggattattgagataaattgattatagaattaccgaagtattttagagtactcggagttgaccaaatactctaaagtaaaaatttcttagtggttaaaataaaataataattattattaacaatactaatattattattattaataataataataataataataataataataataataataataataataataataatttgaagttatcagtttaaaaagaataagatatatatatgttatgttttaagaaaacttaagtaacaaaacttttttcttttggtgcgatgaaacttttactcctaccatctaattttctttgattttcaattagaaatcttgtgattcaagtcctgttagcagctgggtagtgaaccattgaagaggaagagcttaaggtaagggttgattttcgttttaagttgataaagtttggttctatatgttgactttgtattttagagtagttatgggatttgtgaacttatggttttctgagatgatatgtgattggttttgatacttttgtgatgattttaccactattttgagttgaaattttgtattttaatattctcagttttattattcaattaaatgcggaataatgaaattggtactgaaaacagtttttctgtagctacaaaaaataactctgtaactccgaaagaaatcagaaaaacaaatagcgcagaaaagtaaaaatacataaggtttttgtacgtggtttcaacaatcc

SEQ ID NO: 267592 - DNA, 1458 bp, Cannabis indica
atttcttcaatgtacatatcagacctagaaaaaccattatcaccaaaaactacaaagaaaaaaactaaaatagattggaaccactatagtacttgattggtatattttttttcaaaaataaacagcaaaacagatacatttcactttctcattctcactcatataaacacaaaaatccaaactttaccaaaagtttcaacactaccaagtcatcttagtctcaaatggttcatatttcttcaatgtacatatcagatctagaaaaagcattaaactacaaagaaaaacactaaaatagattgatttgtatctcttggatgctaatttaaagttaaaaaagtttttagattcatttctaccaatcacatataaatttgttcaattacatttccaaaacatattttcagacactaaagtcaaatttttaatttagaaattacagcttttaaatcacaaaccaataaatttttcattaatcttggaaatattcaaccaaaattagctttcctctgtacacagatatgaaattttataacctaatacaaattacaaaaaaataactctaatttttcattcttgttttgttcatttaataatgtaattactttctgatttgtgataatgaacagaacccaatgattggtatctattcaatcgtacctgaacttagaattttcttcaaatcagctgcggaaggagcagcatttcctcccaaaacggccaacaagtaagcggcgatgatcttcattctgtcaattcaaaacaaaaaacgaaaaaccctcaaatcaacaaacaaaatcagacacagaataagagaaagttcgaaaatttatagaaatggaaacctgaggaaggtggtgggaggcggcgagattgagatgaagagctgagagagagagtctcagatttttgggggctagggttttgaagactcgagcatatttataataagaagcaaaactcaaaaactacgtcgtttttagatttcaatccaatccattatttatcatactaattagattaattttttttttgacaaaattcagattaaatttagttcctttggtaaaaaaagtataaaatttagttgatttcggtaagcttaaattggttgagagaatagtgttaccattaactttttattataattttttagtcaatttttgtgttggaaaatacatgttagcatataaataccattttggaccctggtttgaagttttttaaatacgcgtggtagactgaaatatcaagaactctaattttcggtactgtaaattatttaaaaaatttcaaaaatttacaggaatgatattgtaactataatgaatatcactttaaaaaaattgaaaaaaaatatttcgacatatgatttcgagcgtggaggttaactaagaggttgtaattagcactctccttaattgatattgctctgtgagcgttatcctccgtgtaatg

SEQ ID NO: 267593 - DNA, 720 bp, Cannabis indica
tttaacaaatctcaatagttcggaggaagtttttaacggaccaaaaaaattaaggaagcacgatttaatacatgtacaaagttcaaggaaaaaaattaactaattaaacaaaaataaaaaaaaaaaaaaagtaatgtaagatttgagaggtgggccaatggaaaggttaagtcacgccacctgcatgacttggattccatgttacatgttttgtgttactctacttccgaccccaccctgccacctcagcacatcctcaatctatctgccacgtgttagtatgggtcgctttcgttattcatttatctctttaactctattcaattctcgtttcaagtccgtaacctgcagcacacaacgactgtgctacttcgggtaacgttaacaacttaattccaacccccatgaacattgaattaattaattaataatagtaaaggaaggaccatctcttaatacaaaattaattaataataattgcttagggtaaggaggcaaagccactgagagctgatgtgggaaccaccccccatttcttgtttgtaaacttattagggaacacatcatgggtcccatccccaaataattttatttatttacttattttttcctttcaagaaaacaaagttgcaattaatatgggaggagaatccatgaccaatcttattgaaacgaatggatgagtacatcttattgaagtacttttattaataaaaaata

SEQ ID NO: 267594 - DNA, 893 bp, Cannabis indica
tctgccaggaagaggcaaaaactcgtggtaacgaacttcggcgtggggggatcgggggatcaccccttgtccccttacgctcaattgaggttgggccagcccagggccctcccctcggcttcgtctagaacgcctaccatagggtttgccttccccaagagggtggttcccttcgaccctcttaaaatgtagagggagaaggaggcgaatcgggccctgaaggggcgtctagagacgaagaggctacaaatctatcacgatcgagcatgatgttggcagtctgcaaggcggagtttgcggaggatatgcatgttgcgcccctgacggcgcaaattgtagaggttgagggtctagagaatcggtcggcctacaggttggggtgagaggccgctcccttcgccacagagctcttcgaccaggttgtcgagagcgcctccaaactgcccacctgtagcagcgcggatgctttcgcgctggctcattccgcaaagtggcaagccattggggtaggtcttcaggatgcttgcttttttatttttccctgtccttcgtattggtgtttcaacctattgactgggctttatttcttaacaagcggccttgctggctgaaagggccaccgtggaggttggcgcgctggtgacagacttggagctggtcaggacgtcaaaccgtgacctgggcactgccaacgagaccctccgacaggagctcacggatgccaagttctagatcgagggcctgctataggccaatcaacagttggaggaggagagtgcccgctaagctcgcttcatctaaaacatgaaggttgttcatgacctttatacagagactgtggaatggatgtccagcgtaggtcctcctctccgtcaggtggtgcgcatcccgat

SEQ ID NO: 267595 - DNA, 750 bp, Cannabis indica
ttcatttaaaagtagtaagtagtacgatatttcttatatatacctgagttggtttcaattgttttacaaatcggtaattttattgttctttacatattcccattttgtagcagattaatttggagaatacacatatgaaggtacttgaatagtaatattatttatgtctgctttgttattttcagcccttaacattgtaatttaaatgttaggttacttattaaagtaataagcattcaatattatataataaaaataatatttaatgaatgtaaattaatttatgcatgagttgtaccattgatgaagtgtcgttgcttcggaattgccaggattgatttcgattttacttgattcacgacttgacaacgacaatcctgcatgaaaatgatatattcagcctatttataagtggacaaaattgataagaatatatatgctgttagttagtatataaataccactcttagtttgaacaatcatctttgtttccattattattaggttgtttccaataacttcagacaattttttactaatatcttgtaccaaagcactccatagagtcaaatatatcgggttgaagctacaaatgtgattgaaaaaagtaatagtattattagttttgctatgtatcataattttaaatccatattaaattattatgagtggtccaataaagattatcattatgtatttgtattttataatatatatatatacctgacatcgattagatatatttcttgt

SEQ ID NO: 267596 - DNA, 1928 bp, Cannabis indica
cattttctaagctgaagtagaatttataaaagtttataattatttaatttaattgttaatataggaaataagagatagaatccaaattaagaaaaaaaatcatacaaaaaccttctagcactctcttacccttcgaaccctaggagcagttggtgaatcaagagaagtttcatcacgattcaagggattctagttggataaactagttttatgggcagtacaagtctaaatgtaagttctttactctttgattttctaaggtttgggtctgtgtgattgctggagtttagacatgtttttaggtttaaattgatgatggtttaagcttggattgaatggattttagggctgttaggtttgagttgggtaaattgagtttaagaactcaattttcattcaactatggtgttttggctgttttgatgaattgctaagtattgattgattgtacacattgtttttatgttgttgaattattctgagaagtttgaacatgtttgatggagttttggatcggttttggtgaagaaaaccagaattttcttacatgccaaaactggtcaaccggttctacaggtcactggtgaaccggtcgaccggttggctagcaggagaaaatcccaattttcttcgagtctggttttttgcttggggtgttttctaaaacctagtttagggtattttagagatgtctaagctatttttaagccagtaggggttatggttgtccgattatgaaattagggtttaatttggagttcgattaagttgttgatcaagttttgttgtcatgacataggacccgagattatcgagttttgttccactcaagtcggtgcgcacacctgattgttgaattgaggtaagaaagttaattgcaccgctaagcatgttaagtgaggaacaattatcatcgtttgtgactcgattatgatcgagataaagatacggtcattactgttattgagaatgggtaattacttgcctgaaactgtagataagtttcttacttatcggttgctttatcgggcaacaatagggacatatgtagctcgtgtgtgacgagtggtaaggatgctttatgaggcatcaagaacagtttgtcttattagacaaatagttattcatgtaatgcgtgattatgtactgtgtaaccatttattgtgaatgatggaattgtatgctatgcactcttatgatatctcgtgttatataatgtttgttctttatttgctttcttgcagagtcattgtgactcatggatgctcgtggtgcaggtaaagggaaggagaaagtggaccaactataagttagaggtctcttggcgatgtacatatcaactgcgatgtctcggcttctagtggacagggtctacccttttgattatgtttgtaaatataaccctattttgtaatactggtcttgagacattttgtaaaagttcataaacaagggatccccaaacctagcagtattttgattatgaaatcaaattttagtttaatctaaaagttttaattacgccacacttttcttaaactaataggttaatgataaaattatttataaaagcacacacatggcgtccttgtgggacaggactttatattagatatatatatttaatttattttttgacacatattattaaaatacaatgattagattttttttatttattttttaattaacacaatgtgctatggtaaatattaacatattaattatatattacccattatattatatacctcatcttaaaatcatatggtttattatttttattattaatgtaattattttatttaatttttaaaaataaattatcattttaactgtcactaacttaaaaaaaaatttaagtacgaaattataacaacaatttctatgaaaaaaaaataaatgtagtagtaaaaaaaaaaaataaa

SEQ ID NO: 267597 - DNA, 1230 bp, Cannabis indica
acgctaagtattttttagtgttgtcgttttctctttcacgcagcgaggttgaggcctcgtcatgaacgcgtgcatccacctggtttctcattaatacataggttagcagttcgtacgtttctgtctcgcaaaaggctattcagccagccgaattataaacataccttgcgaattatatttttaatgagttgttccatgttaagtatacttttcgttagcgtgtttgagttcttcgttctttccagctcgacacgtgtctttctctgatgtgcttaccgaatttcaagtataacaattgccccttaaaaaattatttttaattaaaatgagttttttaatgattataaagggtatactttcttaatacgagacttagaaaatatattactaattacaatttagatcttattcttatttataattaacttaaattaagatttaatttttttgtaacaaattaaaaattattcttaaataacatattcttagataatattgtgctgtatcattaaagacaaaacaaaaagtatcatataatatataattgttttctttcactaaaaaagaatcatagttgagtgttgttagaatttgaaatcaaagttcatttattctttttaaggcattggagtgagtgttttggtctttgccaatttgaattttgacactttataccttatttcaatattggttggctagttgtcacacaattaagaagaggagcccataaaagtgacattaaaatgtcaataatcacaatcacaataccaaagcttaacccacaagacttttcttattcttcctctttcaatacatacaaaacacccaaaaatctattaaataaaatatcaaaaatcaataattaatccaaagacttgatttttgtgactcactcacttgacctcattcagatacacagtcctatcttaataattgaatagagtttgggaattctatgacaaacccttttcaatttggccattcaatcaactgggccttcaaggaatttcatggttgattcagttgggaggcaagaattcgagaaaaacccatttggggtttcaggtttgaatctttgattataatatcttgatggggttgtttcatttagttgatttgattccaaagttttaagctttagaattgggaaatgtttgaagtttagatttttatgaacaacataccaaagatttgaaaacccatttaattaattatgtctttagaaccctt

SEQ ID NO: 267598 - DNA, 803 bp, Cannabis indica
aaaaaaaaaaaagaaaacctatcaaaaaaagtatcttttaacaaattatattataataatatattaaaacattgttaagaaaaaagaaagaatttaaactataaaagtagatttgattgtttttgtttgaaataaacacaaaaagtggtattattgtgaattgagattagaatagagttggaaggaaggggtggtggagatagcataaaaaaggggtggccacatggaaaaacttctatcttatatttctcataccaaacacatcacaaggacgatatagcatttactatttatgtatgtgtactctaaaatatggagttgatttttcagctctaaaagatttaaggtctcctcattacaaacaaaagttaggtacaagtttgtcacctattagggaatttataatttctttgcattttcattttgaaatatatatatatatttatatatacattttgctggaagtcaaaaaacatgaaaatattttggtcattgttaattaattgtttctatcccggtcttttcaactttgtcactttaatatgcttaatactatatatgggtgtgatatattatagattatacttatttatgttattaatttaatttgagacttaataataatagtatgttatttttttgtagtacttaacactttaaatagtgtttgtttagaaagaactaaaacataaaaatatgaatgagatagagaatagatacaaatataaatgtaatagaatcaaatttataatacatataaaaaattattacatttttttcctcatcttacattagaatggtgt

SEQ ID NO: 267599 - DNA, 1239 bp, Cannabis indica
aatatttgcttttataacaatttttttttttattttgtctttataaataaataaaaaattaaaagaaaaagaaattacttgacttgacttgatttgataaagagagcaagccagcagggattagagtactaaaatatatcatatttttacattaccttttttaaacggagaatttgaatttttgtcacctaaattttattatatactaaatcatattttttaaatttttttttactgttaaaatttttttctaaactattgagattattaaatttatagatttttgtctaattttattcaattttgctattttagtgaatatttatgtactaaaccatgctcgctacactttgatatctactaaatcatgcccctcgaactttgacatgtactaaatcatgttccttgaactttcattcatgttagactttttttactaaaattagacaaaagtccttaaatccaacaatctcaatagttcaggggatatttttaacggcattaaaagtgcaggagacatttttaacgaccttaaaaatttaggaacatgatttgatacatgtcaaaattcagaatgcaaaaattctaattagcttttaaaatatattactaaaattctatttttttctatttatatcatattttttacgttatataatacatcaacttaaattacaaaaattctacttatttaaaatttatttattttaaatatataatattaatatatacacatatcttatacaataataattattagggaaataacgataacctaactaatttaaatttgattgcaaattaggagtgaaaagtacgttgtactatttattatatattcagtaaatcgattgatgctaaagtttttctcattcccacatcaacgtcttctagtgtgaggggttcaagagcagtcgtctaagaatagttcggttcggctcaacaacgttctctatttcaaatttttgttttcatttattaatttactattattaatttaattctaattaatgttcttatggggttagaattataaggagttcattctttaattaattttaatgttgtgatggtgtttatgtgttgaaactaatttagtttttccattagtcttgtcttttgacatagttttttagtcttttccttctagttttttctggtttgagtctcgtcttttggcatgggttgtgtagctcagaatcatcatggtgctatcgtagaagcattcaagaaggggaa

SEQ ID NO: 267600 - DNA, 2076 bp, Cannabis indica
ggttggaaagactaatttggaagaagtcaaaggttactgggattgtcttgagaggtttttgtgcttggtcgggccagcaagtcaataaacttaagacttcgattttctttagcaaaaatactcccaatagcatgaaataaggtatcaaggctctattgggaatcgactcccctgaaggtaacgtcaaatatttggggctacccttattcaaatctagataaaaagatggagactttaattttattttggataacatgaaatctaaattacaaggctggaaagctaaaaggctatctaaagtgggtcgtgctacccttataaagtatatgggattatctttacctatgtatactatgcaaacaactattctctctagtcgcctagttgtaaagattgatggtattgttttgtgtacgttttgggtgggggttagagaagggtaataacgggctacacctaaaagcctgggacaaactttgccaaactaagtctttagggggtctaggcttccaaaaaactagagagatgaatcaggccttcctggcgaaatgggggtggaaccttctaacaggtaaccaattattatgctctcgaatccttgaagctaaatatcttaaaggaaattcgtggttttgaaagaacgtggttaaaaccagcgccatccttcgtaaaggcacttgcaaattggtggcgaatggttaggataccaatatttgggatgatccatggatagcgcataagaaatatttcctccctcattctagaggatcctctacttataaagcgagcaaagtggcagagctgctgatagataatggagagtggaatattcaaaaacttaacagtatgttcgatcatgagactacttcggcaatcttaaaagggggcaacccgactggccaaggaaaggatagatgggttttggactttggaaagtaatggtcgattctcttgcaaatcgacttgttggacctagtctttagaaagagcgactcattgtgaggccgctccttccatttggataaagttgtggaacagtaaaatcccagagaggctcaagattctatggtggtgtatcctgtccaaagttctcccagttcgttcggtgattagtaaaaggtttccaattggggatgatagctgccccctttgtcgaactaaggttgaatctatggaacacccgttcctttcctgtaatgtggcttttcacctgtggcggtcctttccgtggggtattttccctatatgtgatactgggattcgaatgtgggactgggtaaaattcttgtgggatcttaaaagcaaagacattaacactgaggaggttttcctttatgcttcattaattattgacaccatctagcgaactcgcaatgataaggtacacaataattgtcctgttgatgtaaaaaagtgcattgactctattcgtttatcttttgcagatcaacatgcttatttgctcccttgcctttcttcgagtttggaggatgtttggcttcctcccccccccccaaggattggctgaaagttgaattctgattagagtggggctggacagcatgtgtgctactgtggtcgcaagggatcattcactattacaaaaggccaatttttgtcagtgttaactgtcatttatactattcccatcggttcccataaccgacgtatatacaacagacgcaaaatgatatttttctgcgtcggttttggacagccgatatcaaaatatcgcattcctttataaccgacgggaatagtatttttacacctttttctgtcagtttgtaccgacacaaactttacaataataaaaaaaaaacgcacacacacacattcgatctagataccgtctaaacaaacatcgattaataaatcaaaatcagatctaaaagatgctcaaacccaaaattgattagtaaaccaaaatacaatttttacaaaaaaaacaaataaacagatttgaaaaaaatgctggaacatcgttagggctccccactatcaatgatgaacctgcaaaagaaatagaaaaatttcaaatttaaaaaagagagatcttgagagagagagagagag

SEQ ID NO: 267601 - DNA, 2353 bp, Cannabis indica
tattgatcatcattgtgatataaattaagtctttatagtaaacaaaatgttagataaagacaactttattcatattggtcattgtcacatataatctctattatatacaacacattcactttgatttcatgctacatcagtaattcgaaccgatattacttgcatcgaagaacgagcatcattaaaccgtactagcaaccatttattaaatatttcatatctttaatatattgcttactgtagtgattttaattttctgtataactataagtcacaacttcatatatgaataaaaaaatttctaatatttatatataaattattcaatattaataattaacattcatgtatatatcaaaatattcaagtttttattaataattaaaaaataaatttatacatttttcaaagcataaaccctaatactatatatattgcccctcattcttagttgtggacgcataagttaagataataaaatctcatatttcataacacaatatgtctttctttcctctctgagttctttctctactaggataaataataagaattttatcattaactcaatattaccaattagaagatatatcaagcaatgtctttatggtaagaatcaatttcaatagcataacttacaaaggttaagaagaaaagtcaacgttagaaaaagtataaggttgattctgattaaatggattaacattatatctctttatcagtctatacaagtccaagcgaaccaacattcaaatatgaatatagaaattttttatattcattaattatatttttaaaattaacatattcatttataatatatttatatcctctatttatatttcatatattatctaatatagtatttattgaatactttttttaggacataaatcttaacaattaatatgtaaatgtagggattccacaacatggaaaatagtaaaaactctttgataatttatgttgcaattaaaacatttaatttatttattgttattaatgtataaatcagccaattaatgatcaaatatgtgaaaatgaatatttgctttgtatataaaagcatcatccactaaataataaatttaattactattttttagaaaacaatgaactaatcaaaccaaattttgtagaactactataatccccttatgtatcattgctattcttacatatttattggtcattttgttgagtactcacaattctaaggagtaattgcatttatactgtaaatttctctacaagaagaattattattattattgtttacacaaggagtagtcctgatgacgtggacattaatatttaacacgtgacaagaaagatgacatttcagagttgagtagtcctgagtcatagcaggtcgacctgggaggggtccctaaccctgtgtccaggttgacttcgggaactctaaaatggaagttcagacttcaataacttgaatctaactcactatctttcagtattctataccatgaagacatggagcaacctaatccaagcttagggagctaaaattacacgaacttgcaattcagaagccaacctgggcacttagggtttcacccagcgcctatgtttatattcctaacttgggtttcattttctaggataatcttagtgcaaatgagtcaaaacttgcattgaaacataaactagacataccataaatatatttgagacatcaaataaaatcagagcaagttgatttttgagcatctgggcatcgggccccgaacacctagtatccaagttgacaatttgtcaatctgggtatctttcaagtgtccgactaaagattcgacttttgtattaaatctgtcttcatcaaaaacgagaaaataggtcattttgggggagaaataacaattcctaggcacaaataatagggcccaacacctaggctgaaaactagggttggccctgcaccttgggccatttaaaatggagtttttgaggaattctttgagcatcttctccatcttcagaaaatattgagattcaaccatttttggggaccaaacagaatttttgaagggccaaaaggaggacccagcgcccaggttgacacatggggctgggcacagcgcccaggttgacatattgtcaacctaggttgttttcgatcaagttcaacaaaagtgttccgggtatttttccatcataaaaataacaaagattaaattaatctcggggagaaaaccacaaacttgagtccctaaaaacagggctcatcgctcaggatgacctaaggttgggcccagggcccaggttgacaatcaacctgggacgttgccctcaattgctcaaataccaaattcgatgcgaccattgaatttgg

SEQ ID NO: 267602 - DNA, 449 bp, Cannabis indica
ttataaaaaattgtcctacatataatataattgggcaaattgaaaaaaaaaaaaatacttctccccaatgattttaagtctaaactataaatgtataagatcattaaaaaaatcaaattaatttattttttaaatactaaaataaataaggatgtaccctttttaaaaggtgaattatggaattttcctaaatgaattttctaaaatcaaatcattccatctataaaagatgtgttctgaattttaataaagtattaacatatgtctagcacttcctaaaactacatgcaaaaatatatacgccccttttattttttattacttctttatgaatatacacccctttcaatttctaaaatgggtttcattttgtaaaataatactagctattatgaaatcgtactttacggttattactgtaagtagcgtactgtgataaataatgcaat

SEQ ID NO: 267603 - DNA, 1615 bp, Cannabis indica
gctctctcaacaacagaggctgagtacatagcttgtactgaagctgtaaaagaagctttgtggctaaagggaattaccagtgattttggtttaagtcaaagacaaatacatgtacacattgacagccaaagtgtcttacacttaagtagaaatcaaatgtttcatgagcataccaaacacattgatgtgcggctacattttattagagaggtaattacaaatgggaagatcaagctggacaagatttcaactacagaaaacccctcagacatgctgaccaaggctgtcacaacaacaaaattcaagcattgcttgaagtaacttggaattctagggtagaccctgtcctaagattgataaatgtatttatttttggatgtgtgtttactatttttctttaactgtctttgtctttcctactgtactatcgatcaaggtggaaattatagttagttatgaccgttagtacagttaagacagttagttttgttagctctagtttgtcgatttttagttggttaggtgtagttagtttcaagtgtcaaaacctattggactatcctatataaagtccttatttttccacttgaaactaagacacaattcaattcattgtataagtattagaaaccattaataaagagctatattcctattattgattcataatcattgtgactagtttggttgtatggcattcgagttgtagaatcaacatattataaccattgaatattgaatgagagagattagcttcagcctttagatatcaagattcttggtgtgtttgacgattcgagccgattgagccattagtagagcttcaatttctgtaacagtgtacacatcctttcttgtagtaacagaggtgacaaacacatcgtactcagctaataatccattgaagatagcttcaatgtgatcttgaggcgtttgtttgtgatcaatagtagcaagaagatcaactatccctttaatcttgagaagaaaatcatttagtgagcctgtcattttggtgttgagaagttgagtcttatacaaccctatattagcagcattaagagctgtataatactcattaagagcatgccagatttgagcaatggtgtcacaacctatcattcgatttgtagtcttttcaaacatagataagagtaaccaagaaattagaagattgtcttgttgctcccaatcttcaaattctgggttgattgtgcgatttctttcatcagtggcagagagatactttggtggagctttattaggatcgaggtacaagaaatgccacttttaccagcacagttcgctactgcgctggtaaaaataacttttaccagcgcatttcgtaaactacgctggcaaaaaagtcaaagttttaccagcacacatttgaagtggctaaaatctaacttttacaagcgtatttacgcgctagaaaaagttatttttaccaacgctttcattttatgctgacaaaagctctaatacaaacattgatttgccacacatcagaagtaaattatattttaccagcgcaatactaaacttttgccagcacattttaaaagtgacatttcttgtagtgtatttttgaagtcaactccctttgatcgag

SEQ ID NO: 267604 - DNA, 1448 bp, Cannabis indica
ccaaacccactagacatgatatcacattgtcaactcaatttttcaataattctattagagatatatgaatgtgtggcacccgaataaatcaatatggtaaacataatacccctaacaaaatctcacctataactgtcgaaggaccattctctgcatctatttcggtcaaagcaaatacctgggcaggaaccataagactttatttcttggtctcaggcttttgtaactacgggcatttgtttctcaaatggcctactactccacattagaagcaggctttggactgacattcacccaagtggcgtctcttgcacttcagacattcggggtaagactgtaaggcttcgtttctaccttgacggaagccctggttaccctgaaaccttctatttgaactcataatcgatgactcaatcggtctccttttttgatcattgggactggagctcttgctcatgccagtattggacagtgtcttccaaccattcttcctctgttactcttttacgaatcaagtatttagcccctcagtagtgagggctaaatccataatttgaggataggtcttcacaacctctagttgtttggctaccataataacatctctggcaatgtactcttccaagcctctaataaaattggcttttcgtgccacttcagtggccacttcatcagaagcaaaattggccaatatgtcaaacttggtagcatattcagtcacagtcatgctaatctaaactaaccgtgtaaactctttcgcttgggtgacacgaatggaatcattataatacttctcataaaatattgccttggatgagttacaagtcatggtgttcaaattatgaccttgaggtacaatctccaaccatatttgggcatcatcacgtaatatataaacagcacattgtacatgatcattatcttcgattcgcataaagtcgaaaatagaggtaatcatactcatccaatgttctaccttcagtagatctggaccacccttaaacacaggcgggttttctttcctaaactgctcataaattggttccatacgatcccccatattcagttgtactacatgagatgcatgtatatgtgcaggacgagcctattactctcttgggtctcaaatttgctctccttgctgccttaatgtctcttgcatggcagcaaacatttgttcatagttttgaggcaagggaggatgctcttcctcaccacctacctcgagccttagctcgcagttcacacggctagatcatcgctacatgatcttaacacacctgcaatctagaacttccaaccattcagaattcaacaaatatcatgatcaatatgcatatgtcacaaacacatttttatcacaatcatcactatgtcacttttcccaacatactttataatagttcaggcaggtaatgttgggttttatgccctaaataaaactcttt

SEQ ID NO: 267605 - DNA, 698 bp, Cannabis indica
ttgtgattgttgtttacgcattggcttagtgcatttgatttatttttctacctattttaagatatagttttgggcaatcatattttccatttgttaattcaatacttcttctactacggagaccttttgttgagtcccatccgcattcctagttgtaagattttgtatttttggctggtgggaagtggtaccttactcttcattttttttcgaacttcttgagaggagagaaatgtacaatgcaagtattgggggttatcatgtttgtgttaggaagtgatcgaactgatggttgagcaactgatgctagaaatttttctccatgcttcttcatccactttgcttgttttttgtaacaaggcaagactatttgtggttgtgaagctattgaagaatcatctgaatcccatctggtgggttctggtgtaggttgattgtagctttttagtgcaaagtatctgactatatagtaaaaattttcagatgattggcctaatagaccgatgattttgtcgcccttttctagcttttgcttgagtcactttcctggagtgggacatcgtgagggctcatcatcttctagaccacttttgtaattataaacatccgagtatttatgcccgtttgaggattcaaaagcataaatttactttccttaggaatcaaagtacatgatctttgcatctgttggctggatg

SEQ ID NO: 267606 - DNA, 1454 bp, Cannabis indica
cgggcctaacccggcccgattatctcgggccgggcttgacccgctaggccaaaagaaggagtcgggccgggccgggccgggccaaagtgatgtcgggccgggccgggtttgtggcgggccgggccgggcccggcccgactgacattcctagttgtggctatttaggttagcttttattgtagggtgttttcagaggttgtttaaagttgaaattgattatttgttgttacttttgctggtttgtttgtgagacgggaaagtttgagcttatgatctcatacctggctcattaattgtggaattagattctagggttgtatgttgcttttagtgcttgatttttattgttgaatattattctaggtaatctagaaggtttggggaagattggacacgttttggacaagattttttttgtttggggttacctggtgaaaatcggtaaaccggtttgacatgtcttgtaaaactggtaaaccggtttagggacaggtttcctgaacaggacgttttgtcaattcgtgttattttctgagccttggttggttaatttcttgatggttagggtattgttatgttagataccaatagccgaacccttagttggaagtttgtgtttctcagattagggtttttgcatgttgtttacccgtttatgtaaatatgactagggcaacaatccagcacgaggttttccgttcatgtcagccaactcacttgaattcaaaaactaggtaagaatagcgtagaacatgttatatatgcgattatgtgtatgtgtgatatatttgcatgcttattgtgattcgtacgctacgaacactaatacagtagtggtactgagttcattggtatagcgtacgatcagtaaagagtacagtacggggttaccaacactagtgtgggcatgtacgaagtgtatacggtataacagttagtgatacacaaggtacgagacaaatgctaccaacattcatatagtaacgatacgtagttcatgtgatatagttgtgattcttttgtaaagaacgtttgtactcattttataagcattgtggataggtgtatgggtacataaatacaagtcggtgatatattatcgtcaaatgcttttcttattaagtctcttgactcacagttgctactttcatgtgtaggtaaaggaaaggcaaaggatgaacaggagtgagctccgagcttggatggggattgtacatgtcgggacagcgcgacctggagtgttcggtctcatgaaatcttgggcaatattttgtcgtcgccatgcgacatgtatgtaaaagtattttggaaatgttggcaaaagtttaaactcaggatcccgattatgtaaatatatatatatatatatttatgtgtgtttaagaagtttaataattttaatcaaagtttttaatttagtatgactttcaaagagaaccctttgattagcaaag

SEQ ID NO: 267607 - DNA, 1027 bp, Cannabis indica
tatattaaattatatgggacccggtatttttttggaccaataacgatattgacacatagaagagtgctagcatttctcgtcatattactcattactcatatgattgtggcgtttatgctatacgtggagcatctaatgatacaatgtctcctcaatgatgcagcaaataagaacataaaggtgtatcgagaacggtcgggcatgtatctattctattagaatctcagttgagatatcgatggttatgtgtatatatttttgagatgtagttatggtgatagttgtatattttttttgagacaattaggatagtagtctttttatcgagaacatatttttacaagggtcaatgaaattgaaaatgaaagtgacattaattaaaatagtttcaacaaagtatcgagagcctattgataaagtattgagaattatattaaaatgttttaattgcattttaattcctttaaaaaccatcgagaacttgttgataaagtatctacatattgttaataatttgattaggataaaagtataaaacaatttagtattgtgaacatgtcgacaaagtatcaatatattgtcgattatttgaacgggataaaaaacctcctaaattgttgatttttatggtccatatcggagttataaaagcgaaagcaaaattttgataaaataatttctatctaatataaaccataagctcaatgatctcaacataatgtatatagattaaatctaactgctgaaagaaatttaattacctcttgatgcctatcaaggtatccttgattcttttcgtataacaatcgaacatccaatcccaaaacttaattgaagaatccacaccttgatcttccaagtcagcctcaacactcaagaattgagtgaactattgaattttataggatgaacaaatttagatattacattatgtactcaactcatgagacactgtaataaaattaggattttaatctctcacactatgaatagtatgggcgtgtgagacaagagagagagagagaga

SEQ ID NO: 267608 - DNA, 1983 bp, Cannabis indica
gctatgtggtgcaggtaaaggcaaagaaaagctagatcaaccatgaggtggcagtcttctccagcaatgtacatattgacctcgccggcctgcgtgccgagttgccaggagttgttttagactggctgtatctgctgtgtattttgattttatgtttaaatggttgtcgtatatatttctttagcaaaactttttacaatagggattcccggaacacactttttatgccgttataatgtccatttttagtgttttattttagtcaagtttttaatattatcacggtttttaataattaattattctattagtattaaactagtttataaaatcacacacgtggcgtccctatagattagggcgttacataggtcgatatgtacatttgtcagagaagacttctaactcatggatgtcctgatttaccctcgcccttacctgtaccacaaagcacccagagtcacaaagactaacaaaattaaaaaaaaaataatcacatgccaactttacaaataaacagcacaaataatcatatatgtataacaatccaaaattacacaaatatctgtcaaataagacaatttatatctactacttcataaagtaaccctacccgttgttgcctaattgggcaaccctaataagcctaaccagcatctaatgtcaccacctcaccaccgttacctaatgaggtaattgataagtagaaaaaacctaacaacggtctcagtatagagtaatgactcttacaaatactaattactgtttctttataatcaataataatcggatcacaaacgataataatcataacttatcttgacatgcaaagtggcacaaatgtatttttcttacctcaaatctctattcaggtgtgccagtaaacttaagtggagaatagatgatgatcttgggccctatacacaacaatgataaattagttgacaacatgatctaactcattctaagtcttaaactcaaaaatagaagtttttctatcgataaatagtgtggtcgtaccgtaaatatagagaaaacataaaaaacaagacttcgggaaaaagtctctgaaaaacagtaggtcgtttctctaaaaatggtaggccattttttgagaacactatcagaaaaaatggtctgctcttttctctaggaaaccaacacttcgagttttaaacttcataaacccttccaaactcaaccaatttcaaccaaattacacaaaacattctaaaaacattattataacagatagcacaactcaagagcaacacctaccaaaattttccattagaggtcaagcttgagttccatttcgtgatccgcaagggaaaatactaggtaagttgtacaatcccacatcgcctggggaaggtcaagtgtgatgattctgaaattgtataagtacaagactacacagttaaagaggacttaaatagattgattggcactacctatattaacaaggtgcatttttttaatagcccataacaaaagaactccacaattaagcgtgcttgacatggggtaattttagaatgggtgatctcctaggaaatttttctaaaaagtgtgcgtgtaaggacaaaactcgcttgaaatactcttgttggtcggtagggccaatcatcagtctaagaagtagccagagtggtataagagtcataaatttgtggaggaaaacccaatggaggcttaaagcggggatcttacttaaaatatagctagaaattgactttaaattgtctacacaactactaaaatctgaatctgaatagccaataaatcaaagattatcgacatgcttatacacaagcataaaattctttattctttgaaaatatctcatgacttttttggctgcaacccaatgatcatgaccagtattagataaatatctcctaagaacattaactacaaaagcaatgtaaagtctagtgaaaacctgagcatacatcaaactccctactacacttgcataag

SEQ ID NO: 267609 - DNA, 729 bp, Cannabis indica
aaattttaataataaataatatctccgaacaaaataaaaaaaaataattttaattttttataattaaaaaaaaagacaccgttttaaatttcgcctttaagtctctcaacacattaaaaccgacctaatataagaagctagtcttcttctttctctgttaatgaaaaggctctgtttcactctctctttcctcttcttctgtttctttctttctgaaacactaacacattgaacaacgtaaaaattaagaaattaaaaagtttgaaaagaacacgtattgatacatttcacttaccctctataattaaatattttacttttcaaaaacaattcgaaaagtcattaaagaaatataaaaaactcaagatttaagaaagtcacgaatcgaaaaaatttaaataacaatcataaccaaaccttgaacgattatatataaacatataacaatcgtccacaatcatcaaattgcatattaaaatttcagtagaaattatagttatagatctgaaaataactgttagcaataatgttataagaatatttatatgaatttgcggatgcggaacgactatgtatagtgaagactgaagaaactcattgattcgatcatgaaagaaagatgaatcagaaaagaaaaataaaataataaaaaaaacaaacaaattcttattcccagtatatgttaagcaaaaaagaacttgaaaagaatttttaaattttttatatata

SEQ ID NO: 267610 - DNA, 2059 bp, Cannabis indica
aaaaaaaataaaagatcgcataaaagatagttgtgcaaaatttagatccgacctaggaaaaaaaagattgaacaccttgaaaacgtgggcatggaataaacaggccgcgaccaaggaatgggcatgccgcagcccgcatcgtaaaaagcagacatcatcattgcacacgggccacagcccaggaaaggtatgtcgcggcctgcccctattctgaagcaaaaaaagattacttttctcaacgtgggcctattgtggccgcctaattcaaaaatgaatgtgacttttagcatctgcaatttttctatctttttagtccctcaatggctatataaggagtgaacttcagtttatttcgttaagcaattcagaaggaaataaaaggcagaaaaatgtgtacgaattttagagattgaatcaaataatggaggcattctacaggttttcaacatttttttcttctctattttcttctcttttcttcagttaatatgtgtgatttgctataatgaacatgagtagctaaacacttaattagggtctagaaggatattctttgacatggttttatggttctaatatcattttatttaccctcaatctctatgtattctatttcattcgtctttaattacttttaattgtctgatcaccaattaagtgtctgtaattttatgtgagatctgagaagtgagtgtcacttatgctatagtgaaactgagctgaattttgatataggacgagagtacctgtatggtttagatagcttatagggtttctgtgtttaattcctttgcatgtataatttatcacgagagtagaaaatttgcatgtaattgaggtttagataactgagaagactataaattaccactactacaaaaaccacctttagaggcatttttttagggctttcagcgtcgtttttggcaaaattcgctaccgacgctgattagggtgacactgtacggtttaatttaatcgacgccatatatactcctatgacgtcagttattagctaataaccgacgccataggggtatatatagcgtcggttcctagctaataaccgacaccatatatggcgtaggaaccacgccatatatacccgaatttcagtttttttaattttatataatttatttaaattatatatttattaatttatatattatgttaataatttaaattaaaaggacatatttaattttttgaaaaggtaaattaatatttaaattaattttataattgaccaagatacataatttcatttcatagaagtaattaaatattacacaaatattgtaaaattagtctaagtattaacaagttaataaatctaactacaagttaacctaaagaataacctacggaagaaaaattcttggacctttcagcatcaatcgtcatcgtgaatcaccaccatcaaccgttctatccactcttgttgtattgacaacaattcagtttttgaattgtattactgcttatcccaaaactgttaacaaaagtaaaaattcatattagtttatatatatgcatattatttgttattataataaatactataatcaataattaaaacttacagctttatgatcttgtatgtaacggttggggtttccacgtgcgacgatgtcagtcatgtatttcaaaacataaaaaccacattctttttatttggttgtcttggacaatttgctagttaaattccttgtcacgggccaagatattcatgtgtttcccctatatatccaaatgcactgtttgaaaaattatattagcatttcaaccattagttaattaaaatttgttacataaatattcaattaattattaccttcccaacaattgagtaatttgttcgggaacttgacgaccatgtatagggtctaaatggataattttctttggcgtaacaacccctagcatccaatgcgcactagaaaattatattgggatataagtaagatagtataaaataatttgaagtcataatatagaaatgagcaattaacactaaagaattaaatagtgtttacccgatattccaaggaataaa

SEQ ID NO: 267611 - DNA, 521 bp, Cannabis indica
agttcaaagacaaaaatcataattaactaaaatataatataattaatatgtaatataattaatatgtaatataattaataatttatataattactaccgtaataattactgagtaatctccttaagtatcttgttagtaattatgtcattttctgatttctatagtgttttaatatgtaaactaattttcttactagtgaatattttttttcatattacttaaaataactaattctttaaacttctatataactttttttatttttattatttttacccaaagtctaaatttttgtagttacataagctgaagggaagaaacattaccacaaacagacaatatcatcatcatcatcaaagaaaataaaaaaacattttgaacattgcctttcttcattttttaacatcaaataattcttttgaaaaacaaaaatggcagccatctaaaattttcataattcttggctagctttgaaagaatatgtaacactaactgtgtgaactatgctgataatgcttta

SEQ ID NO: 267612 - DNA, 818 bp, Cannabis indica
ccaatttctcaatcccaatccataccaaaaaatttcactcatcaatcttcacttttcatcaaaaatcacaccaaaaatcatcaatttcactcccaatccaaaaattaattgttcttcatcttcaacatcaagctttcaagaatattcaacaatggaggtggagtagtggctttttcgggtttgtaagtatcactctctatcatatttgagaaatagattgagtatttagggattttttgtgaacatagtgattattttggaaatttttgttgatagtggaattgttgggtttatattgtggatttgaattgttattggtataatctatactgttctggtgattttaaaaatttaggaaagtaagaattttaaggagaagtgctgcctaattttgtctagaattatttttggaaaaaactgtcattgtgatattatggggcctaagagaacaaggcacattgaacaagggggaacatcatcaaacccgccacctacgggttttgattgaacccggtttctaagtgaggcggcacgaatccggttcatgaggcttaagttaggccatacatctatgatcggtgtattgaattctctgagaatcctttgaggcgtcaatcaacgcttgaaataattcgtgccccaattgaaagaatgaagtggggcagttttgtggatgctaggggccgagccaatgtcaccatggcatgtgaatttcttgccaattgacccaagcgcggaaatggggaagtgaaggtgcggggtaagaaagttcctgctactgcaactctaaaaatttggccttttagtgacactattta

SEQ ID NO: 267613 - DNA, 3282 bp, Cannabis indica
aaaacctatttcaatataatctgattttttatcaatagaagattagaagtcatttatatttacatgtagtttttatgtttatggtttaatgtgtacatgttctgttaagtccaaaacatatagttattcacaaccacagttatatcaacacagtggaaggtaattgtgactatatgcttcaaaagttaatgtcccatgattcatcagtgcactggatttacactgatgtgatagtcagcgataaagcttacttacaccttcgataagtgttatgttctttccataacattggtaaagtatgctagtattggatgtatgaagtatacattggactgggcccgatattgatcttggtaaagatattataatcttaccattgtatctttctaagtcaatattactggttgatcttagatcaaaagatcttaatcctaacatagttaggttcgatctcaagaatgttatgtgagttctttaagttgttagtcaaagcctataatttggttcgggtcacacgtacagctttggaacatgatagtataattgaattggagcgctaaggatagatatgaaatctatagcttctatctagacatagaaatgaaatgatgattggcttcgagcttggcttaatagagataaatggagatcatgggctctatgggcttctgttgctttgagcttttgtcttcgagaactaggacttcgagtttgggctcgtgatggagtgtcatatcatagagctccctatctttcctatattctccagcaatgtggggtcctcctattatgacccctagatgtcctgccacggatggtggcatcgtatctccattttagcctcctcgcgcctaggtctgattgtcttacaaataacaatgctggtggggagttttatgccttattgagtactcaatctccctcttcagattttgacactcattagtgtcgtggccgaagttggtttgatatttgtagaacttcgacatgtccctcttgaccatctcccttctgatgggaaagggcttttggtattagactgttccctaagtggccatgaggatggttttaggcttctctgttaggagggcaaagcaagtatacttctcctccttgttggtgtcatgcttgtttctagtgtttttaccactagaagtcttggcagagttgctttgtctgccctgtgcgccttgtgggtcatgaggctgttgggtgcctcatgagtgcttgctgttaacatgccctgcccaggcctgtcgtatggcttcctcaagtttgataaagtcatctgctctattgaggtactccttcatgttattggtggatatcctctggatatctttctagaagtcgcttagtgagagtatggcccccagtatggctgtatatcggccttcttctgtaaggcctttgactttggtagcctcgaccataaatgtctgaatataatccttaagagattccccttgttgttgtttgacttcgataaggtcttccagctgtaattgtacatgtcttgaggacgagaattgtgtatagaattctcgtgacaactcagcccaagagttgaatcttaacgcgatgagtttaaagtaccatttttgggttgtctccaacaatatggctagaaatatgcgacaacgcacatcactagtaaccttctggaggttgagcaaagtatttgatgtgagccagcgagtcctctcgtctggtatacatcttccatactatcattttgaactttggcaagggcaaggcatttatgtatgcagagatggtgatccccttgtccgatcaagttcaaggtctgaaggcttcgggccagcaatgccttggatcatgtccctaagttagttaattgcgcttgcacaaaaatatctattgccttagggacttgattgactggcccaccttggggaggttgtagattctgaagagatgggggctagctagccataccctggagagtgtatggtgaaaattagcaaggctctacagaccgtggatggccattcctaagtacgaaagttggcctacgtcggccaagcttacacatggttgttatgcttagtcagctagacatacattggacagggtctggccacccagtactcctccatggccagccaaacctacaaagggcagggtttggccaggcgtgatgcttctttagccggccagacctacattggacagggtttggttgccctagactccacagttgattggtgttggttgtgtgttgcttaggggtagatcacaccatttattggagtttggtggatctagatgcctgaagtgatcagtttcacttctcaaattgccattttgggtgtttccacccactcttgatcctcgtcggttgaagatcatcctctatgcaccttgctccccttgtggaggaagtgatgtactctgggcggccattggtactcatgttgatggctggctggccagtggctacacaatgggggtgttgttaagcatgagatccctggctggccccccctatgctactggttaccgggatctagctgttctcgccatttgacctttgaggaaaggtttgtcctccctctattaggggaagatttgtcctagttcctcaggaacttcacagcagtcttctttgaagtggatccctaaggagatcttggcctcgtctattggttctcttattgaaccgtcttattagattgctggcctctcgattgccgcgatctaattttgcttgatgagactgatctactcctagtcatccatccatatgaagaattcgcgtctctattgagcaaatacatcgttatcagcagtgtgtggttcttcagttaggcctgcatgacctacaacttcactgagtttggctaactcaaggtcttctcctaggtccaggttaagctcaccaattgctggcttgcccactctcgggctggtctctctggtgtaagactggagttgaggtcgagttgttgttctagggggctgtcatccctatgtcctttcttcagtgggaggcgacaatggtgtgtctactcttagaggcgtgggcctaccacatggatccattgttaggttttgtgctctaaataaaacccatttcaatataatcagatttactaattaataaagatcaggaactgtttatttcatgattatggttaatgtataaattctattaagtgcagaacatatgtaaatatatgcatatatatttgttcatgattatagtatgttcaaaagtttaattctcattatttgtctgttcactggatttagactggc

SEQ ID NO: 267614 - DNA, 850 bp, Cannabis indica
tttttaaaatattttataattttataataaaacaataatgttattttagtcaatacacattttattctattatattcttatggcaaaccaaacacaataattctgattacaatgcttattctaactacaaataatcaatttctattagcattcttattccattacattaccattactattaccattaacattacattacatcaaactaaacaccaccagtgcgtagggtatatcataaaaataccttataataattaaaaaaaaaattaacaacaataatatataattagataatataatttaatattattagatagtgaaataatttttttaaaatcttatttattttattttttattacattaaaataattaaattagctgagtgaaaaacggctaaattacttagctatattataaacacaagaaaagagcctatatagatatagtagtcgtgtagtcaatattgagagtgtcaccctaatatttaataatgggtcaagaaaggttggcgaattatgtagaaaaatatatgatatgtagagactagactatagagccaaaccaaaaagaaaaatgagtgattattatgcctaaaataataccctcttcaatcttcatcacttaattattagtatacacatttgtagtagaagattataatataaagtctttgaagtatacgtgcgtacgagacaattcaacttttgcaaacacaactatatatattattatttagacaaaagtttatgcatgcagtcgtccaagcactcatatttatatataaataaatatatatatattatatttgtgttttttctttaccttccatatatataacatagagacag

SEQ ID NO: 267615 - DNA, 650 bp, Cannabis indica
atttttataaatgaataaaaaaattaattataaaagtataaacaaaaattaaaaaatctatttaaaatgtaattctttaaaaaaaaaaagtgatataatttaatttatatatattttatataaaataaaaattattaaaataagttacatttataagtttttaggtaaaaaaaaaaatactctaataataataataattgaaggtttttggtgagcctgaatttagagtgaaattacgaaaataggcgttgaatttgggtcccacgtgaacacgtgggaatcgtccggtcctgattgttttaaccttttctttgtcagacaatgtgggaagacttcggtggtcctcgttaatccacgtcagcaattcatctctctcagtaagtccacgtggttaggttttttttgtggtcccctttttccacgtcattttttaccttaatcttttttttttcttttatttggtaaaaaaagtaatttttatatttaactttctttttctaaaattttaatgtttttattttaatatgtctaattttataaatggcttgttttttaattttgtatgattaatgtggttagttttatttggtgattctacaatgcccctcatgtattggtgcacccttaacttgtttcggcatccagaaaaa

SEQ ID NO: 267616 - DNA, 2229 bp, Cannabis indica
tgaaaatccctcaagtattattcgacatgctggcttgaaaatgagacctctattaagagtacccttaacatacctcaatactcgcttacagtgagcaatagttggtgattgcatgaactgacaacaatggtggaagaacgaactggtgtcattatgtgagttttagaattattagagtgttgaattggaggatgtactcgagtgagtggttgtggtaatgtcaaaaaaggtagatactgacaaggtggagaagagttttgttatggtttctgagatggtgagaataattttgagtaaggaaaattattttcatcaaaggacacactaccagttatgtagatgcggccagatagatgaaggcacttgtaccctttgtgggaagggttgtagcccaaaaaatatgcatgtacttattttgaaattgaacatttgagtttgatatggtcttagaagggaaaagcaagcacaactaaacacctttagaaagttatagtcatgtttcttaaagaacaaccgttcaaagggagttgcataatttttttttttgaacaggaagtctattcatcaaataggttgcagcagtgaatgcatcccaccaataagtgagaggtagttgggcttgtgcaagcaaagtgaggtgagacccgtttcaatcacatgtctatgctttctttcaactcttccttgttgtttgtgggtgtgaggacaaggttgtctaaacacaatgccaagcttgttaagaatgggtgcaagagggcgatattcacctccccaatctgactggacagacttgattttagttgagaattgtctttcaacataagagttgaattgtaagaatgttgtagtggtgtgtaagatttggcttttaaaggaaatatccatgtgtactttgtgcagtcatcaagaaagtgtagaaaatatttgtacccttcaggcttgtgtgaatgatttcaaatagtgatgtggatttatgttgagacgagaaaatgtatttgatggagtttccatattgacatgcatgacaaaagtaaggatcagtagtagcaacatgtaaatgatgtaagattttattcaacataactttattggggtggcttaatcttttatgccagagatttacaattagttgatttttagtacaatatttatgatgacattgatttatagactcagacacactaacaatatatccagatgactggtgaaagtggaaaggttgagatctgttgctggacgaaatggtcacttgaaagaaacagtctacatggtttaaccaaaggatttgaaaatccctaaatatcctaattcatcatgtgtgcaagttaaataaagccttgtatggacttaagcaagccccaagagcttggtatgacaagttgaagcaagctctattatcttgggacttcaaaaagctctaataaaaagttgatctttctaactaagagaaattgaaagaaagaaacaaaagaagagaccagtaatattctgtaaatagtttttcattacattaaagtgtacaatttagaggtatatatataagacccccatacaaagcaagaactagaatctaacaacctaacttactacacaactaaacttataacaacctttaactaacaccaatttagtcataactgtcattagtttcctcaatatgtatggtttgttttgttccatgtgcgatagtttggtttagtcttcgatgtgttttgtttgttaccatatgtaatagtttttgctgtatggttgcttgtttaagattgttttgagttcatctcaagaatggtataagattgcagttacagtctccactacaaagatatcataaataaaattttcttcataaaataatattttgtattgtttttcaatatttaaataaaaattgtcatttaatgttattattaaatagcgtgtaaattaaattttatatatttatcttttataaatgtatttttatttgactcattttgttatttacgaatactaaaacttcaagaacataaattttattaattatatttcttaaaaatttaatatattattaatttacttttcataattttaatattacttatttcaatattttattatgaagtcactaaatttgtttattttgtggtttttgtctaaggatcaatttttcaagcgcaactttttgcattgttggtacgattaagatgggctcaaaggcgtggctgatctgctgtcggtggtgggactgta

SEQ ID NO: 267617 - DNA, 1099 bp, Cannabis indica
aaaattgtgaaaagtatgattcatacaatcacgataacgatgaccttttaccaccattatgaacctataaatatcacaatgatgtatagaagaagggacttttagaaaattctctataaatataaatactcattaataacagtaactcgtggactaaagcttattaatgctcaaactatgtaaaatttatcttctttaatgctcattaattacttcaaacatctctaattgatagttgtcgaattttttggtcaacaagttgggatatgatttattaaatttgattaatctctcaaatcttatatatggtgcaagttttattgactagtatatatttgcattagaagacttagctctagtagttggacataacaaattagtttcgatacaattgtgacattctgagtgaaaaatatctttaaagataagttttatcttgttaaaataataattgtgtcttatcattaatttaaaaatttacaacattattgttctatagtggctaatcaatttttctatatttatttattttgtaggtagttttagtacaattaattgtttatactggatacctcttgaaagtgatcttaagttattttttctaaattttggagagataaattagtcttatataagtcatgttatttgtagcgattcatattctgactttgtatatttttggctagacaattagcttgttgattaaaaattcttttacatattgacgattatcaaaatatgattcagatcacttttatattttgtgtacacctaacattactcatataaaaagtttctaataggccacaaaaaaaagtttattataaacaaaaatcactcgcctaatttataatttttttatttactataatattattaattaactttgataaaactttacattctttatttactatattgctattatttaaaaaataaaaattatattaaacaataatttgttcttatatattctcactaaaatattaaatgatcatcaataatcatgattttttttactaatttatattttgtgcattggaatacaatcataaatagcaaactataaatatgacaaaaatttatttttttaaaaaaa

SEQ ID NO: 267618 - DNA, 842 bp, Cannabis indica
aaaaatatatatatatatagttatggtaatttatcaatgatggcgtggaatattcatcactattcattgttgatgattcactactgagtttgggggttattatatggggggcagagctttttgactaggccaccccttttaaaccacaagaacctctcataagatcattgtctctggcccaacccaacctatcttcaagcgtgcggtaatgtcagacttagctgaacgaaagtttttttaaaattattattattatttgcttttgagtttttcttcaaatttattttttaacttcaaaaaataaaatggggtttcatttttaccaatccaaagttgatgtcaaccccacattattagttagcagaccaggcacgaattttagaatcattattataatatatatatatacttatctctgatgaaaagtgagaagtagtgatgtttatctgataaaagcttcagtttaatttcagaacaccgccagttttattttttactattgtattgattatatttaagcctttcaaaccgttttgcataaagaaagaggtgatgatatatatattgcagtatttatggttgtgatcagaaatgccccatttatgaccattgcgtcgtcctctatatgtggattgcaaattaaaaagcctgaatattctaaagctcgacaatcaagtgttgaacagttacgaaccaaaaataaataaataagtaatagacagagagccacataattcctttttcagggttagccacgcgcatgaaatatgcatacttctatgtatcttcataattatttttgtaaagattgttaacaagtcaggttaatgataaaatctctg

SEQ ID NO: 267619 - DNA, 835 bp, Cannabis indica
aaagttcattgtaaacaaaaaaaaaaaaataagttaacggcaaagaaaacgtttaaatttaaaaaattaagaattgttctgttggcgttaaaaaaaaaaagtagaatcgttaaactaagaatttcgatatataaagataaagatatatagttataataagaataataagtgtttttccttctgaactttcgacactttgctccctaaattatacgagttattaataatatttccccataaaatataatagttacattagcatgccccttctataatgttcaatttcttttacatttaaaaattagtattttatcccctaaactttgagtaatattaaattttgcctcattttattaaaaaaattaaatttaagaattataattttttattaattctaaaaatattaagaaaacctgataaaagtattaaattaataaaaaaatatcaagtttactttaaaaatgtaaattatttctaaaaaaaatattttcaaactttattttatttataaacacatatataatcaaaaccaaaattattaaaaataatataataaataattttaaacaaactaagattttgcaaagagaaaattaaattttttacttttacaaaatcattcttaaaaaataaagaaaaataattaaaaattcaataaaaatataaaattatttaaaaaataaatagaaattaaaactaaaaaaatattacgtttacttaaacaaatttagataattaaagaaaaaaaaaattagactcaaacttgttcccaaaaaatttagtttttacaaaaattaaattttaatatacttttttatatctaaatagattattt

SEQ ID NO: 267620 - DNA, 1594 bp, Cannabis indica
agttatctcaattcggaactagttgagcattattgtggtatatatattctttttcgaaatatggttaaaactagctgtaactatatcgagatctttggatatgttggctcatttatagggtagacaattgtgggctcaagatgcatatatatatatatatatttacattatttactaatacatacatacatacatattccagctcataaagaaaaagaaaagtaagttacgtacgtatcattcttaatccatgaatggactcgttcttaatcattattaaataattaatacatgatctttttctcataaaagatctagtagtgttaattatgatcatctttttctcttaaaagatctagtactgttaattagttatttatgacataactgattattaatttagtccattccataatccatggatattgattttattcgatactgtagtactatatagctagctagtttctctttatttattaattaatttgggagagattccaaatacatttgtatacaatacagctattctttcctaaatgggaaaaagtaaataaagatatagttgtttgagagaaatccttattgcgtatactgaatgaatttgaccaatatatatatatatatatatttatatattgcaaaaataaatccttctagttttatttatttatttttttcttttttgaaagaacctctaatcacatggggaattccccttaccttgaaacaaactagctgcttggctagagtttttagctcttttaaacaatgcttaacaaaggttattacttttaaaaattaaataaaaataaatatttgattttttgtcctgaattataagctctcgttgaattcaaaaattcttgttaaaccatataaatcataataaatatcccacttcagttataatatagtacttataacttattacaagtatagttacaatatgagggtctatttaataactttaaaatacttgaaacttaatgtattaatactaaatatataaatattagttttaagaatgcatataatattcttataattaattattatatatattactacttatgtatataagattttttatagactctttagttcaccatattaacgttatgttaatactacatcaaaaaattatttaaaaaaaattaagagaatgtaattgcatgaatttctttactataattttataaattactagggatttttacaaaagaaaaaggtttattacaaaactctagtgagaatccaattaactgaaattttaaaacaaactctgagacaactcctatattctattttactaaaaaaaaaaaaaaaaaactcctattctaaatttaatgccaaaataagcttaccctatactaaaagaaaaagtatactccttttgtcgaccaaatggtagaaaaaaatgtattctcttctaacttattttcctaataatacatatatatattgaaagcaataatgaacaaattcattgaatcctaataatataaactatttataaatattttttttttgtgtttctttgtccgtttctttccggcatcataatatttttttggctagtggtagaaaattt

SEQ ID NO: 267621 - DNA, 1741 bp, Cannabis indica
gagacaaaatttctctaaggagggggtagttgtaattccctagaattatgtaaagattagcaaaaccctaattagataattatgtattattgaggaattatagtattatataatttaatatatgtgaatttatatgaattatgatatgttaagaccccgttggggagcgagggacattttagtaattttgacctgagaaggggtaaaaaaatgaaattaatttactaacatgcttatgggactatattattatacagtatacctgtgtggtcttttttaggtgtgttctaacaggttggcgctgtatagtcacaaccgggtattttcagccgaaccgggttcgtgcccgaaatgcaatttgaattagaaatattggaattttaattattgatgactaatctaaaaaattattcgcatttatttatgtgtgaattgtcataaattcccttgtatggataagtgtgaaatggccctagggaggggcattttggtcttttggccataatttaatggatttaataaaatgaattttggcaaggaaaaatttattttctggctatttttcccccaaaacccaaacccctctctctctctaagcctcttcattctcaactttaatatggagagaaattgtttgaatgttgctatctttgaagcttggaatttagagaagttcttgttatatttaaggtagtgtttctactgattttaatttagaattcttactcaatttaatggttgaaagcatgaaattaattgtagttgagcttatgttgcatgtggatgttttgtgttgagtgaagcatgtttatacttggatttatgattgtatgtagttttggatttttcttaagctttagatgcgattgttagagtgttttctagcttgaatccatgtgtttttaatgttttggttgctggaaaaataaggttgaatcatgcttggaagtttaaggttgtaaataagacgttgtcttgaattatgttcttgaatggagtttgatgttcatggatttgcaatctaaattttggggttattcttgtcaaattttaatatttggaagggtgttttgaactcccagtttgatggttaaagtttagttgttgtattggaaaattcggttaagttttgggacgtattggataggtttgggagctgattttcaagtttacgcttgctggttttcttggtttgaaacccaagtgtcgcggcatggccttgggcatgccgcggcccgcccctgatatgagacctgggaattggttctaggtgtcgcggcaaggcttttgcatgtcgcggcccgccctagagtgtctgggcagattcgagtgcatctttggaaattcgtaactttgtgatccgaactttgttttgggagttctatatatggttggaaagctcactcttagctctatgtggttatctatattttaaatgccatgaatatattttatcaatgttaaattaggggttaaccctatttgtgtaaatcctagtattatgactaggattactagcacctggtcaagagcaccaagggatttggaatctctgctattgcgggacatcaggtaagacagtatttagcacgtagagttacgtgcggtggcacttacattggaaatgatttatgtgagtatttagtaactgtgattagggttatcacccgaacatgagcggtttaatagccgaagcttattaccctaatgatatatgctgtataaatgttatgccatgctg

SEQ ID NO: 267622 - DNA, 1386 bp, Cannabis indica
tgtgacctaccctatcttccataataccgtactgctaagccataccataatatgactcatgacagttaatctggacgtggaatctaggataccagttgtcaaacttatgagccatacggtcaatgagaagggaattcgagatataaaaattaaggcaggagtcttggaaggtggctaatgtattacgtttagccctaagtacagtaggacaccaactatattgattacctcgggatactccttcacgggactcccgagggtcagtattttgaaggtattgtgcttgagccaatcgatcctaggcctggtcctcgggcggtaatctattgccaagaagaatacttgggcattttgtaatcacaagtatattctttatcagcaagaaggcccaccgatcgcaggttaacctcattaaaaaggaaattgcatgaccgaagatcgtagggaagagttaatagggacctgtgcctactaacaatctcaggtataggagtagaccttgtaaggagagctgtcaaaacagacaaaacattggtcataaacttgaaaaacaaagattgatgtaaatgatcaagaagagaagaatcactgacaaagtttgcaaaacatggttgtgccaatgggggaaagatcagacgtccagaagaagttgttcttgaaggatactttatttggcaagtctacaataatatgaggcttgataggatgagtaccgagatagaaaaagccccctgcagtgttcttccttgatggaacgactttaactaagtaaagatactcaatctctagtggtgtggcacacccccaggttagaattttgtataagactttcaaactagcgagaatccagtaggagatgggattcaacgggaatggagcaatgccaatgtgatttatgtagtccttgaagtagtctcgaagaggaagcgtggcccctgcactgatatgttcaaggctccaagcacccataccagtcgaacaactggtgctagtcccaccactagtccctaggttactacttcaaaaatgcgtaagggggtgacagctgaactcaccctcccgtaccgatctaacttggcatgattgcccaggttcgatctcacaggtctttagcatctcgctcgtgtagcctaagatagaccgcaccttcgattctatcaactaagcctcaaaggtgacattggggtcctggggagtctttgatgtaaatggcttgggaggcataattgcaaaatccaagtcacctggttcaaaaacaatcgtgaccttgggtaaaaacaaaggctttgcctacagttaataaaggacacgctcgatggttctggccagctacttctcgcaagaatcggcgtttgccttcggagatttcttgcaagaaacgcctgt

SEQ ID NO: 267623 - DNA, 884 bp, Cannabis indica
aaataaaaattcttagttgaaataagtttattattatggattaaattattttactgacttctctaacaattctttaccggagaaaaggtttgacttgtgctcgtaaatcttctgttttgtttgggaaaagagaaagaaacttctcttccaagtaaaatctttgtttctagtttttcccttacatcaaaatagattttatgcgattggtaattataaaaaatgtatttattttcttaagtgaaaagcttagtgtagaaagtgaagtcattgataataaaggagaaaattaggtataaggttgcataaaatatgtcttatgatttgattcttttattttcaatttttaaaaaatatatcgtgttttctaaatcaaaacatgttgattgtcgataatatacattagacattaaaagtttgaaacagtatattcactagaataataatacaaaatttaccatgtttgattgagaactatatgttgacgcaaatttagtagttcattattatgggctgatagggattaggtttatgataaataattccaatttcatatttggtggtaataatgttgactggacaaataatccaatgttatgagatttatagttgggtagctgtttttataatttttattaaattaaaataagtaaattttgatataaaattataccaataataacactttaaaataaggggagtttcattttttttttttttttttttttgacaaagtgattaaatcactcatgaatttacgacgctcacgttcgccaccggcgctggaacctcttcgaaccaggatagctcatcgtctaaccgcagagcatgctttgcgaagccatgggccgctaaattctcagagcgagccacatgggacaaaactg

SEQ ID NO: 267624 - DNA, 868 bp, Cannabis indica
aatacccctagagtttaataaaatctctggaattgagaaattataactctaatactcatttctaaatattagggtccacaaataattaattttataaataatcataagagtaacagaaattagtgctaattgcctttactaatccaaattactaaagcggtcattacatgtatcctcaaatggtgatgaagaactcataccataaccttataaatcttttgattaaataatcaatgacaggttgttctcggaagatcaattctgagcaaacaatcaatcattgactgttaatggtcatggtctcatggggattaggcacggttcttgagctaggtggtgggtgacctcgtcatgcacggccaacgtccaaaggacccgaggtctcatgcagtggtcgtggttagtgacggcttggattccataggaattcgagatccttgtcgtgagtactatatcgtatcattacataaaactaatttccaaaaaataaattacataaaatatctattcccttttaattgctcacacaatttttttagaaaaataaaagcaaatcttacactaatttttacaatataattaacaatttacatctcacatacattcttaatagcattaccatccattgacatacatatatataaaatacataatatttaatatatatatatacatagtgtaatcactctgttataatttttggttttatatagctaaatcaagtaagcaatggaataatattttttgattatcatcgtaccacatcctcaagatcaccatatatgtatatacataaaatctgaaataaatagataaaaataaaatttacctcttgcagcctaacaaggtatccttatttctttttgta

SEQ ID NO: 267625 - DNA, 1310 bp, Cannabis indica
caatcaatatatgaattgatcattaacacatcaatacattcatgtgagcaaaagactttgttagcccatacgaagtttgaaaactcgagagtcaccatcaagtccaagtacctactaaagatctgaatctttaggattagtccatatggacttaaaatcggcttcacaccatctaacttctatttctttggaaaagttatcaatataggtagtattcggtaaccattaaaaaatcagttttctgtttaattaatcagaaactaagaacaaattataaaattttgttaaggtgaataaagaaaaacaaaaaacaaaatagttaccgaacaagcctatagttttttcgcgtaaaagaatcgagatcttcatgactataaaacagatggatgataatgaccttacttgttatctacgacaacaaaaccttttagtcgtcaagggtgtcggtgcgaacagggttaggggaaggggatgggcaaaagggatgtatcattttgctagaatgttttattctgtttgaaatttttgacatatgttataatttattttgataattttcaaatagtaaattaataatattaatttttcagctcactaacaacattgatacatttatttaatttatgtaattttttaattgtatatatttttattataattttcttcaatagctagaacaacttattcttccattttaaattgatttgagtccaactaatctattgaaatgattagttgatttgagtccaacttattctttccattttttctttcaaaaaaaaaatctattgaaatgattacaaacaacatcattacatttacctaatttgtctaattttttagatgtaaatatttttattataattagagagtgtaatataaacataccatattattcacgtgagcaaaaggcttcattaacccttacaaaggttgaaaactcgagagtctccatcgagtccaagcacctattgaagatctgaatcttcagaattagtccatatcgactgaaaattgacttcacgacttctagcttccacctccatgggaagcttatcaatatagattttttcgcgtaagagaatcgagaacctcgtgtctctgtaaaaagtatggatgataatgagcttacttgttatctctggcaacaaaaccttctagtcgtcaagggtgctagtgtaaagagtgtgaagagggttaggggaggcgaaactaatgccttgtccaacctctcttcaatcaagttgtccaactacaacccttttcccacgtaaaaggatacccttttctcccttctcaactcatgttga

SEQ ID NO: 267626 - DNA, 536 bp, Cannabis indica
aaaaatataaaaaaaaaaatttttgaagtgtaaaattgaaaaaaatcctattttgaattataaataaagaaacttctaattagggttaggacttggaagttgggagttgggaccatgcagtttctttcccaccggccggcgaggacaattttaatgtattaattattaaattgtttcaatatataattaaattaaccataactatttaatataattatattttaaaatcattcaatgaaactccttgtttacttatagctttgacttattgctttgttgggatactattacataaataaataactttacttaataaaatttccctaacttctccaaaataaaaaaattgtcaagagaatacttttcattttttcacctccaacagaactttttataattatagaaagtaaaagtcaaacttaaatcaaattggatcataaaacaaaataaagtttaaataatatgttttatttgtgtctcttttattttatacgtgtttgaaatataattttaaattatatttttttaaaaaagaa

SEQ ID NO: 267627 - DNA, 1603 bp, Cannabis indica
tttttttatttaaatatgagttttattaattaataatttaataattgatagacggcgccatcaatattatttggctcaccccccaaaataaagaaaaagaaaataccgagaaattatttcattacatatacatatgatctcttattacatagactagaaatatagtacacttttttatgaatgatgcaatgggaagtacctagtacaaatcaatattattgttcaagcaaaggatttgaacgcatcacatgatcgatctggaaactcatccccatggttcatttcgaaccttcaaatgtacgtacacgcaaaaatacggaacttatttttcaaaataataaataaagaaactgatcagatgcaaatttcaactgcaacctatacagacagaagagtcgcttgtacttgacaaaaatacggcatccaagtactttaaatcaaacaaaatgctagaagatcatcactggcatattagttaatcttggtgcagaccttcctgatttgaccagctgaaccggtgagaactccaacccttcccatgttgaccatggaaacaccaaagtccgtgaagaaagtggctgttccggaggctgtggcgtgattcacaacgtaagccttagtctcactgtcgtcaagaagcgcagcatctgatgtgaagagacctcttctcttggccacgaggctgaagtattcaacatcaaaggtcttgaaacttcctgggtccatctccactaatgtggtctgatcagcaggcttgcacttcatcttaagtttgtcaatgtactcagaatccaagctggggtcggtatcgccgtttccagtgaagttgtaaagacgattgttgaaggcagtgcagtgtgaagttccaatggtgtgtccaccttaatatagtattagtaataattaattaaatataagaaaaatatccaaactagctaagtctttaatattatttaatgtgattatttattattttattcgtagtgtagtattagtacctgagagcactgctaagtcttttacgcttaaacctctgcttgtgaagtcattttttagcgtagtaatgtttgaaaaaggtgcaggaaggccaaagagggcctcagttatattcgaaactacaccgtctcttcttccagtttcaactgcccaggttggtccattcaactgaaatacattttagatgtataaataaatataaatgtgagtgtatacgtaagatatcattacatatttaatatacatgttgcgtacgtacttaatttatgccatatatttggagagagagagagagagagaattaattaattaattatatatataggctattacaaagccttaccgcagccaccgaatccctggctgctaaggccaatacatcggcgcacgaaaccactccaggacactctttttctaatgcaaccttaatttgtcaataatttggaaaccacgaaggctcaaattaggcgtggcaaatttctcggactggttagtggcggaattcaacagcactgaaccttcacaaccctgtggtaaaaaaattaaaatagcaattatattaatctgtatgtacatatatagagcaatatatttaaaaattattatt

SEQ ID NO: 267628 - DNA, 1382 bp, Cannabis indica
ccaaaatagtatttaccttatatataatgttattatgaaacctacaataatgatgtaacatatttttatagcaacataaattaatttatgaagactataattttttttttggcatctattcatgtctataattgttggatgagctacatttatctcatgtataagtgttatcgttagtgtttaattaagagaattatatgatattatgttatattataatgttaaaataaatatcttaaagcataatacataatcacaatgtacctaaaataactaataatatattttttttttaaataatactattttaatattttaataaataatagctctgatactaatattatgttaaatacaggtttgatagtactaatcatcgaaagagagtttatttcacaagtttatggagattccacctcaaaatcatatggctacaaggagagtaggtccttagccttataaagtgatcaactctctcttattttatcaatgtaagacgttcacgcgtattgtttgaaaatacatgtgagatcaactttaattggcctagagtaaatataatatatggtctcaactgtgagtctgactcttataccatattaataaatagagaattgctaaaaggtaacactggtgcctagcactctcctcggtgtcatatcgctattagtataattaagtatcgagtcctatataacttaagaaaataacttttaggaaatatcactaaccaatcgtgcaaaacaacttataaaagatgttgagcaccactggtacccaatagcaatgctcactaaaaataagagtttctcttattgaatgtgtatttgagatatacttgaatgaattagtacaaacgaattaatagacctcttatatataagaaagtcttaactaaataccaaactaaacatcatgttgtaacaagtaaagtggtaataactaaaaagaattaaaggttaatttaaatttttgtcccatgaactttgacatgtatcaaattatgtcctctgaacttttcagaccgttaaaaattctctctaaattattaagattattaaatttgagaactcctatcaaattaattttactaatgcgataattgtacatgtagttagcccaaatggctattaaataggaaaatcgtgatttaaaatatgaaaaacagtaacatgtgcgtggtttgtgatgctcaacttgacgtcatggacctcaaataaatgacattagcttgcaacacataaactaatagtaaattaattaaattaaaaacaatacaaataaaataataatattgacaattttaaaagccacattatttatgtaaattagatgcaatataaaactatccatgtaaacttctttgattttaattgctttgg

SEQ ID NO: 267629 - DNA, 649 bp, Cannabis indica
ttttgtgggtctcctttacctataaaaggagagctctcttagcttattttttacattcagaaaacaatctactaggtcaggacttctctctctagtttctctttctataaattggagctttgacacttagcctttttctgtaaaccatcttgtgagaaataaactcgaaatagacgtagttccattaatgtcgcgatacaagaagttaactactataaatttattgtatctcttatataattacttaacaactatttcattcttatcaatctagcgagcggatgtaactaagaaatcttagtcctaatttttgagtcaataatttaaaattagtgttacagttatatgataaattataaaattagacataccacttcattcttttacataacgcaatataattgtgactagaagtcaaaaagaactattacctaatacaatactttgctaaatgtattaattcacaataataattaaattaatttttagtccctgtaaacaaaaattgtaattaaaaatatattagcgaatgttcaaaaacaaatactaaatactttttttgtattcaaaatataaatttttagtgattaccaaaattgatatttaaaaaccaaaaaaaaaaatcattaaaatatatatctctaatatt

SEQ ID NO: 267630 - DNA, 544 bp, Cannabis indica
aggacaaacaaacgaaattgctgaacaatataatgaatcatgcaaatacatagcaaaaacattttgatctagcaagtattactcctcactcctacaactatgggaactattttggtttcatttggcttactctgtagcttctctaacattatcaactttttcattggtagaagtaatgacagcaagaataacaaacccgccaagagccacaaccaataaaccaagagaattcaccaacatagcctcagttgaatagcgtgatatcacttgattggtctgcagaaatgtgactttttctaagataccagtagtcacagtagcaatggcaagggcataaatataaacacccaagaacacatgccatggcagcaaggtagctctgctacttgcagccccgcccggataccaaaaagtcacgaatccagcagcccactgtgccaaagcagaagaaaacatgatttgacattccataagagtaactccagaagctaactcaagttagaagtacataagaaaatgtaatgtttgggagaaaatgatccaa

SEQ ID NO: 267631 - DNA, 1072 bp, Cannabis indica
ctcttcattcttctcctctgaacacgttgggcttttgactgaatgttgtttttgagtttttttttttttgtacaacaatggaggttggataattttttatccctttttgtatttggattttcgggatctgagtagtttttctttgagatctacatttttttagatatgattttcctagttttggaatgaaaatggttgaaaatggttgttggggttctacagctgggtcacgaagaaggaggatcccctctgtttttttttttggcaggtatttttgtaaataacaacttttactttctatttttgtttattttcttctatgtaggtcataaatgtaaattttttcctattttcagtttatttatgagattttttttttaaaggtttaagtgtctcaactattattatttttagggactaaattctatccactatcattttacttgatttttaagtttaaattttgacactaaaactttctaaattactaaactagtagtaaatttaaagtgtcatctgattaattattaccataaactgcttgtgtgtatactcttattttatattggtatattgaatattattatacaaaaatcaacaataaaataacaagattataacataaaaatacacaaaaaaaaaaaatcatattttatgtaaataaaatctaaaaacaccatgcaaattttttttttaatttttgtgtgtgttttttaaattatccctttaaaatacttcatctatttattaggaactcttattttatttcttttggggcatataatacaagttacatattttcttagggcattaattaacaaaataaataatatattatataaaaggaatttagttcaaacaaaaacaaactaaaaaacatgttaatttttcaaaagcaatagtatcacaaactataactactttgtcttttaaactaaattaggagatgccaatatgaaaacatagctattagaattatcaaatcttgtacaaaatgcttccttgtgtgtttagtagtgtcatctttacaaaaattagcaagggagaaccaaaagctccaaataatggaaca

SEQ ID NO: 267632 - DNA, 2139 bp, Cannabis indica
cccctgctcctgtatccccaatgtttattgcttcctgttggtcatttctttgctgctggtgtgtctgcataagctctgcttcaaccaattcttcttcttgtagtgaggcatatgtgttggttactgttatggtagcaacctttgtttgatcttttggtttctctatccatattttctttgctggtttgaatccgtcttcatctacggcctggtctgattcttgtacagcaactttattgggttttttaattacccattcagccttttgcttcccctccttgtttctacaatccttggtctcatgatctatgcctttgcaatgcgcacaagtcgtgggtttccattcataagacacaaacaacaatgtcctcatcattctcatcttcaaaccagatttgctctagaaattcttgctgcaatgacacttcaatgagaattcgaggatatgtcaatttctccattgacttagtaaagccatccaccataatcggttcaccaacttgactgataatcttgaagagaacttgttctccccaatatttcaagtgtaagttcttcaattgtactcaaattggcacagtgtggatgttttctttcttaaaattaacattaggatcccaagctcgcataatcaccaggcgtttgttgaagaagatgtatcctcttgataaaacttgattacgatcatcaatgcttttgaatagaaccaagagaataccatgagaaatcatccccaccttgtttatcttgtctttccatacccgcctcacgaaaccatccaagattgacattgggggattagccccaagtacatagcagacaattgaaggagtccagaaatctacttcttcttgcatgtcctcctttgtgattttgactctttgtttggatggagaaccaacaaatttagaatctaagttcctgattatattaccaaatctgagtataggaggtagaacttccttaccccgtgaaacggcatttgcagacatggtctgggcttctcggaattgcttggcttccatgaagtgagcaaaatccatacgaattgcatctctcttgatgctgtccctcgcatccaaagcaagggaatcaacgatttccttctccacattcatcagttcgactgtatcagcttcctcatcagagaaagctaagggctcaattccaaggacttcatccatggagttggtcttcttcacatcagcggtagaatcagggccgcgcttcttcttcttcttcaccggagatttgggcttactctgcttcaccctcgtctttgcgatagcatcagctcaattagctgagagaaagctagagagagaaaacccttattttatattagtttactgaaatattattatgtcaactaaatatttacagttaaaatataataaaagggcaaaataataattttagtctctattaattataaattatctataaagagtcattgatcaatatgatataaataatagataatttatatcgtagttatattaggtacatagaacattccatgaaatcaagagtagaatttcgagtccatagtagagtcatgaagaattaataagttaaaaattttatttttaaattttagatctatcttattaggagcttgaattttatggacccatgatccccgcgaaacctaggaatgtttaatactcaggaccgtcttaaatattttggaggccctattctaattttaaaaattgggtccatacaaaaaaaaaaaatacaatttatatataatatttttaaatattattatatatggtatatattttacaaaataccaaaaaactccaataaaattataaaaattattattggttgtaaacaaaaaataataagaaaaaaaaaataaatagcaacaatgaattttattttttttttgcttaaaagcaataatagaattgaaaatagattttgagaattgaaatagaaatgatcaatgataagttgttagccctttaaaaagttgggttcattaaaaaataatggaaggacattaaaaaaaatatatatatattgggccctttattttttgggaccctgtgcaatagcacatcttgcaccccataagggccacctatgttaatactaattgattatttaatcaattagtattcgcat

SEQ ID NO: 267633 - DNA, 2149 bp, Cannabis indica
cattaacatatcaagaatgatcctcaaaaaatttaatcgacaaaatctatgtaacagttggtccacctcaaaattaatttagagattaccaataaataaaactttattgctacacaatttaataaaaaatagttaatgtaaacaaaaatgataaaacaatccatatattatcaaatattaaattaaaattaaataaatatgatataaaattattgaaatacacattttgaatttaaacaaacaattttctatccttacacttccacagaaggtttgtttttggttaagttatttgtcagaagagaaaagagataagtgattttttttctttttaaaattaaatatatttcttttccaatttcaattttaaatatgtaaaacttaatatataagaaagacatatagtattttggatatttagaaaaaaaaaaattagggttccgaatatacttggctgatttattacaaaatacatattcctaccaaaataatatgatccaaattaccattttttctaaatataatactataaggtttaaataacttttttttttaaaaaaaggtttaataagttttataattagagttatttgttcatataaaattaatattttgaaatataacaaattaaataacggttggtgtggtatactttttatctatttcggtataaaaaaaattttgatctaatttttttataatattttgtatttatttaaaaaataatttaatattttaaaataaatatggaattatttaatgtgaatgggcacattttccatgccctcatattaaaaaataataaataaaaatgttaccccacaacagcaaattttcccaaaaatttaagttacaactatgaaacttcactttctattagaaaagcttcagaaaaaaatgtgttaatcattttatttttactaaagggaatgttgttttcattttctacacctgtaaaattgtaatgatgctaataagaagattcttcacatatttcttagttgattgagattgacattgaaatgtgggttattttaaaaataatcgattttaatttttaatagtgtaatttacggtataaatataaatttaatttttaattataaataaatatttaaatttaatttttggcggtaataatacttaagttatattttttgaactctgtaggtacctgaccattaaatattaagtcattatccacgtttaatctttttattggtatatttaaattaattattttaaaaataaaaatttaatggtttggaccaatcagaaattgccacatgacaatttacttaaacttaacagtcaagtacttttaaaagttctagaatcataacttatgtattattaccgccaaaagttaaacttaagtatttatttgtaattgaaagataaacttaagtatttatgctgcaaattactctttttcaatatatatctttaagtaaatagtaatataagtatttaaaatttaagtttataagtggcataaatttaataatttatcagtgttttagagaaaaaaaatttaaggcatttttttaatttttaattattattgtatgcatgatttactcttttcaatttttagaagaaaaaatcaataataattgatgaaaaataaaatcaatattctattaaaaattattgatgaaaaacatttgatttttccaagcaaaatacataaacattaatataaaaaaacaaaattaatatcattttcccctattttattttgtttttatgctagtggccccatatagtttgtgttgagggagaattgtgttgaggcattaattgctccaatatatgattttcgaaatatataacaacaaattgatagcatgacatatatacaatataacatatatataattctttttttaaaacatatacaattctattagtctattatgtatcctattgatatgattggtatatactatgataaatataagtcaaatatttaggaactatagattaggtttgctattaaacattctaataaaataatatattttggttttgacatttttttcaatacttgaggctagctcaagtgcctcaagtagccataggagagtgcgtgtgtgttggaggtcctgaattcgagttttaaattatgcatgattgtaatatataa

SEQ ID NO: 267634 - DNA, 1340 bp, Cannabis indica
  modified_base (19)..(19): a, c, t, g, unknown or other
ggatcggtagcctgaatcncgtacgtgaatgccttccagctctcttcgaaactgtctttggatgtggcatagagcatcttcgagcgaattcgagcagttgaaggagacctgataaaatgttaatgcaaagaacaatacataagattggatgatatcactcaatgaaaaccaatatgaaaactacatagaaacaaagctttgtgttaagcttaagaccccaaacccgaactttgttttaagatcccctgtgaaataaacaagtcatctaatcaaacaaattgttcatacacccgaaaaagcattgcacaactaatctataaaactgattagggatactccttgaaatcttgataacaaacttattttaaacatctataatgatctaaaatcattagagtatgaaactcttatagcgaaagcaataactaaaatcctataacaggttctaatccaatgtcatcatgcaatatttttcaatgaaaactacataaaaagaaagctttgtgttaaaacccaaaacttagattcttatgcaatttttttcttttgaacaatttcattgaaaatataggctataaatatcataaatgaaataaagactgacaagttgttcatccaaccgaaaagcatgcacaactaatctatgagtaaaaccgactagaaacactttagataacaaacttgcaaaaactaatagcaaagatctaaaatcactaagagtaagaaactctcattaaaaaaaacaatcatagtgactaaacaaattgattatagactaaaatcctagtaacagattccgatcgaatgtcatcataaacaaagtgaaagagatcgtaaagattaaagagttgaaagctaaccatgcaatgaagaaaatcttgctcttttgacagttatcagaggtgacaaaatcatagtcataaacagcatatctgcaatcattctccggtaaagctgcagtgaaatcatcatagttctcagctgggccaccagtcttatcaaccaaaatttcccttttcttctcatcaaccttaaagatcacatagcggtgaaccttcttcctttgcaattccatgaaagcattcttgctgtgatcagcaactcccattccagatgaagcatttggcttcaagaaacaaaatcaaggcaaaattcattcaaaatttcatatgaacttgaaataacaaacatcttgaatcaatggctgctgaaatttaattaacagtaacatcacttatgagcaagaaaaacaaaatcttacatccaatttgaaccaatacaagtaaaactggatcatcaaaataagcaagaatacaaattttccgaaaaacaccatttat

SEQ ID NO: 267635 - DNA, 2554 bp, Cannabis indica
ggactatcactaaataattaaactatcacaaatataacaaaacttgagcaacactttgtcaaaaataccataaggcttgaaaataaatatgaaaaaaaaaagtttcaagtttcaacaatacaataatttgtgggcttaggttgggattcacatattggacctaaataaatataaaaattagtatgtttataatatgcggtgcggtttgaaccgcatattaacaattcaaaaccgaaaaccgctccgcactgcgcggtttaggaaacattcaaactgcgaccgcaccacaaagaatttcaaaccgcttttttttgcggtgcggccggtttgagcagtttgatgaacaccctactatccgacatgatacatttcttgtcttatgtttctatttgatatgttaaaagaataaaaagaatacttttttttttttttcaaaataagtaaacatgtaagcaaattaagtttgatgaccattacaaataacgttattggatattgagaaagcctcagttcccctaattacattttgattaaaaataaaaactaatgggacaaagctcaatcagattctggtaggagggactcgggtgtgggatgatgaaatttttgagaatttgttcaatacttttgatccacggtttattaagagtattgtattaaatgataatgttggatcggatcattggtattggtttaaagagatttcaggggtttattcgatgaagagtacttacaagcttctctaggtgcttcatgataggtggttggaagataataattcgagcctttggagggcattatggcaactcaaaattcctcctaaggttaaagacttactctggaaggcatgtacagggtgtttaccaacactgacccaattaaaatgtcagcatgttgatgtggttgtcatttgcccggtgtgtcaaggtaatgaatcaatctccacattttggtcgagtgttctttagccaaagcttgttggcagcgggttgatggggctatttgcaacctttcgaccataaatttttcaggatggttttatcaactggttataggattttcgaagacattggtttgtcatgttgcgatgatttgttagtctctttggaaatccagaaatggacttgtttagcaaagtaaaaattctactgcaaatggcgtggtggctgatgcattgtcttactttaatcaatggaagattgctcacgaaaattctgcaaacacaatggattccagttcttgtgttcgtgtggagcattggttggttcctagtattgatatgattaaagtcaatgtagatacctctgtcactttcagggctttttattttgtgattggaggattggcctgtgatcatcatgaaactgtcattgatcattggtccaaacaattgcctgaccgtgtgtctcctcttttggcggaggcatttagattgaaggaagctttgagttggatcaaagaacggggcctagatcaagtattgttgttgagtcagattgtaagagtatcattgatgctctgtatagttcgtctcctttattgtcaccttttggtttagctatttctgattgtcgtactttaatgtttaatcttaacaatgtttcttgtgtttttgttaaataatttgcgaacaaggcatccaattggttggcgactgtcgcttgttctttcccaagtcgtggctatagtggggggttgtccctactactttttaagttattttggtagatgattagtccggtcgtgaataagatgcatctctttttgtcaaaagtaaaaacccactttgaaattgaagcaacaaaattaaaagatttaaaaactttcaaaaaattacaacacaaaaaaggaggcatacgactcctacaatgagctacatagttatcaattttccactttagctttaatctcttgaaaactttaataactatgtcagaatcacattttacaataacaaattgtaagtctttctctattgcaagttccaatgctaatagacaagatgtgacttccctactaagatcattagccaaatgcagtcgcttggtaccaacccaaaatcatattccctatatgatctcgagccaccactgcaagcatcatagcccttatctaatctccacatcgtagttaagtttgatccggcccacacatagaggttcccactcagtgaccgcaggagaaggttataaaggagacaaaagagagtgatcatgcactgtatgacaatgaacaatagaattaatataataatgtatgctatatagatagttattgtgtacctcatcatttcttgctcttcaaatagtgtcaactatgagtctatgaatacggtttttgcagccaatgactgtctttttaatactgtttgcttgtcagcttcttgtcttagtaaatgtataaaaaatgtggttaagactagaattattggctttcattgtaccagttctaagaaaaaagattgctatgctataaatgttgtaaatagctggtagttttttgagttggttggctgctgccgccagcttttgttttgtatttggttggttctttt

SEQ ID NO: 267636 - DNA, 1192 bp, Cannabis indica
attatgacaaaaaattaaaataaaaaattatataaaattttcttagaaaaaaataaaaaatatatatacatgagttagaaaaattataaaaatgaaatcaaaataagtattgaaattaacataaaataatgtgaggaaaattctttaagaaaatatttaaagtaatttttaaaaattatttaagtttatatttttttaataataaagtatatttatacttttatagggtgcaaatagaactttttttaaaaaaatttatttacaaatttatttcttttttttttatataacaaatttagttatgctttatgagtattagagtggcactatcttcaacgcaaaatgtaaaatttatgttaatttgatacaaaaagtaaatttatgttatatttaccaactatttatacatatacacaagatgtaagataatataattattattgatcatcatttaatattttattaaaaatctataaatattattattgtttatttttatttcctaaataataataataataataataataataataataataatatagtaaataaagaagataaaattatgtaagggtcgataaatcttaataattagtggcattgtagtaaataaaaaagtaaatttattgtgcgccaaatttagaacaatattatatcttatgctaaatttagcacaacttttagcatgtgccaaaattaaaaattgaagtattatttttctttaaagtgtaataaaatatagtaatgcattactgtaatgatcgctttagtaatttggtttagtaaaaataattagcactgatttctgttatttttatatttatttatgaatttaattatttgtggaccccaatattaaaaatgagcattagagttataatttcttaatttcggagattttattaaactctaggggtgttttatgaattatatatgaaatatgttacttttgtaattttgctcgacgacaacggaaaatgcgatgaatggctatattggtcacatgggtaagtctagaaccttatttcttagtgggaaatattttagagaaaataaaataccaggattaaaaagggttatggaacttgaccattttacccctagctttagaaatgccttagttttaagtaatggacattttggtaattgtctaaggtttggggttaggtggctgccttgtatggtgaca

SEQ ID NO: 267637 - DNA, 907 bp, Cannabis indica
taatgtcactttcgtcagtttataaccgttgttattttgcgtttgtaataagttgatgcaaatgtcataacatgttgatttaaaaccgacgtaaaataagtcccgaactgacaaataaattttaaatggttttttgcgttgatttcaagcgttgaattagatcaatcaaaatataagtattgaacactacaagtgtcacataggaatgctttaacatataatggtgttacatgatataagtgtcaatattgatggagacgtcctcattttctatgtaaaatcatccgatggtttccaaaaaattaggaataacttacaatgctaaaataaaactggaaaaatagataattacattggtatagtaaaaaaacaagtatgcaggcagttgattattagaattaatttttcacattgaaaattattaaaaaaatttgcaatacatagtaaaactacaatgtacaccattgtatgtaaaagttaaatgaatttttgtaggtgtcgaatacaaaaatattactactaggaagcaaaaatgactcataatacagaattttccaacatatttaaacgctaggtgtcaagctcttattccacaaagaatataaagaggtttccagtgtgaacttgttgtgtgtattgggtccaattaatactgttcaatgatttttaagctcggaattttgggtagagagtttggataagaaaattataaagcgtgtctccatcaagcccatgtggttgattgccacgtagccatgtttgatgggtcccacagccgacaaatgattcaatgcggttaatctccaaagaggtgaaaggtgttgaccccaagatttgatagcttttaaggaataggtttaaaagtcaaacaactgttcataatttgattttttttttcttttttttt

SEQ ID NO: 267638 - DNA, 1077 bp, Cannabis indica
aatagttttgatacaaataaaaaataatgtaaatatggggttcagacttcgcaacacatgacttgaactaacaaacaaatctggagctccccatcaatccaaatcaagtacaatgcaaatacaaaagaataaaagcatgaataatagatctaaaataatgcctctttaacctcgtcatctcaaacaactttccacaagaccaagttatatgatcagtcgtaatagccgaatgaatgcaatcaacaatctcctaccactgaaccagagatgatgagaaaatgtttagaaaaatgattcaccatgacctccctcatgtcatgctccctatcaatccattgactcatagaatttttcaattagtgaattgtattattcttccgtcttgttgtggccttaaagtgaagaatactttgtgtttcgatctaaataaagtattcttagagaaaaattttgaagtataaattttcaaattctagttatagcttattttcttaaagttacatataaagagtattgctattagaaaaattcaaaaccatttaaaatataatattttattttacttatcttcaacatcatttagcaacattacttctaaaagtactctaataattaacactttcatttccaataatatttcacacattattatttaatgtattatttattttaattttataaagaaaatagagaaaaataagtataagcatcaatgtcaagtttttgcatcaatggaaaggtgtagaaaaagggatgaagaatctccaaaatcgaatcattaatgcaatcttgcttgcgactttgtacaacttgtggaagaatagaaatagatgcattttttatttgtattgtactgctccttgtcatttgaccttaaatattaggaaggaggttcggctgagaattctgagcaaggggcattttaaagcttgctaaaagaataattttttacttaatgtaattaataggtggtagcttttgttgtggagctgctagctgtagcagttgcctctggtttgttgttgtggcctctttgcttgtatcttgcttattttttgaataaagattcctcttttt

SEQ ID NO: 267639 - DNA, 858 bp, Cannabis indica
gtctaatgtagatttttttttagacatttgaattaccataattaaaagaaaaattactatttaccacattaaattaagttaattagcaatgtaatatatataaatatctatatgttagtcaaaattaatatattcaagattgagtagtgaccattctccctaaacaaatatcccaattgaatctcaatgtgatatttattaatattactagatatatgaataaatatgtatatgtaataatttatattaatcattatacaaacttggtcagactgcttgctagttttgactaccttaccttctactctttagtcattttctttgaatgcttttctcttccttttcattccatatcataacacatctccattggctactataaattttcacttagggcgccccttttgtaatattatatataatatactaggtaactaagccgcgcttcgcgcggtattgtttaacttttataatctttatttgtacatatatttattatacttatattgagtgatatatctaaaatataatattttaatttgtgtatttaattattatttataaaagtttttacattttattttatggtgccgttaaaatacattctctacaaaaataaatgtagaatgagaactataaaaaggattgtcgtaacattatctttttttaaaagttaaaaactgcgagatttatataaaactattagtgatagaatatttctatataaaatgtttagataagagaattattttaataaattatatggatgtaaaatttataccaaaagaaaactcataatccatatgactaattatttccataataaaatatttatttatcttactattttgcgataat

SEQ ID NO: 267640 - DNA, 541 bp, Cannabis indica
ttttttttttttttaattattaaaagtataaaacaattatcataagctcacaaccattctcactgttaacgcttttttctcccctttattttacaaaattgaattaacagaacaaatttttgatactttttgttattttattagatttgacttcctctattaacttaatgtataattaaattcaaataaattggatcaaaatattgagcagcatcttctatttcatgcgtggttttgttccttttttttaaaaaatgaacatgcgtggttttattcgatccaataattattattaccctataaatataaaagaaaatttaatgacaatattaaccatgttgcatgcataccaccaacacttgactttatttcattattcgaagaaattcataaaataacaatggtttgaggaagcttattagctgaccttttaatacaaaacaataataaaaataaaaaatagtactaaaaatcataaatatttaatattatgtttattaataattagtagagcttacatatgtatagtgagtttccatgc

SEQ ID NO: 267641 - DNA, 1268 bp, Cannabis indica
gaaaattttacggtgcactctttaaaaatagatgtatcaatatatttttttttcttcgtgttttcatcatctgttagatagtctcacattattaatatgtgataatagaatatataagaaaaataaattactcttttcattgccaattaattttatgatagaacctcatttatcttaaaatcacctaatattatcatatacaaaggtatattattgttctatatggtgaaagtaatggtatgttaacttagtttggatgcttttattttgagcccgtacatttttaagaaagtatatatataccaagatattttcatgctcaagtaatcaatttattttaagagttatatgcaaatattatatcaatggctaattatcaaaaatgatttatgtatattttaccatgcccaagtccaaaacccaagatgtttacagttaattaatcctaattcattgtcaatgagaaaaagtaacaaaaggctaggcatcattataatgttgaaatgttattccatagcaataattttgtaatgtctggttgactcctaatcagacaagttataatgataaattaacactgttagttgggatctaatttttgtctgcattttattatgcaattatttgtatatatttttaaccctttttcattaaagttggttgtctaattacagtgtcctgttatgcatgtggttgtaccttttccattctctcaagactcttgatcagaaaaactaaacttgtttgagaaatttttctctctactggtttctttttgttgtgtctttaactataaatttttgtggaataatattacatactattaggaaagagtgtatttagcatgtttggtttgttgtaatcaatattgtaatggaatcatgattacaattccaatatttagtttgcctttaaactcttgtaatgacatttcattgtaatcactaagtaattacattcccatacctcacgaatcttcattacaattacttaaaatgactatcttacccttattttatactttttcttactaaagtaaggataattttgtcaatttactatctatttcaatattaattctaataacaaaccaaagataacaatcaattcctattacgattcttattctattacattactatattccattccaccaaaccaaacaccacctaaagtacctaatcctatactgatgtgacgttttataattagttactaattttttatattatttattaaattaaaatatataaaaattaatattaaaa

SEQ ID NO: 267642 - DNA, 2143 bp, Cannabis indica
ttagggatttggatatggtttttgagaggaaaagagtgtttgatgagaggaaaagtgttttagagtgattggggatgagtgatatgaaaaaattagaagaaaagcgtttttatgagatgagaatggagaaatttcggttatggggagggagtttcggaggatgtgatttagggttaagaaaggggtttttgattttgaaaaaatcgtttcccccttttaaaaagcgtcagggcattctcgccgcggccacaagtagtctcgccgcgacgagatgatggtaaaaaaaccgtctctagaattgactttatggccgcggccatagtagttctcgccgctgcgagatagccttcaaaaattggctttctgtagtccactttatggccgcggccatggctgtgctcgccgcggccactgggcaatgcccagaaaaaaattatttttttttctttgaacagtataaaaataaaagaaaaccaatattcagtttacaagtttaataaacataaaccaaaaagaagaaacaagaatagtaataacaactaaaaaaaataagagagatcaactaaaataccatgaaaatttgggtttcctcccaatagcgctgtctttttcgtcatatagtcgggcgttgacagagttcttcaaagaggcgccagaatcatggtggacttggcttgatcaaaatggcctcccaagtaaagctttaaccgctgcctgttgactttaaaagtctcggggctttcgcctttcagttctacagctccatggggaaatgccttcaccactgtaaatggtcctgaccaccttgactttaacttaccaggaaacaagaattaaaaagtaaaacttgctgccaggttgaaactcctttctgactaagctttggtcataccacttctttgttcattccttgtaaatctttgcattctcgtaagcctcatttctgaactcctccaactcattcaattgcagtagtcttttctctcctgcagctttcaagtccatgttgaggatcttcatagcccaaacggccttatgttctaattcgacaagcttttccaaacaccaaccgatatggtgacatcctgatcagtgttttgaacgctgttctattcgcccatagtgcatcatctaacttttgtgaccagtcttttcttgatctatgcactgttttctccaaaatcatctttatctcccagttagaaattttagcttggccattactttgtggatggtacggtagagcagttctatggcggatgctatatctcgagaggagtgcttcaaactgtttgttgcagaagtgactcacttcatcgcttataattgctcgggcagtaccgaaccgagtgaatatattcttttgaacaaagagaagaattgttttaccgtcattggctggtgttgctgcagcttcaacccattttgaaacatagtcaacagccaataagatgtacagattgctaaaagatgaaggaaaaggacccatgaaatctatcccccacacatcaaacaattccacttccaagaatcctgttaagggcatttcgtttgtccttgagatatttcctgttatctaacaacgatcacatgcctttacaaaactactagcatccttgaaaagcgtaggccaaaagaatccgctttgtaacaccttagtagcagttcttgtgctagtgaaatgtcccccacatggtaaagcatggcagtgattgagaatagagtacatctcctcttcaggcacacatcttctaattatttgatcagcacaatgcttgtagagaattggctcttcctaatagtaatgttttacctcagaaaagaatttctttaattgttgacgagataacccaggaggagttattttggcagccaagaaattgacataatcagcataccacggtaccatcaggttttccctcacactaaagagttgttcatcaggaaattgttcatttatttgtacctcttttgtattctggctctcttctaattctagtcttgacagatgatctgctaccagattttcagctcccttcttatcctttatctctatgtctaactcctggagtagaagtacccaccaaatcaatcttggctttgcatccttcttggtcataaggtatttaattgttgaatggtc

SEQ ID NO: 267643 - DNA, 986 bp, Cannabis indica
cacattctccttgtgacctctcattggttgggacttaatcttgtagaagtacaaggtttattccagtgtcggcattaactttccatgattaacacaaaagacgtaccactcagataataagttgtacgcctgtggaataagctagaagtaacatacttgattttgataataaagttattaagctaatcatcgttgtatcatgctggaggagttcatcgcccctttctcgaagacgagatgctagagtgataaacgaatcaatctttgcattaaaatccagcttgcgatttttcctaccgtagaattccttatcactgggggtcgatgatgtgggaactctcatgctccaatcctcaacaacaatcgaagacagaaatctacggcgttttccaaattgaagaagaaaattttgattcaaattcattgcgtggttctggagattgcatggagacttatgcgcttcgaaggatcgaaaatttgaaaaagaagtaaaagtggtaactaaaagttaccaggggtatttatacccaaaaaggagattcacgtgagaagggtatagacaaccatgatcttttctcaagaaacacaccttccatccaacgaacgggaagtccaaaaatctatgtgtatcctagcatttaatgcactccagaatcaaggtgtgaagcaatgataaaaatgcccttttttcaactttcgcgcaaaaattgaacagccatcaaaatgtagtcgttcatggaaagcaactcctcgatggacgtgccttgtcatacttgcgcacctaacatgtggatgcatcatcatcacagacagaggccagcttccgtggtcgagtggcattcgaaatatcactatttcattcttcatttccacatgtccaaatcaagaaagtgatgcaagcttccaccacacacaacattctagaagcttggggaataaatattatctgcatttttgacattagacatgtggactccaaatcaaca

SEQ ID NO: 267644 - DNA, 1289 bp, Cannabis indica
tgtgcgagtgtgacagtgacaaaatatataaaataataatagatatggctacatatctcactgtcttttttactctgttttttttagtgtgtgaaaatcccaaaaataaataattagaagattgacctttataagagctattatatacaggaaggaaccaccataagttggctaggctggttaaacaatataattgctgaagcacttttcagctaccaaaacataaaacgcttatatatataatatatatatattaaaaaaaaaaaagtaccaattaaaatttgtagacagttgagattctctccctattgcatgaaatgaagaagactcaaaaagtttggagattatatccttggatataataaaaatagtggacacaatttcataagttttagtaagccagataaagacaaaagggcatttttaaaattataataataataaacaaaacaagtagaaaaggttagaaatggacattgtgagatggggtaatagtagtttaatcaatattgttgaaaattgaaaatgggcaatatagattaaaatgaaaaagtatgggtaaatagagaagttggtcagggtagggatgtgtgtgtggtgttatatagagcgttgtgcattgatgattgaataaaaagatagtaagtggggaggtgggttatggtgttatgaggttgtgccctcatccaccttccttctctcgacactgttgttctatgcataggaaacatttcatttctatttcacacgctaacccccttctcttgatccctttccccatattctccaagcatgctgtccccaaccccattcaatttcattccgaactaaattcatttccaccacccccactttccacaaacaaaaacatttacatatctataatttacttatcatcatatatctatagagaagtttaaaataattttattaattatatggtaaaacaaagaattccattgtctaaaaattaaaattagtaaacggtctttgattgtgcttgattatttcggccggtcttaagatatacgggacttaaggtaaaaataaattttgaaacctttatatatatagtttaactattatcaaaatgataattttagtatattagtgtaggtaaagtttttaaaaactctctaaggttcaatccttcataacttcacattaaatatttaaaataaaatacaaaaggaaagatgagaaattgatcccttggtctcttaatttaaagtaagaccttttaccactacacaaaataattttaattatattttttcttatttaatatt

SEQ ID NO: 267645 - DNA, 1681 bp, Cannabis indica
aaaaaaaaaaaaaattaatacacttaagaatttaatacatattgggaattataagaatatatatggatctatcttatcttaatgatcgatgtaagagaattatcaggtaaaatatactattgagaatgagaatatatatgatcattctcgatattataaacaatcatatattagtgtcacatgcatatacaataaaattgtactaaaataatacaatttgtagggcatatatacatacatacatatttcttttttttaaaaaaaaaaattactatgaagccatgcccatactatctgatcaagttaatcatgcatataataaccatcattatacacatgcacacttatgctaatgtatataatatatatatatatatatatactacaagaaattttaccaacgcatttcacaaactgtactagcaaaaaggtcaaaattttaccagcacatgtacatttgtagtgactaaaatctaaactaaagaaaagttatttttgcctagcatttttcattttgtgctggcaaaagttctaataccaacgttgatttgccaatccttttgctaacacatcagaagtaaatttcattttaccagcgcaatactaaatttttgctagcacaaaaatatgctagcaaaagtgacattttgatattactattattatttttacttatttatgtatatatatatatgtatatatatatatttgtttataagagaggggtgagtaaagataaaggatatttttttggaagaaatctaaactcaatgattaagaccataagagtagcccaagttgatatgaatatcatggtatgaacttaattgatcaactatattgtattatccatacatgcacacaatgataagacaagcactaaacttttccaacaagaaagaaaaagggcaaacattacacttaaaaaaaaaaacatttttattatcttaatttggagattaatgatgacccacaattacaaactaaccaaattaatggtccacattgttttgattatatattaataatgataaaaggcacttcttagtctttagtctttgcattgagtgtaaggtgtatgtagtagcccccattgacccaccacataagaaaaaattaataataatcaaacttatattttcatatatatttttttatatgtataaatcaaaaaattaaatggggtaggaggagacatttttcatggattaaagtcagcaaaatactactttgaatccaacaccaatagtctaattaattgaaatctccaccatattggtagactgtagtgacacaaattaaacagtcaacaggaaaatgaaaaatagtatgcttgaaacagaagtttaaatggtaagaatctaaaatacatatacattcaaatgccataattattgtttgtctttctttgatcattatagacatttttcttttatttgccatagtagtgatatgagagtgcttaatttcccaagtggggaaatccaaaaatataggttatgtctaaattaagggtattttctttttggaagaattaaaaggaaaaaatataagaataaatagaataaaataaattttaggctaattaggatttgaacctcgtgaactttgacatgtactaaattatgctccctgaacttttaaggtcgttaaaaatactacttgaactattgagattgtt

SEQ ID NO: 267646 - DNA, 1674 bp, Cannabis indica
tttgctcatagtgcattcgatttacattaattgcggatttcatattttggatccaatcaaatttgcataataactcaaattcaatcaagtccaattcgcaaaataaaagtcatataactaacaataaaataaaacatattattgttaatttttggaaaaattttagcaaaactcctcaaaaaattcattttgatgcagataagtctccaatctcgagatttttgtaagtccattcatttcaataaatctgttagttgcttctaaaaataccacattttaatattaaattgcggcataggtcttcaaaaaatttattttagatgcagataggtccctaatcttgacaaattgcgataatagttcacaagctcgaaattctcattagtctatatgtacttaatttaacaactctctttgttgtttccaaaaatatcacgtgttgatatttattagtctaaatcataattttaattaaaaattgttgatcaaggttttcggcaaccaataattaaagttgtataaaatatttaatgaaagctagaagagaagatttttacttggttggggcattaatgagctttagtccacgagttattgtatttatgagaatattttttacagagttttttcttggccgatccccatttctgtttatcattgagttatttataggctcataatggcggtaaaagggcactattatcgtgttttttgcaccatactttgcacaatttctcaaatttgatttaaggcataatttcctattttatgatgggttttaggctatttgtaggagtttggtgggatgtgatttatacctatttatgatttgacgactcatttatgcagtcgttgattgatgcatgggggctcgtgaaatctaggaataatgggcttaaacccttaaacacgcttgtcagagtaagacgcctgacgttctttcccatgctgcattgaatgcatatacagagtcttggtccttaatctcacgtcatctttcatcacttctctcatactgtcctccgaatgtactttactcacagagaagaacaaacgaaggatgctcgcgatccagctagatactcccggagatgactaatttgtcacaaccctttgaaataaagggctctaggagtaattagggcaacgtgtcctgtaacgtgagtcccagtgccacctgacttcctcctaaactaccatgtattttgggagaaattctaggcaatatttaccccccaaatcctttcgtacaattttgcaaggtgggacttgtgatgtgcctcatggagtagtaacatcatgctgcacgtgactattttaaatgctgctcattattctctcgtttttgatgaaaaagatttgattttgtaatcaattatgatgccattaattgtaggatgttagagaaacattcgagtagtgtaaccgtccttttttgtccacatgccaattgcccatagccattggatcatgaggtttttaatttttgactgagaattgttggatgattgacgattcatgtcgatttggctggtctataaagcctgtcattcttcttctttaaaacttctactctcacatttttcatattctccaaaccagtaaaaattctagggatcccagacttccttccactctttccccgacgtttccaagcttgattttaccagcatt

SEQ ID NO: 267647 - DNA, 1159 bp, Cannabis indica
aaaataatttccaacatgatcttggcagacacatgacctgccaggtgctacaggccttgggcggccaaacctcccctgtaggtctatgggcagtcaagattaacctggtaggactctatgtatagcccaaaacatggacatcaaattatgggttacaaatttggccttaaaagcttagcagaatgactaaaattgtatcaagattcaaggctattttagtctttggtaattatctaacaaactatgcaaatacctagggatttaaactgtaacctaggattttagtcctcctatataaaggtgtcgtaaccttagcctagaaaatgtaagtgactaaaccttcacctagcctccaaatcactctaagtccgaaaaccctatcctctcttatagattgagagtctgaagacataaacttcaatggagtggtcttcaaatcagacaaaccaaaatcaacaaaagcaaaatttcaatgtcgacgcacgctttttcttgtcacaaagaggagtacaaggaagagtgtcgtcttcttcttctttagaaacattgacatctatttttcaacttcctcattaggaagggaagcaggaacattaataaaaggaaagataaaaagttttcagtgtgacatttttacaacttaaccttacaaataaaagttacatgttttgggatcccaaaaaaatcattttacaaagtagtacaattttccccttagccgacctaagcatcaaaacagagttacaaaaagtttcaacactggtaaaccccaaccttcttggtatagtatggccccaacatgtacattcatcgcccagctcccacactcatggctgatttgaaatagacttaccctttcttgcacagtagagcacccgtgagccaagcccagcaagacagtaaaatatatcgatgatcataattaacacatcacataaatattaatgccatttcatatttttctatatgacacagacccgcgtgttacactcacatgcctacttatgtctatataacatagacctacgtgttacgctcacacgtctatatacaataaggccttagaacggttcatcttggttctagttaccgagtccaaccctattatgccttgaatacataacctttaatttcagtatacatctatatacatcatggc

SEQ ID NO: 267648 - DNA, 902 bp, Cannabis indica
taatcctaattaatgaagtaagctatcagtaaggctgtctaggcatgaatttattgaaaatcaatcctcatgggtatgtactctaatttattctcataaaattacaaaattaatctgattataggacaataaaaatgattctgtgacaatcaaatcaaatcattcattacttatcctatttcctaatctctccaccaactactgtttcctacatcaaatgtaggtggaacgtagttgagatttatcatagagtttgttttaactttaagagtttatattttaatccaatactctcaacatgaagaggattaaccctgctgtcacacttcaagtaaaatgttcaatcaatgtgtgcattagcagagtaatttgacttgctaagtcgaagatttttgcagtagattttgtttctcttcattagtgtgtgttctctcaaattgtgtactaacagaaatctatatttgtaccatactaacacccaaggacgttaaaccctgagggaccgctttaaaaatcaccttgcactctctttgccacgatcctgcttctcctggtggtgccaaaccaacaaaggcacctcttcctgatatacaatcttcattgatgtacctaaataaaaagtgatcaaattcagaaatcggggatttctaaaatcgtaccacaagtatgtaagctgcatgcatacccaccttaaacacagaaaggttggtaacatggaaaccaatggggaaagaaggcattatacaactagaagtagttgtatcttaattggatacctgtccaaaacaagtagtctaccactgacattgcctcgttgatctgatttctgaaaatcctcagaagctgggaaattgtatggccaattttgaacttctgtcatcatctgaatattaatttaatac

SEQ ID NO: 267649 - DNA, 1143 bp, Cannabis indica
ccatatttcatcaatctccatttcaagcgacaacaaccttgtgcagttttcctccagaaaaaggttagaagattcgatcaccatttatccatttgtaatggggagactttagtggagatttctttacacaaatttcctttttctgagatggatcaaccaccgttgttatttttatgggtagcgattatggtgtcttatgtttttatgacttaatggataaagttgtttatttatggaacccaactattaatgagtctagacaactgcctcagttgggacataattgttctgaatttgggttaggctatgatcccttgaccaatgatatcaaagtggtaaagttctcatctcttgatgggagtggtgttgttagcacttgtaataagtttaaagagggtaaccagattgggatttatagtttgagcagcaattcatggaaaacaatgacaatgcctaacatattttcaaaacttgaatcttcttctacttctaatataattgtttatccacttatgggttgctccattgttgttaatgagtgtattcattggatgattggcattggcaataaaactgattgtgaccaatcatcttcagggatagttgcttttgatataagtagggagaaatttaagctcataaagtcacctcaaattgtaaaagggagtaatgtcaagaagttagctaatttttctgggtggctttcatttttcactttgaatgaagtccatgtagttgacatttgggttatgaagaaatatggtgactcggactcttggttcaaacatttgtctgtcaatttacacagtcttcttccaaatagatttagttcccattctaggtgtattccaaaagatctcttgagcaatgggaaccttttgatttcttgcactggctctgatgattggtattcgtatgataccaggaataagaggcttgaaaatatgggtgaaagaattggtattaggggactcactacatatgttgagagtacttttaagttaaatggttaagaattctgtattgacagacatgtggttcttggatggcgtgcatctctcctgtgtgtgacaatacttttaaattgtgaatacaatgcttgtggtgtatgtgattataattataattatacaatatgtatgt

SEQ ID NO: 267650 - DNA, 667 bp, Cannabis indica
gatatttgaagggaggagtacagtgcaaaacagaatagaaatttagataattttgcccccaaaaaattaatttttgtgcctaagtgtttaaaaaatttaaagtttaaataattcaaccgccaatatatctcatatatatgatataggattttgtttataggcatagcatgcaaataataaaatttgtacaacactgatcatcagttctaattacctaatgactcatcacaattattaatttttaaaatttaaatattacatatcgttttgcaaaatatatataccattagctaatccatttccacacactaatcaaacaaaatatatttatatatatatgctccagtccaatactaattagtttataattaagttgaattaatgttattaaaattaaaaattaaataagaacagcatgaaagatgaatgagaaactgttgtatgttattcatgatgaagcttacataattaatatcaattaattaatacgaatgtatattttatataaaaatatttcttagtcatcaccatttcaattaatattttattttaaggtcggtacgttgtatgcctctacactgattttgatttcaaaacacagttaagtatttatatatatatatttattttatatattataaatcttcattatatattgcacacatca

SEQ ID NO: 267651 - DNA, 923 bp, Cannabis indica
gttggttagctaagtttgagtttattatgagttcaaattttagtccatcaatggaaaaactcgattctaatattatttctgattggaatatattatttatgatgtttataagtgttttggaggttttggttcgatttggggtagaattgagcttgggagtagctttgtatttcctgtagaaaaaacggttctatatatttttcaaaaatggtgaattatttctccaagcagaatcccagaaaacggttcgctattttgggaattcggttcaccggtttgagcagttttgggagcccttgtttttatattttatcgatatttagagtattgccacactatttatcgacagggaaatttttatttttaattttaagtccccaaaagtgagctagcaagttacttaccagttttacataaattgtgacttagggcctttaaatcatcgattagcagtttccactcaggttgaccaacacatttaaattcgaaatcaagataaaattagtataataatatacatgtatacatgtttacggttgcctatcaataatatacaagtaggattaacagtactatcacatcagtacgactagagtactgagcatatattgatgttatgatcaatcgtactttttgtatgaacgttcgagacttatatgcatcggacacgggatagaatcataattaggtgtatgggtgcctagttacggtctggttgtatgtttatgtttatgattttcttaaggggcttattcatttttacacttaaaaacagctttgtttccatcttttacggaattctacataggaaccactattgtaactagcgctgcaacctaaatagcaaccaaaaatcgtttagcaacccacatagaaactactggagaaaccactttagaaatccaaactgtaaatttaagaaa

SEQ ID NO: 267652 - DNA, 1053 bp, Cannabis indica
ccgtacggtcggtttatacggttataattctaaactatcggttaacggtttcgtaaaataaaaccgtaaccgaccggtcggttataaaattttaaaaaccgaccataaccgaccgattttcaccagtagatgtaactatgtttgtttatatatcttttatgatcactatattaattaacattaatcaagcaaaagaaacaattatattttctaacaaattaatattagacactcgacaagataaaaggagaagaattatgaataaaaaggattctttctcttattcattattacaaataaaacttaaattattcttttacactaaaaaaaaaaataataagggtcgattttagtttttttatttaaaaaaaatatttgatattaaatatatagcaacaaaattaaagacgtctataaaaaaaaaaatcataaataaatacttctatattaaaacaaaatattgataaatatttttactacatatattcttcttcttccccttctcttttattttgatagacataaatattctttttttattattgagtacaatcgataatattatcctaaccaaatggttggtgtaaataatctctccaataataataatataaaataaaatcaaagtacatattccatttctttctatattattatatttggcaaattaaattaaacctaggtttaatttcccgattttcagtatttctgttttttttttaaatattattattgaagaaactatgatggaaatgattctaaagatctcacatattaagtgattaaatattagttgtcttaatcaaatatttttatagatttcataatcaaattaagttcatgcactgatttgacagtatcaaatttaattatttatttcaatatattgtttgctttttcaaaaaaataaataaaagttcttcatagttaatatatggccatcattattattagggtttaaagggtaattaatctcattttatgacaacaaaaataaaataattgaaattttaaaaaaataaaaatggtatatggccatgcaagcacacgtga

SEQ ID NO: 267653 - DNA, 1205 bp, Cannabis indica
ataatagagattggtatatatatatatttacacactactataaattttatgttttgtttgttgctctaagttttgtgttagaattttctcttcatttccactattttctattttatatgtatttgttttgtaacattactttatcaatgttatttttcttgtatttcttgtcatagagttataattttgttggtttgatgtttttattaaaacttaacatttcccaacaatatggcgccgacaaaaaggaacattcccaccaaaaatctccccgccttttggtggtatttttgggtctttttgttggtatagttactttttgcgctaatacctataatgatgcaaaatattgtcagcaaaaggtgaaaaatgaaacacaattcttaatagacgcatagttattctagcacaattaagtaaattttaattaagccggtaaaattctaattttcttgttgtgttcattggcggaagttgaaactagaaacgacgatgctcggtaccttacaatccacatgtcaagaagttgactatctcttcattattctaaaaattacaatttgattgggaaaaggacgaatataccctaacactacttaacatgattggacacacagttacgatctttctagagaaaataagagggacccacctcaaagggctaagagttcacttatcaaagtatgggaagcagcatggtgttcctgcttttttttaagaagacatggtattcatgctttgatagtaacctttctatactttgccttgccctatttatttatgaaattataaactttattttttgggttgatagaaatttatttaattatttaattttcttgcaaagttctagactctagttagttggcttattaaaaataaaagggctagtagtggattggataatattataaacaataacacaatcctaccccaaaaaaactttcacagatataacatatttgtgcttatcaattttcaaaaactatatggtggatatactcatggtatacattattattataataataaatttaattatcacagcagcaaaacaagaatgactatgtgtgaatccaaacatgcttgcagggcaagtgggtccaaattgtcgagaaatattgttttacttctggactgaaaatttgttagggctacggtaaatttaatggaaaatattattttggactttgtgttttgtaaaa

SEQ ID NO: 267654 - DNA, 536 bp, Cannabis indica
tgttttattttttatcaagtctcacaccacacctattttatttgcttagtattctattatttcccatttgacaggcattgaaatgcatgcaaattcttttaaagttaaaattaatgttatttataatattatatttagtatgaccaaaattcatatacgactaggtggtttcaaaaaaaaaaaaaacagagagaaattcgctcaaaaaaaaaattcatatacgactaaaattgaatgagttaatttgttaattacacaatttttaaataaatatgaattttttatatatatatatatatatttttaagaattataagtaaatattggttttggcaatattaatttgaacttctaacactttaaagtaggttagatatctaattataattagattaaatgtgaaaagttagatttaattggattagataagttattaaatgtacatctcaaaattcaattaaaaacttatctaatccaattatattagattgaattttgaggtttcattaaattagatcagatgataattttttaaa

SEQ ID NO: 267655 - DNA, 1835 bp, Cannabis indica
taataaaatctccaaaattgagaatttataactctaacacccacttataataatgggaccgacaattaaataaattcataaataattataaaaatatcaataattaatgctaattgcctttactaatccatattctaaaatgcggtcattacaattttgtgccaagtcaaaaatcacacaagttgagatataaaatatagcttctaccatttaagtattctctccgaaattcttctaacaaagtggtatcgaagccaagtttatgaagaaaaatggcaagtgcaggaatgatccccttccaagtttcaatgctcaccaagagcaactatgacaattggagtattaagatgaaggcattactaggagctcaagatgtgtaggatattgttgagaaagaccatatggagcaagatgatggtgctcttttccaagcttaataagataccttaagggattcaagaaagctctctacctcatctatcaagcggtggatgaagttgtgttcgagaagatcttaaatgtaatgacgaccaaagaagtgtgggagaagcttcaagcttgcaacaaagaagcggagcaagtggaaaagatttatctttgagttgttaaaagtgattttgaaactttatcactttgtaattatttcactagagcattatcaattgtcaatcagtagcgaagaaattagtgaagtaaaggttatcgaaaaaattcttcgtactgtgactccaacctttgagttcattgcaacaatcattgaagagaatacagatatagaatccatgaatattgagagactcatgggttctttacaagcctatgatcagaaacaaaaaaggaaaaagaagcgaaaggagaaaatggagcaattactaaaactcaccctggaagaagaaaactctgacaacattaaaatcaaaaaggatgaggacgtgaccaaggaagaaaacgtggacgtggtcaaggacaatgaggagaaggaaggggtggctataataaaaataattttaataatagagaatgaagtcaaaattcacaagcatcaagaaggcgcagaagaggcaactcattgtcaaggagagacaaatctctaatcaagtgctacaattgcaacaagtacaatcattctgcctctgaatgcatatcaaggagggtcaaagaaagagccaattttgccgaatacaaaggtcgagaagaaggaactttgtttcttgcttgtaaagacaaagatgaaggtcaaaaaaataaatggtatattgacatcgatgctagcaatcatatgtgcagaggaagaagaatatttgtggagctcaatcaaatggtaaaatggaacgtctcttctagagatgaatcaaaaatactcgtagaaggcaaaagtaagattcttatatgcttgaaaaatggaggccatcaattcatctcaaatgtttactttgtgcccaacatgagaaataatattttgagtttgggtcaattactagagaaagattatgatattcagaaaataatcttttcttaaaagatgataaaactaatttgatcactaaagttcccatgtcaaagaatagaatgtttctcttaaatagtcaacacaatattctgaactgtttaaaggtttgctacaatgagttatcatggatttagcatctaagtattggacatctcaatttttgtgggcttaaacacttagagaagaaggagatggtgagaggccttccatatgcatcaaccaaccagattaactttatgaaggatatttcttagaaagcaatcccaaagaagttttttaaaatgagtcattatcaagagccacaaagccgcttgagcttatacac

SEQ ID NO: 267656 - DNA, 1300 bp, Cannabis indica
tatatatatatatagtaatataatgtgtgtgtgtatatttttcgtgcgttctaaagtgggctcaatatagcatatacagtgtgtactccacctatatatatatgtgtatataaatgaatgcctcctattccaatacgtttcagctaaaattaagaagctctaatggcttcatatttgttttccactaaacaaatcatatttggttagtcataaggtataattgcttaaaagggttataaaacaacaaaatagaaaaggatcaattatcagtccatttaacattgacaagtatagattgtcaatacttaataatttaaaagtgtgtaatggattctatagagagaaactagtcatccaataacttttgtttttgcttatcaccatgcaataccaatattaagtgtatatattatatatgcctatgtgtgtctacactacacttactctagttttatataaggtgcccgtggcacgtaaaccatgctcaattagataaataatagtaaagtataggtgaaccccctaaaaatagtgtatccatgcactctctttggtgttttataggtatccatacacttttattttaattctttttatataaatcaaaagtcatcagaaagtcacttttactatcacatttttgtgttggtaaaagtttggtattgcactggtaaaatgaaatttatttctgatgtgttggcaaaaggggttggcaaatcaaagttgatcttaaaacttttacaagcacaaaataaaaagcgctggcaaaaatgacttttcccagcacataaatgtattggtaaaagttagattttagccactgccaatgtgcactggtaaaactttaacttttttgttagtgcagtttgcgaaatgcgctattaaaagtaactttaccagcgaactatgctggtaaaaatcacatttcttaaagtgatcattctcgtcaaaacgacatagtatcatcgttgatcaagtgaattgatatatatttagacgcaaaagtaaaatattttgcgtcgattctcaaaggtcgcatatgaacaacaccatcgattataaatcgacacaaaacataatttttttttttaattattgaaacttacgcaactaaaaaaaatcaaatctgaaatccaaaactcaaatattgcaaatataacagatctcaaattatataaaaaaataaatatatatatatatattaaaaatatcaatgagttctccaaaaacacttaaaaagaaaacaaaaacaaacaaaaaaattacaatccaagaataaaattagagagagagagagaga

SEQ ID NO: 267657 - DNA, 1852 bp, Cannabis indica
tatattttcgaaccctatagtgaaagggtacatgcccacccacagcaagtcaaatactcaatcatagtgtgtaagactatgaagaatccaacatctgaaggagaatcgggctcaaatcttgataatactctgcgacagaaaggaacaagggttagagatctgagtggaatgagacatattatttcgctgcaatcaatgtaaggtttcttgaactttatatgtgtttaaattctattgttttagagaattcatatttagggtgttaatcaacatacatggtggtaaatctagatcctggtaaaataatttccaacattgagtgcatgtggtattatggttaatcgtactatagccaagaatgttcaagaatcatacgcataggacaagggtttcagacttggtaattagatgtatagatgcctcgttgcaagtcaagttgtatctttgtattttatgtttttcttactaagtctgttgactcactgatatattttccatgtataggtaaatataaggcaaaagctgaatagcaatgggtttggaactcaatgaaaattgtacatatctagatggttagacatggaatgtttagatcttccacaagacatgggctcaattttgttaatcgttgggcaacactttttgatttattgtattttataaatgtttgaaaaatagaattggaatcctggagtttgtaaactttacatatttgtttaattagaaaagtttatgtttattataaaagtttttgttaaacattattttacactaaaccctttgattagtaaagatgagcacagtaatttattaaacacaattggcatacctaaattagtaggatgttacaaattaactaagattaatttagatttgaaagatctatcaccaaattaatcatagtcattaaatcaattaaataatagtttttttcaaaataatcaatttagttggtaaaaatctaccatcaattttaccggtcaatttatatcaaaatatctatcatcaatttgaccataactaatttagattttatcaaataattaattagttgtaaaacacaaaaaagtaacaagatggttgagatattatcattttaacaaaaaaaaaaaatattaaaataagaataatgctaatttttaaatttaaaggttgtgaaataactcttaaaaatctcaatttttactcatatacaaattatttaggttattttattatattttaatgttttaaataaccaatatgtcaaaaatgatataatatctgctattaaaaagtaattaataaattaaatatttctaatatcatttttctcaatttataattcaaacaatcaaaatattaataaaatatgctgaatttgagattgaaggatacctataaaatatctagactaattttaattttattaatataattttaattttattaatatttatatagcatataagataataagaatataatattttaaataaaaggctaaaattacaaattaatcaaaatatactaatattttgatatctgaccatataaattatatgaaaaaataaaaatatatagattaaccaatttcaaattcaaaccatattataaaatcattaaaataataaaattcattattaataatctaataaaaaataaatattactaattaagagcttatatttaggttcaaaaatgaataattatgatttttcactaatttttagtaattttctactttttatttaattaaaaattcaatttttataaaaaatcatgtaacattcagaatggtgactaatagtaaccagctgggctggtcacagtcaccttgtcaaggctgctagtaacagccttgtgtgtgtgc

SEQ ID NO: 267658 - DNA, 1092 bp, Cannabis indica
tcacagagtagccgtcattagactttagtggtcatagtcttgtaggtgcagatcgggggttgtgtcgtcagactttattgcgtgtggcagttccaacacgcctcctcccatgcggcattaaatgcgagatgactgctcagaggaagcctgacacctcccggagatgctttgatgccatcttgatctccgggagcatataaaaccttgcatgccttctccgagaggcatatccaagataatgcctttctttacaatgacttagctattaatttaagtgcttaaacctttgtgtccacgtgtccttgtctggttggtccacgtacattgggcaaaatcaggggtaacaaatacatattaataatttttgtatatataaataacacaagaaaaaaccacgtctaaatataaatttatatgtttcatcccaagaaaataatacatatatttacactaggtattagtaatatacaatgtatatttgtttaaaattatgttagagttgttattcttttattattaatttaaataataataaaattaaatttaatacaattgaattattattttttaaacaaagaaacaaatttaaatataatcattaaattaacaatttctgtttgatcacatttaatgtaagagaaatataaatggaaaccaatcaagtataatggaaagaaaaaaaaccaatgtaaagaatagttataaataatagataattattcattttaattagaaagacattatgtccttaaaataagaaaaaaattattcaaaaaaaaatattcataaaaattactaataaaagaaattgagaatagatattttttgttttagttaaaagttattaaaaattgagaggaaagtattaggatatttttagccaattatttatgttatttttagagttaatttttttcttttttaacggagtttttcaacattcttttattctctattttcttcttctattctgaattaatatgtgtgaattttctacaatgaacatgagtagctaaacaatttattagggggttagatggatattgtttgacattgatttatgaatttaatgtggtttaattttcttcccaa

SEQ ID NO: 267659 - DNA, 527 bp, Cannabis indica
ttagtaaatctaaaatcctggtaaaatatatccaacattttgctacttgtattttctgctatattaaacgtattgacaatttggagtgtgatgccttagctaaaagggctagaacatggatttgtaatggtgtttactctgatagggagggatccccttttgtgattccatcttatttaatctaatgaacttcccatagttctattcaaaaaaaaaaaaaaaacaacattttacattatctttttattagcattgttgctttaggaaaaagacaataccttctttaaattatgtaaaaatagttcatgaaaattactgaccagttttgacaataaagacataataattaccgaagtggaaaaaaataaaaaaagaatgacattattagttaactaggcataaatggagcatataagtaactcgcgagttgctatcgatcattagttatcttggcctggtaataaaataggggtgagctaataagctaagtaagaagtgggggcttttgtatttttacactttaaatc

SEQ ID NO: 267660 - DNA, 1316 bp, Cannabis indica
aatttctaatttttcttcactataatatacattttaaaaaagtttgcttttgtatttatataaaaaattgtatgataatttttttaaaattttttttagagttttctacatagatttattatttttttataagtatatatatattttatataaaaataattctttttagggtttatataaaaataagtttaattatttgattttaattttattattcaatagatatttatatgtacctgtttactagtgaatgaatatttaagcgagtacaatttaggtattattacaacactacaaattgcaattataatattatttttgtaaccttaaatcctatcacctttattcttaggggtttctcggcaagtatgtgagtgagagagagagagaacaactttcacttttactttctgtatcatattcggatgcttcacttttgaattctctaagaagttacaattttctagccaaccaaacaaaacccacaaactcttgaattctgtaagcagtttttttcccttgcttaagtttgggttttactgaatgttcaatgagagattttgttttaccaatgaattttttctttaacaagaatatttttgacaaaaaactctaactttaaggaatgaattttattttggtgtgagaatgataattttgttttgttattactgccaagtttttgtgctgctgaaaagaaacagcatgtaaaaaattgattttttttttgagttatgaactgatttttggaaacccattggttcttgtttgaggtaatttctgtttttgttctaatcagtcagtttgatcctatatggtcaggcggagtggagtctaaatgtctttggttcagttttacattgcttatcaaagaggatgagaacgatattataaaaatgtgcatttcaatacattttctctacaaatttttttacttgtagagtttagtgatttttgtggtgatgtttaaatctactatctcatttacaattattcatttatggaatcattgcgaatctgtagaatatacgattttgtatggtatatatatggatttggattgtaagaaattaaaaattattaatagtaaagcaacagtaaatttcaaaaaaggtattttgatgtataaaactactctagtgaaatttataataagtttgatgataaatttattattgtttccattacctaaaataataaaaaagaggtttacataaattttgtaaaatttaatatgaaaaaattcagctaattcaaaaatgtttgtcaggaatcaattgtcagcgttgttcatacgctcgtcgtagtacatccaa

SEQ ID NO: 267661 - DNA, 2614 bp, Cannabis indica
attgtaatttgtcttcaatctataattatttcaatatggcaatttgaagcacattttttttgttgggtaaatactttgctaaaatagacaattagttgtgagtactgagaaatttttcagcagaagattcttcgatgtttaagttggaaataaagagttctagtgagaaggaaaacgaaagaatttcgatcaatttttcttactcaatttcacttatttataattatttttcttactcaacacttatattagcataataaatgtgacattatggttacttatattaagtatactataactcatttttttataagtaatgatttaaatttatatattaattaataattagacaagtcatccttataatgatttggttcactacatgtacattttaattcaagaacaatatatatgaatttttattgtgtgggtggcagactagcattatggccctcatatcatattgtatatatatatgaacagaaaaataaattaaattaataaataaatattatatataattcttggtaaggtgaagcaagaaaattatattataaaaaaaaagtttaagctagtacaaattaagaccacccagctagattagattccttatgctgattatcataatcacaaacaatataagtaatttaatttatatataatacttaaataaaatgttaacagagattgtcacaatattgattctgtcctattatataatatggtgccactaattaatattatatattcatcattttgttatagagacattgattttgttaatattttctagtcaaaaatgatgattttgcatgccatatatttatataaaatagctctgaccatttccaaattttgtattgctattttatttattttcttataataaacttattatatttatttaatttttttaattaaaaaattagcaaataatccatagtactcattctctagctcaactaatttactatcggtctctaaatctaattattctgtattgtatgtgatttattaactatatgcattttcaatgaaattatttctttcctttgatttatcattatctaattcattacactaattatagactcaagaggtcattgtgaaaatttactatatgagctattttgttcattatactaattagtttgagataaattttatgttcttatggaacatatcactttaattattttttttaaattacacttttccattctatataacatgatttccaaaaattagagtaaaaaaaatcacttgtgtaaatgatttgagaaactaagagccaaaaagagttatgtatgatccaactatctaagattatagtgaataatagtcattatttttaaaaagataatattaaagaatctcacattaataattataaatatataaatttaataccgtatataagaatataaattacttcattcattgattaattttattaacatgaaacctagttaatatttttgagataaatatattaattatgtaaacctataaaattaattaattaattaatttaaaaacaaaatttaaaataacattgtgataggaaattttgtgacacattctgaccattgttataatacaagcaatttagaaatataaatatttatacatatgtataatcttcaataatattattaataattattaagaagaaaaaagataataaccaaattaaacctataagtaattagaatgtgaagaagatgattaattttggtcaattgccaatttcatgcgtctgccacattaagcgtgacctaaacttaattgttttaattaattataacataattttttatataattatgtaacatgtaattacattatttattaatatataattataataaaacttttttattttcctgacataatatataaatatatatataaagggcatccattatcgaaagaagagaaattgtaggctcagatcatcaccattagatccaataatgacatattttgttagtttaattatgttttaatacttcgatgcaacagtttaatttaattgattaattacagcttgaagaattttttaaagctttatatatgaaatgacacataacaagattaatatattatattattaatattaattagtagaagaaaataaatattccatttcatgtgatagtcaccaacaaaacacttacaattttaatgaaatttatgcatacagatgcagagattattttatatattttatgttgcaaaaagaaataaaaaaacattttataaaaataaataaaaaatttagagtttttggtgtaaaatcccatatacgaatttaattgatcatccaaaaaagttgggctgccctaaagaacattgtgccacattttgtttgatcctatatatttatttttatatataattaatatatgtacaaatagaggattttgaattgatttttaaaatttaattataatccgatctaaaagtgctataacaaaactgtttacattttttgtatctgtttatattaggaattgtcttcgagttggttgtactaaaaaaaaattgtcaaaaattaagctcaaggtcctatttttatcgttttagaaaatacagggtccattttatcatt

SEQ ID NO: 267662 - DNA, 541 bp, Cannabis indica
tatttatttctaaatattgggatccacaatgaaataaattcacaaataataataaaataataaaaattagtgctaattgcctttactaatcaaaattactaaagcggtcattacaccttactccagcaacttgttgtttggtggcatgtgccaacataacggggtcagagctgcaggcaactgcccatttatctaccgttaactcgcttatgttgttggcagtcaagtctattacgtctgcagcaaagggtgccacattatccccaaacgtgggagtcaaaaacttattcagagccaggcaatctaagactagaccagggttcttccctttgtcacgatcagctatctctgccttcctcttggcctacaagatgatttctttcttttgggcgataaccacctcctggtcatgatgcctcttgagatagaggttggcatccaccacctttatgaaaacctcaattgcctcaggacacaaaggccaactgaaggtgaaggaagggatggccagaagggctgtaggaagctgttgcgggtgtga

SEQ ID NO: 267663 - DNA, 1472 bp, Cannabis indica
tttggaaaaagaaacaccctgttaatgcgtgtacttctgcacaagtagctcttgatcactggaataaagctcaagataaaatttcgttgtcatcaatctgtctggaaagcatcggtgatggcgctgagtcatggactagacccgcagaaaacacaatcaagattaatgtagatgtagcactctttgatagtgacaataagtatggtttcaaaattattgcccgaaaccatcttggtcaccttgttgcattacgggccggttgccatggcagaagatatgcagctgaagtcattgaagccatggggattaaagaagctctcagttgggtaaaaactaataattggcaacttgctgacggacagtcttgtttcagtacaagctatgtgaagcaaccaagcaatgaggtccactttcggtcttttaatcaaagactgccaacttttgttatctaccctcctaaatgttaatttatttttcattagacgatcagcaaaccgagtagcacattatgttgctagatattttcggtatcaatctgatcataacatttctgatatttctttttttggtgaactcttacatcttttgtatttagaatgctaaattatttaatgaagttgatatttcatctttttttttaaaaaaaaaaaaaaactttgtgctatccgttgtagcaaaaacaatttagaattatgcttttgagttttgagtttggacataaggacatttgatttgaaaagccaaccaaaacactctaaatttgtttagggaaagagaatttaatatctaagatgttggattgaaattgaatgagagaaagacaaccacacattttgctttgtcataaacattatatagattcttttattagaaaacaggcacgtttttttagaaaaaagaaaagacaatttaaacaaaactattaattttttttttgaataaaaattattaattaatataattaataatgttaaaataataaaaaaataaaagatatgagaaaataaataaatatctataaatctaataaaaaataaataaatgagaaaattaatgagagaaaaaataataaattttaaaatgtcatgtcaccatttcatatctctccatatatataaatataaattttaaaaaaatgaagtaagttcaatttaaattctgaatcttaatcctgtttaatgatcataatgtgaacttgttaattaataatacttaaatgtaagtgtgatcaaaataaaagatgctattcgtactgaaataaaataaataaaaaagataatatctataatagcaacaaacaacttaacatgtcatgattacgtgaatgtgtgatcgaaataaaacatcaaatgtatggttaaacaatttacatgtttgctaagagcatctataaggaggacactaaatttgatgttacactattatcaaatttagtgtcaaaaaatattaccactccaactacaataccaaaa

SEQ ID NO: 267664 - DNA, 556 bp, Cannabis indica
  modified_base (120)..(120): a, c, t, g, unknown or other
acggctcaaggcagtattaaacggtggctttggtttagggtaataaaatatccgttttttaagaaattaaatacttatgccttctcgagtgtcggttctgagttttttttttttttaacnggtagatagaatagcgaaaaaaaatcagagataaatgcaattttttcagttgtgacagctaaaattgaattaaaaaattagataattagctagatttttttaatattattttccataaatagaaaaataaataaaaatctaactaacaaaatatatactctaaaaccctaaagataaaagtcaacatcgaaatataatcaagaaatgtaatcaaaatatatatatttcttgaaaagtaatattgggaaaacaggatctttcaatattctaagaactaaaaaataagtttttgttagttttatggtactaaatcaggtacgcaactaaagaatttatgattatgattatcattgtaccatacatccaagatcaacatatgtgtatatattaaactaaaagtaaaaaatgaaaagaatatttacctcttgatgcctat

SEQ ID NO: 267665 - DNA, 1433 bp, Cannabis indica
tctcttttctctgtacctctctcaaactctcaaccttaatctgacacatgttctaaaaagacaagttaaggtggtatttatagacttaggattaagattctaaagtcgacgactgcaagaattatggttgttaagttagttaggaaataactaacttaactaactctcctttaagtgatatctccaagtcagtataagtaagagtgccttcgagaacatatatgagatttcgcgatcacggaccaaagacactcgctgaaggagcttctagacaggatagagccagctggagtcgactatcttctgaacctaccttttcaggaggaacaactagccaactggaactccattccggaaagagattagcttttccagaagacccttcacagaaggacaagagaaccttttaagactgacttctgcgagtgaacgattttttaaaaataactaatgaatacctttttatttggacgaactatatcacaatttaataattactgaagtagagtaagtaagtatgtaatatttaattatattaataacgatatgatgcatgtgctaaaaaatataagtgagatttaacattttgcttttctaatgaaaaaaaaataataaattcaagtggttagaaaattaaaaatgtatcacctgttttagagcattctctcaatagcaatctagttttttttttcttttatcgaaaggtgaagcaatctagtttatttgttccttgttttattgttattattattattattaatttattaattgattaattaaatagagagatgctcttattcatgtggcgttgcctggaaacacgtcttaattggcaaatctttctggtttgaccttcaaattatagtatgtagtgtaccaattgagtaatgaaatcatcatttttaccaccaattatattcttgagatttgttaataatattgaagaaagtgtaatgaaatattgcactcataaatcattcacaaacttgagacataatattaaacaattagttttagttaaaattgttctcatataaaattaatttgtcacgtaaaggtgtattaaatttgtgttttatttatgtatagagatattattatacttaaatcaataataaataaataatatactcctttacgagtgaatattattatggcgcactaaatacctctataatataataagagtattaataactctagatgccgttttgcatttctcttacactccacattcaattttagttttttcagttttttaaatatatagaaattttcatacagaaaattttaaaaaatatgcataaaataccttaaatttttttccctaatctaatacattttaaaatttaaaaaatttgaccactttacaataaacccaaaaatacccctctcattttcaaacctcaactctctctcttcctctatctctc

SEQ ID NO: 267666 - DNA, 745 bp, Cannabis indica
ttttttttgagaggcaataatgttatgctaaaaccgtggaattagaatgtatgttaggacactatactaattatgattaattagttatataattgttgttaccaagtctacaaagaactaggatagtgccaaattgaatggtttaagttttaaggatgaattcaaaacattgtggtcctatagtttagagacaacttttgcagaacataattaagattctttgacaattttaaaacggcgttagaacaatttactctttttttatgtatgtagttcaaagttggccacatattcctacttgttctggaaattggctgatatgatagctttcattttatttccagcttagaaaatggaacgagcgatgggtgatcctagatccaactacagggaaaatggaatacaagtaagtagtgcgtaaattttactgctttaagctattataacaaggaactgacaaattcaatttaatcttgcttatttttatgttttaggatcaggagaaatgagccgactgtcaagggaactattatatttgatgagagtagcacgattactgtatctcctgttaacttccagtaagaattttgtttcatggatgattcattttagaaaatgtttgatatctatgagattctataagatctactccaactaatgttaacatgggtttttctttttgggttgtagtgggctgccaaagtacgatggctgctgtatatgtatccatatttatgtactgaaa

SEQ ID NO: 267667 - DNA, 671 bp, Cannabis indica
ttttttaattattattattccaaatgaaaatacagatcattttcattgagtgtctttacagttacagatataaatatattaataagtgaataattgttgctagaaagatactcgttttaacatatgcttccttactaatagtcaacttagcattgcattcattccttcaaccaagcattacttgaaatagtgtaccattactagaaattatataggcaaatggaaacaagtaaatgataataaacacaaaataaagggttaataataatctattcaaattgtttttttaatgatgcttattgtatggtacttcatattcattccttctcattatttccatttgcatttagcttagtgaaggattcacctttcttagattattaattatagaaaaactaactccaaaaatgaagtcattaataatgagaagcactctctattgctgatattgcacacaaaatggaatgtagaacaagaacatgaacaaggatttctcaaatatattaatggaaaaaaaagacatttgtatcattcttagggacaacttcttttagcaccagtgtatgcatttttttcctaacaaattgtaacaacaagtttggttagttactactatctatcttggtgtctatacttgtatgattaggtgcctaagcaataaataagatcaa

SEQ ID NO: 267668 - DNA, 1824 bp, Cannabis indica
aattaaaaaaaaaaaaaagtaataaatgatacacactgacacatacaataccagatcacctagatcctttacttattaagtaaacaaagtaatagaaaatcctgaatttttatatagtgatattggactcaaaatcatgataaacaaatccaatataggttaataaagtcatttagccaaacaaatgaaagaaactaaaataattgaattcataatgataccccactctctatttttggcgtacttaaagccaattaattaaacaaactattctttcttagcattaaacaaactattcttctcttgcgtcagatgggggtcaagaattttccacttaattattataatttttttacataaataaatatgtatttatatgaaaaggtaaaactttctgcaaaatctcacatggtccaagcaatttgttggtatatttacctttcatttattggcgttctttacagtccttttaatctctattcctttatgaaacttcctctttacccatgttctgccaaaattgtatcattatgccaaacgtgttgttttaataaaaacaaagttaagaaaaaaaaaagtgatttcaattcataattattataaaatattctttttattttatttaattttaatcactttccagcttaatgaaatcagaaccgtactttaaccaaatggaataaagacaaagagaatttattcttttatgtgattttcgtaccctctccttttggaggtaatgaacacaaatatagtaagacatttttatattttatatttttggtgcacatagttaatttgttcaaataaataaataaacttgccgttaacatttttatattattaacagatataataaatgataaaaaaaacagtattgaaataaaaaatctaactaatactatatccattttctaatttatctttaattaatgaaactaaactgtattttttataattaagattttgaatattatatataattctgccaaaaaaaacatatacataaaatgacgaggaaaaattagttgtccttttatcaatttcaatcaaacatatttgattatagtgtaaatattattttggtcctatattttgttaataggactatttacaaaaaaatatgaaaaaataaaaataggaaatttttaatatatattgacatgcaaacttaattaactgcatgtgattttttttttcttttcaaaataaatcttaaaaaatatgaaataaattatcataaataaaaaaaaataccataaaaaattgaaaattcatatataaattttacttctatataattaaaaccattttactcataaaaaatttaatttcttgatgaaaaaattaattttgaaaaaatcatcataaataagaaggactactataaaaaatttaaaaattcatatataaattttactttttatgcttcaaacaaagagaaagaaactttaaaacaattaatttgagatttaaaaagaaatttatgttggattaaagtcctatctgtgggcacataagtatattgtatatgctattataaagcgtgatacaatgagtattaaaaaggtattaaattgtcatagaaataatgttagaatttatgccttgaaatttttttaatgacatttctatttataaataagagttgaacattttcatatatacttgaatgttaaattattaatattttatattgattaatttatatgtaatattaaaaaattcattattcatacatgaggttgtgacttgtattgtatggagaattaagatcacttagccatgaataaaaaattcggcaacatattaaagttatagaat

SEQ ID NO: 267669 - DNA, 1244 bp, Cannabis indica
agaatactttgagagatctatttgtgactacaacattatacactctatttataacttatttatgtagcgaaaaattcttaaatataataaatttttatcactatatatgaatatgcataattaatgtatacataccttaaagggcacaaagcaatctttatgaagagtccaagcaaggaagttatgttcttgataatttgagtgatgagctcatgaaattgatcatagagtttagcatagagacttggctcttgtgtagtttctttaccatatgaagaaaagccagtcaagaaaattagggttgccacaaccatacaaattgttgggattccaaaccttgttaaccattcttttattgcataagacattacatatccaaacacatttatgagaaaataagctccattgctcaatgaaaaatggatgattttatcagatatgccaccaatttgtttttcttcattgatgagttcttctaatgagactgcatagcctgatttagccaatactattagtggtaatgaggcatataacaatgtctcttgcttcactccatattttgcatacgttgcattccaactgtccatttttccggattctgatttagggcttgagaatgtcaagaggcctaatccctatcataaatttcgaaaaataatattattatgtcattgttactgtagaaaattaatttatatacgcagatgatcgaaaattatgaaccaaatcgaatatgaaggtagtgaattattgattatgaagaggggactaattggagttaaaggccatactaaatatttaagaaataattatttacgtataaatataataaaaatatgtgattattttagttctcgtgttttacaaaagttacaatcaagttctcttattttttaaatagtaagtttaattttgtatttgttatgaaagatgatagagtgagcaagagcaagcaaattttagagtcaaagttaaaaaaaattaatcaaaattgggttgaaagttatcaaaattagacttttaaaaattatgaaaactagaataataataacaatggatttttttttttatttttacatttttaaagcaattttttttttttttggtaagaaaatctacataaaaactcacatagcaactaacaaatgaatttaaatcgtaactaaaattcacatagaaactaccagaacaactcaaaccgtcaatttaaaaaaaaattaaaaaataatatgtaaaataattct

SEQ ID NO: 267670 - DNA, 1996 bp, Cannabis indica
aattgaaatggcaatacagtaacaaaaactcaatgataaaattaagaagtctttttttttttcagttggaacaagataataaaccaagttcaaacattgtattttttttgtcctaggctttgtcttaatgatgcataagaacacaccaacttttagcaatattaataaaataaaaattgaacacataacaacaaagtttgaggagtggggatttctacttcgcctttgaattttaaggactggtctacttggttcagccaactccactccagtttaatgtctagaattgtgcttgctgttgtttcggctactatgtaaatgttatggtgtaatagaaaaaatgttatacattgagtgtaataagtgaaattgtcaagtgtgtagtgaagtcttgatcgagacttagcaaaaaggggcacattagtagttatgagactgagattctagctagaactactcccttaatggttgtgttgtaagcttctagtgcccagtaacatataaaatataattaatattcattaacacaaagaaaacaaatgctacaagcccataatcaatcactaaccaaagaatattattcatataagaaaacaacaacaacctaaataacactacaatcctagttaccaaaattaaacaaacagaaaatcagaaaaaaaaaattcattatctaaagttaagcaaaccctgaagttattcaataactaaaaacaaaggttcaaaagtatctaaagttatctactttacagtcttgaatgaactcataataaaaaacactaagaaggatttattaccgtgggccttgagaacacgcaaaatcttacttccagtaacactcttaacctgagcaataccgtgagaatcacaccgatctgagatggtgtaagacccttctttgcaaacttgcaaaagttctccttaacctaacaacatacattacagtcaaataaaattaatgaagaaaattaaaatcatttaaggttacaattaacaaaataagcaatcaaacatacatcttgagaggggcttcttggagactaaggctcatatcttgacttactttattctctcgtgcgagctccaatggagagaggaggcagaggttataggggaaaaggaagaggcgccgatggctatggctgcgccagctcgaagatcgatgatctctcggcggtggcaatctgccgagagcgctgtgaccaccttgaccgagcgattcaacagcgttttgccttcactgagtctcacatggcttacattctctcttaaaggtattggtaactcattacaaacttttattcagcaggagttagctaattcttctgggcctccttcctctcttaagaagcttaatctccctcctcaacggaaaggcgatcttgatgtaagaagactatcaaagcttcgaaatcaccgcaccatcactacaattcgatgctgatctacaattccattccgattcagactcggatgattcgggttcgcttcaccattcagatcattcatcgcctttgcacagtctcaatggtatgtatggttacaaggaaactgatcaatggttacatggaaacggatcaaggaggattgggctcgtatggaggagggttttaaaatatgaattatatgcagaataaagctacgccttctgtggtctaccagcaaagacccctcagtcccgagatcatacaccgtgtgggtgacacttcttcttcttcttcttcttcttggagactacagggaggcggaggtcacaagggaagagggagaggcagaggttcttggagactgcagggagtctttcgcgtttaggtcgaaatgatgaacaatattgttttgcatttgggtttagttttagggatttcactttttgttgcgtcggttattaactttcactattgtattttgcgtcatttttaaaaggtcgctaaccaaataattgactgttaataaatgacgcaaaatgaaacataaatttttaaattttctgcttatt

SEQ ID NO: 267671 - DNA, 702 bp, Cannabis indica
tgagtattattggacctctttttacacaaaaatattattttttttcgttgtaaaaaagtatactatatgaaaattttaaatcttgagtttggatgggctctaagcatgggtctagcccaccttaacacagggtgggacttgtatattatatgtattaataataatttgagaagtaataataaataaagaatgagattagtttatttggatgtttcttaaatttaatcgtatgagttttttattacatgaaaaaaataattatattgtaaaaattagtatttttgtaatatattatgtcgtgcggtttgaactacgattattaaattctaaaccatagattgcactacaaaatattttaaattgtattttttatacagtgtggtgtggtacgagcagtttgtacggtataaccagtttgataaacaccccaagattgtcttatatattcctctttctttcactcttttttataaattatgtgagagtttggtaacacttttatctttaaattttttaatcaacaaaaataaaagtaaaaattatagtttttaaaaaataaaaatgtgtttataatttcttttatttttttaattttaaaaataaaaacaagagtgtattctataacttttatttttattttatttaattgggatgaggttcaagtctaaatcgagatcgtggttcgagtctcagtagcttaga

SEQ ID NO: 267672 - DNA, 614 bp, Cannabis indica
aagaaatgccgttagataggcacttttaatatatatatatatatggtagacagctatgcacctatccatacccttttaaaacgtaatcaacaaaacaaaatatattatatacatacacacctaaaccttacatctagaaataaatattaaaaacaatacgtgtaatgtttgtatcacgttatactgtataacattttggtatatattaactaagtcaagtattaagagagttgaccaaaataacacatatcactattatttggtccaaaaatagaagtattacagccaaccttgagatggatgttgcgaaatatctaacacgcaagtatacgtatcgtacaagtaatactcagataaataaaatcgttcttgttgaccggaaaaattgtcaactgacttagagtctaataaacgctgagtaatcaccaataaagagttaggaataataaataaatcgtaagaaagcacagaattatagaggttcgaccccttagatttaggttatgactggcctctttttattatattgattatgagataatgttgtgcagatcactaagaaaagcaaagtgaactctagctacaactctcaagatgtttatgaaaaatattca

SEQ ID NO: 267673 - DNA, 960 bp, Cannabis indica
acaaaaatactaattattttaatcaattagtgaaaatgcagtatatatgacaattctcttattggagaaattatttaatttttaataatttgaccttttattattttataacacattttcttttagtattattttttaatttttattattctaagaaattttggggtataacttataagtacccaaagtttaaagttttttttaatcgatattgataatgtttggtcaatttttgatacagtggtgatgatggttgtagatatagtggccattaccagtaatgacaacgattttaaatgtattcacgactataagtgagatacaatgatgataatgactttgaatatagtagtgattaagtaaaatacaatgatgatatcaattttgaatatagtgataactataagtaagatttgataatgacaacgattttaaatataacagcgactataagtgagatacaatgataataacgactttaaagttttttattctttcaatttacaagctaaaatatagttttcacctttgtcacttacattatataagttttttagtttgtagtgttcaaaacatttttaataaattacatcaaagaattatattttttactttacttagttaaaaatttactctactttatttaattagagatcatgagttaattaatatttttaaaaaaatatctatctattctctttttaattctctaattttctaattttttattctactttaaattttcttatttttttttattttatttaattagaaatatggtgatgaaaattatttgaagatatttctttacatgctttctttttataaacatataagaaattttatgatgatttttttttttttttagaattctttcggctatatgtttggaagtttagttttgatgataaaggaaaaagatagagaaaatgtaagaaaaaaagtgtatagaacaaaaaa

SEQ ID NO: 267674 - DNA, 1121 bp, Cannabis indica
ttttagctgcataagtacccaatgtttgtaaaactgtaattttcttccaatttcgtcagtaaacatgtctaccataatcatttaggaaggcaaaattaagtgggaaggaatctctacttcttcatccacacaaagtaggaagcacctaacgagataccgaaagggactcgcgctaaggaagtacgggttaaacccatcctatttaatatgactaaaatatactgcttggggagcatgaactagacggaaggaagtattaccttgtctgaaagtgatggctctcggagtgccaatattaagaagaatatccctgaatcgcctctcaagttcgctatcttcatccagcacctcgcagtcttcccccagctcgaccgaccatctagactttgtcttgagctgctacatatattacctcttcagctaatatttcaaagaccccttcccggatctcttcaggtttaggtgccaaaccacaaaatctagagagatcaatatattgatggttggaaattaggctaacatctcagagtttagcagtattactaatgaccctacgtctagatcctcctttgagtaggccgcatacaccgcctcgtgagcctttattctctgggactgagaaattcgtacatatgagcctaatgcctgacaaagggaagtgttaaaatttatttttgaaaaaactaaataattggtcaagaaccaatactggagatgctagaaggatggaacttaccgactctctgaaaattcgtcatcaatgttggatgcatttggagtgggaagccaaaagtgaagaacaattacttttgcatatccagaggatgtctccataagctattgggacacttaaccttattcttcattttgagatggtaaaaaaccatcgttgttgtggtccttcttacaaagcacaggctccaacttataaaagtataatacctaggtgggacaaggctcatccatcttcaattccttattaaagatgtatcatctcacaagaagtttgtaactttgcgataggggtgaaaatcggtcggttatggtcggtttttaaaattttataaccgaccggtcggttacggtttttattttacgtaaaaccgtaaccgaccgtttag

SEQ ID NO: 267675 - DNA, 823 bp, Cannabis indica
aaatgcggattggatcggatgaacaaccctagtatgtaccttttactttaataagatggaggagaaccaattgtgatgaatttgagtactttatgaaatgcttgggcatataaccaaagtgcaagcaactagatataataatatgatcatatataattataatctaggagctcatatgctcagttccttttttcttggatttgattcgagatgctagctgaatatttctcaactttaatttttttttgagaacaattaattcatcaatatcttacaacttgctttcatcaaatattcaccactaaacaatgctaaagagtttctttttcttttttcatcaattccaccaatcatgttattttatttttaaattaagcatttttattaagtacctagcttgtattgtttagtatttttcttttttttttcaccctaatttattaatttattgtagataaataaataaataagtactacatatggttggtgccaaacagctcaaggtacagtatcaaatcagatcgatatatatgcccattctcatgatgattctcataattagcttataattactaacttatacccataaatatctatgaattaactatttaataaacatgcattgtcattattatatatgcctactacaacatgaatatatggtacgtgatctttattattgattcaagtttaggattagctagtatcattgttaatgatgattattatttaagaagagagagagagagagagagagtgtgtacgtactttccgcggcctatttggcaattgagtttatttaggaatcgtatgccagtgtgtt

SEQ ID NO: 267676 - DNA, 578 bp, Cannabis indica
actcttaatgattgaattttaatattcttttgtttcgacagaaacaacagtgtaatgtttgtagtttgcacttctcattctaactgggttcccatataattggattgtctattttttgtgtggataatttgtatatggtagtgtcgacaaagttgtggcctttgtattgtcatcaagttcaacatatgctatagcactgtaaaatgcataaataaattgttagtatcaattgtaattttaacttaattttaataaatttctatatatttaaatttaccgaggtgtaggaaatctatgtttgcaatttaatcgtacatctttaaaggtcaataagcatgcacactcgacttatcagaaaaaaataaagatacatatatatttgtataaaaacagaattccatatttggaatgaaaaactaaccaaaaaaaacataatatatcaactatttataaacctctcctataaatatatatatatatatgggtatgctcttaatgggtattacctatgtatgggtactttattcttgaccattagataaaatatctaatggttgatatttataataattaattaa

SEQ ID NO: 267677 - DNA, 2065 bp, Cannabis indica
gttggaaaacacagacttggggaattttcaattgaactgttggattgtattgccttttctaaaactctgtatcagaatcaattaaaaaaacccctctttttacagtcattcttgattgaataccccactggcttaacaatgaagaagatgaaactcgtggaatgaacaccttctctagttggttggtactaattcacaatactaggagtattggatttggtggagttatatttcttttttttttttatttttaaaatattgtatttttttaatatttaaaattatttttttttgttgcaataggagtttctatattagttttttttacgtagatttacgtaaaaaaagtaaaaaaaaaaatgaaaaaaatgtactttttttaaattctcaattaacaaaaaaaaatgaattaagagaaattatttcatgtatttttttttaatttaattgttcttgtggattctgatttaagttgttctgttaattgttatgttaatttctgtaataatataaaaataaactgctttaaaatgtaaaaatgaaaaaactgaaaaaaaaaaaattaatattgttcgtgagcattgtatttagattttttgaagtttatatatttatgaacatgagcattttaattaatttttataaataaatacatccaattaattggattttttaatctaatccaatttaagtattttataaacatgaatattgttattagacactaataaaaaaaaaaagtatttaatattattttttgatggtatcttacaaatagttaccaatattctataatagttattaaataaaagagtatttgctataaaacataagtaattcctattgtagggtatgctcaaaggtgggatagtagggccacgcctaattcccccacctaaaccaaaaaaaaattctttaacagaaaggcttttttttttttcaccaattagattttttttgcccaaaaacttcccgataccctccaacataatatcactatgagtgttgcacttttgtgaatggtaagtaatatttcataataattattaaattaaattatatagaatctgataattaatttaattaatatacacacggaattaaacactattgatatattttatcatctttctaaattaaattatattggattagatacttaattgaacaaaatacagtacatatcgagaggcgatgtatgatgtattcagttaaataatgtatactagtgctgtaagttcgtgcatgtcgctcgacttgtatttatcctgtatttcaaaaaacaggttgtgtcgtgccacagtaaaatatgagtcgtgccgtatcatgccaacatttttaaaagttaggcctgacacagcctgtaagcccgatattcgtgccatgctcgaatgcatgccgtggtttgctcgtgccaacccgtatttcttaaacaagtcaatctatttttatatttgagcttaaatttatattttactttttcatatatatatacatttttataattatcaaattataagtatattttaaagctttagttatataaatataacttttaaataatattttacagataatcatataaaaaaattattaatatagttgaatatttactgataaatatttaaatttatttataattaataaattcatattttattattattaataataaattataaatttttttaatatgttgtattgtattttttagtcttgtatcgtgtttttcgagctagtttatttgtgtttacgtgtgatgcttttcgtgtttctcgtaccgtatcgtgcttaaagatatatttttcgtatcatgtcatatcttgtcaatttataacatcatgtcatgcatgctgaaatttattatttttttttcgtaccttccaatctcatgccggtttcgtttggtgtcaaaaaaacccgacccatatacaagcatacaatatgaataattaagtagagacgcgttttagtatttaggtaaatggtgtatttagtgtgtattaatttatcaaagaagataataaatgcacacttacattcacataaaacaactcagctgttt

SEQ ID NO: 267678 - DNA, 1065 bp, Cannabis indica
taaatcctacaatatcttctaccaattttaaaaattcaccattttccatagtagggtccatatgatatgactacataattttgagttccgaagtcctcaaataatgcaattgatgttctcaataacatatcatcacgcttgcaacaatcttcataaaaacaataaagatcataagcacaacacatctttgaccttataagtgacaccttctgacgtaactcttcaaccttacaaaattgcgcaaaaaaaacttttatcaaatctaataatttcttatatccatctcgacctacacacaactccgacaccaaatgataaattttaaaaataacacgacaaccaaaaaaaattattagtcaacacaaccaaagaagaactaaaataaaattatccaattatttagttaaataacttaaggtctttgttctctcctccctttctagttccctctctctcgttctctttaagcatagttgcatatgtttacaatatgagttgtagtttaatagcttgttttggtatctgaaaataatgtctacttatcctttcttttggtggaagaagtaggcatttcactaaaaatggagctaatgagatattagtggaaaatgaatattgaatattactttctttcatattttatctcattgttagggctcaaattgtttattctgacctttctccttggtcaattcattgtcacaatgctcacttgccattcaatacaggcagtctttgtttccaatatttttcgatgatttaaattgtgtgatctcttgagctgaccaactttaattttataggtatcctggtcatgctcgtatgtgggtaatacttatcaggtctggaattggatagcataaaaggggtgattatgatttggctacggaggactggcataattttgtcggttcgacaaaatcttcttatggtattgatatgagtattttatcaaaaacctttcccaaaagagcaaaagaaaaaaaaaatactatctccaggtgactcctaagaaaattttaaatgtatctaactattatgttcttgataatgtgacttgtttaa

SEQ ID NO: 267679 - DNA, 592 bp, Cannabis indica
aaacagttctcaattatatgtaatcaaataaataaatttgaattcagaattcataaaattttagactattgattgtattgattaattttatcaaaaaatttaaatttagggtaccaaataggtatgattgtaatatacaaggtaccaaataagcattattaaaaatacaagataccaaacttgtataaaacacatggtaccaaatatgtagacacccatcaatattctcccatgatttatctaagttcatgcaccctccaaaatttgacataaaaagtcacacaatttactatgaatacaacaaaaaaacaaaacaaattaagaaaaggagttaatacattttgattataatttatataccatttatttccaaaaaaaaaaatgataccttctcattatgtaaatactaccatataaaaccaaatcaaccataataacaattcaagctaataaaaataagggaattttttttaaaaaaaaaaaatccttcttttatttataattttacagtctaaaatttttaattacaaaaatacgtttgtaaagttttaaaattacaaaactacatattgcttaaaaaaaaaaaaaaaaa

SEQ ID NO: 267680 - DNA, 1522 bp, Cannabis indica
tgatcaaatttgtttgcgaaattcgaaggtacccaagtaaatacagtttcaaatcacatacttaccaactatagtctgtatttcgataaaacataagatattaaaactaaaaggattaattatttcaaaaatactcaaaaacaacaaaaggtttgcgtttttagagaattctatttctttttatttatatttttacagaatttctttcttacaacatgttgtttttagattgtttgatttagtttttatacgttattttcacgttgcatctatatagtataacattacaacaatataaaaataaaattatttttctccaataatacaaatccgtaaaaaaaatgaaaaataaaattataaaaaatgtaaaaaaaaaaaatacgattttagatactttatgtaaagtttttaatattaaactacactaatcaccaaatattacgttgcgttattaattatataacattttagtagcactcaatatttaataaattatatataaataaataaaattttataaattaattatttaataattaaataggaagaataattaatattatgtatacctaaagccaattggtttgtaaggtgactcaaattgaggatgagcaatgaacctaataaaattcctccaaaagaggacttgttttcccccaatattgcaattaatattagtcccataacatattgggtctaatatatcaccattgccttcaaattctttcttctcctcttctcccatattgaaaaaactctcacttatttccatcattttcttcatcacactatccgaaattccatggttgatcaactataattaatcgacatcattacatcaattaattaagaacatgttaatatatgttattacaaaataataaattaaggttagaacaatattatttgtttaccgtgaagaaaccccaatcttcacaggccttgcgaaggtcgtcgagaattttagagcgttgatcaagattgtcagatgtcaaaagagaaaaatcaatggtaggaatcgaatattcaatgttgtcgaggtcaactacttcttcatcgctaggtttcacagcaaattcatatttggatgccaacaaatttggatcttccataatagtatttagggagagattagtttagttgtaattatgagcttaagcatttttgttttcatttataggcaactataaatgatattttatttatgatcatttattatattcatgcaactatgtgttttaaataaattttggttttgttaataattcattttttatctttgtacataaaatttattatttgttgactaattacacaataattgttatcattatcaataattaatacaaattaaaatgtaagcactaacaagtattccataatttataataagtgcattattgttgggtaccaatgttgtctagcactttctagacatgtcaccttgtgattggctagcgatactctttaaaagtttttacattaaactatatgagatctgatacttggttggatcaatagc

SEQ ID NO: 267681 - DNA, 988 bp, Cannabis indica
caaatcccataacactcttcttttaatttttttttttatatatactttttagggccccacaatttaattagtcttgggcctataaattttcaaggccgaccctgcatatgataattatattttataatgaatatgctaagtgaaaattatttactattaagtacattacatgatacattaaaattatacgtgtctagcacgtgttgttccaactagtattgctaagaaggcactaggaattggtagggagttggtttgaaatggtaatattccaaaaagtataatgtaactttttactgattgcctattcttaatgaagttaattttcattaaaaaaataaacaaactaaaaaagttagttaatattttatacaaaatgaagagtcaaaatgaaacagaaacgtatcacagtcaaatagaaagaaaaaaaggaaaggtaagattaattggatgtgcgtagtgggggtcacttcttcctgtacatctagagaagagaacattaataaataagagagtgagagtgggagtgggtcccgagacaatggattgtgatctagattctcgtagggcctactctctctctctcttttattattgtaaaacgatgggatccactaatgcaagttgaatcatttggatctttctaaagattaaagattctaaaatcttcctttggagctacaccatttcacttttttattttccatttttcatttacatcagagtactcactaatattcataatattttgttgatgctttgtgtggtcgaagcggcaacttgctgcttggcggttgaaacggctttagatcttaaggctaattttgttattgtggaaaataattcgagtgtggttatcaatgttcttattgggaaggagtctcaatgggcgcttgagaactacatctcattttgtaatagatcttctcctttattatcaagttgtgtcgtttcttatgttaatcgaacctgtaatttcgcggcccat

SEQ ID NO: 267682 - DNA, 1843 bp, Cannabis indica
acaaaaaaaaagaaaaagaagaggttgttactgaagctttattttgtttttataaaaatttataggctaataaaatggagtagaggaggtttattttgcagggtgtcattaaccaaggccctgtagtttctgaggagcattgcagaattattttgacagcgtatacagagcaggatgtgaagaaaataatttttgaaattgtgggggaagaggtgagtaaggatgttcttaattttctccacacagggcatcttttgaaggacattaatacaacaatgctcactcttgtgcctaaaaccaaatgtttagattcggttagtgactttcagccgattttcctctacaaggcggccacaaaaattgctttgttcaagattgagggtggtacttcctactcttattgttcaaaatcaaggcggatttatccaagatcgtcatatcatgatatgccaggactaagaaaaatactcgtgcaaactgcataattaaattggacttgaggaaggcttatgataccgtttagtgaactttcattgaggaaatgttaagaggctccaattgccagaagcaattattcgacttataatattttgtatcttaaccccgcgctttataccttaatgtttaatggttcaatgcatgattattttgaggctaaaagatgtttaaggcaagctgttccattatcgtctcttctttttgttttggggatagagtacttgacccgtgtgatgaaaaaagttaggcaaaaattgaattttaagtttcatgatagatgcattagctttgcattgaatcattcgagttttgcggatgatgttttgctattttgttaagggaactttagatccatatactacatgcttcaaaggttaaagctttttttgcaaaccactcgtctcttctcaaatgagtctaaattagcagtgtactgctatggtatggaaaatcatgagttttaacctaaaaactgaacccgatgacgtggacatcaacatttgacacatggaaagaaaaaaaaaatcttgagttgagaagtccttagtcaaagagtcgacctaggaagagtccctagccctacactaagttgacttcgggaactctggaatgggtgcttggatcccctaagttattttcaactcactatctttcagtattctatactatgaaaatatgaagcatccaagtccaaggcccgagaactaaaaacacacgaaacaatacctcgaaagtcaacctaggcgcctagagtttctagagccatcttagtgtaaatatgtaacatcctacttagagaaacgccacatatcgtgattaccactacaagaaaatattctattactggcggaactattaggggcagactacatttgccgataatagtaggattttttcaaaaacaaaagtaataatattgaaggaattgctttttgcaggaattttcccggtattatattttaaatttattagcagcggaatattaccagcggaagtccgccactaataacgttaaataatatttaaaatattatacttttaattactatcggagaacctctgtctctaataattttatatttatatatatcagaactcttctttatctctctctttgtctcccacttcatccctaatatttttgaccacaaacattcaatatctctccctcttcctccttaatatcaaaacttttactcacctcctcttgttcatcgtggactagcccaccattccgaccacacaacgataagtccaccacctccaccgttgtcaacattctcaccgctttcactggactcatcttcatcattgttcaggtatatatgtatagttaggattagtt

SEQ ID NO: 267683 - DNA, 663 bp, Cannabis indica
cattttgcatcttggccctatattatatcataaaaaaatacattcataatttacactttcacatcaaaatataatgtttgaagaattatttgaaaaaaataataattacttaacattatataatctagaattctgggaaagagaacagatttgtcgtggctaatctaattttttatttatttatttatttttgaaagaaaacatggatctcattaaactaaatcaactgcggtaagagaactaaaaaaacgtgaacaaacattcgtttagatactctcttaacaaactagtaacagaagtagctagtgcatagataacagtcacaacactattcgcataacgcgaaataatcttacaaaagctaccaccaacaactactaacaaagaaataaaaataattggttgaaatgtgttatttgaattgggattatttatccagccaatgacagttgttgaatcactttcaataacaaagatagaaaatatgaattgacgagaaatatgcaatcccagtcgaaccgcaagcaactccgccacacacaccaaattccccaaccaatcccaccggtcagcaggcccaaacaaccccctcaccatcccgtatcaccccgtccaaccccacaaattcactcctgacttcactgaagtgtaaagtattcaaag

SEQ ID NO: 267684 - DNA, 755 bp, Cannabis indica
ttttttgttgtctaagttgtttttttgagtgagatgtgagtgtagtgccggcagattgtgtgagtgcaactataatccaacccaaatgttcaattctagtttctatgcctagaatactaagatcatgatggcccttctcaagggatgactcgtgaatttacgaacaactttattcttttaaatattaaaaattaattattatgtaataatgcatggtccctaattatactatttgcgtaatatatatcatttaagcacttacatttaggggttttaatattttaactttagtataaaatttgatattaatttaaaatcacacaatgtcgcgtcacgtatcaagccctgccctgttgagagcatatgaactccagttagcagtgttatattcttcctatttaaggtcaagaaaaatctaaattgtacggacatgtttgtttgcctaaaatattcaagatattttattggtagccaaaagtaccttttataaaaggaccagatagattaatttcttcttcattgggtaacaatagtattggtccaattacgtaatatcactaatttaaaatccaaatttgaaaagaaatacttgaaattagatgagtaaaataagaaagatattttttagaggagaaacaaaggttagtaagtgtgtaaccacttggggttagctcaagtggccataggtgggtgtgtgagtgttggaggtcctgggttcgagtcccgggtaaaacatgttgtaatatataaacgct

SEQ ID NO: 267685 - DNA, 1869 bp, Cannabis indica
aaaaaaaaaaacacaaaaaaatattcttgttgattacaaatttaaaagtgtttttcttttgacatacccttcccattataaacacaaacgactctttctctctcccttgtataatgtgaaaatggtacctatgatattttagtacaatttaatattattgagcattgttattcaacgttagtgaagtctagtactatctagagaagactttttacgattagttagcatttttttttaattattttcttaattatatgagattcgatatttaattgcaccgatagtaataaaaaaaaaaatattaaatattactaatatcttttacttttaatatttctctttaatattagatcttacttattttactttataattatagaaaactgttaactttttgtaaatgcactaatattataattcgtttttttactatgtggatgtagacgtagtgatattttaaacattttagctaaaattacacctctaactattctaagatgtaaaattgagttagttttacatcactcaattaaatagtagagatactctagcaatactttggtataattcagttgaggacctaacatctgccaccctatgtaccttgaaaataacaataattgagcattaataatactaacatcaaacaccaatgaacttaaataaacactttattgctagctagtgcattttcactataattaaacaaaagtttttctttctaattataggaagaaaaagaatattagtgcatctatatctatttttctattttactcttttttatttccaatcaaacaaataattttgcttcttttcttctctacccaacatagttttaagcatattgatggcctagctagctaggtgcgttttacttttatatattaagaataaaatacataaaaaagtgattaagctacattaagtttcggaatattccttttaatgtgggtttcaaattctatttataagctatttattattatttgtattggtttcttattagtcaaataagcaacggttgaaactaaaaactctacatacaaataagaccgaccataatattgctttaaatcaaagtggaaaaattatttttaaaataaaactaagacacaccataaataggttcaagttgcaagttgatataattatatcgaaccaaaggaaccccaaatcagcatttgacagggaaaaaaaggcaaggcaagtagcatgtgagagactgaaaaacagtgtctttttggtacgctttttgtgtactttctggcgtggtatttattaaattattattattattttcattatttatttgtttttagataaatataataataaaatacgtggcgaagaggtctcgcattttgttagcactaccctactcgtactattttcacttaaaagcactctctcgctcttgccattttggcatattccttagaatgttctttctaattcttacatatttatttattattcatgtaaaataataacaaaaaagaaagaaatgaaaagaatttaattgttttaatttgtttcgtcaatcaaaatattatttcatgcaaatattattggttttttcatgtagtgtcaatgaaacttggaaagtattgggtgtggtagggcacttgggtgttagggtgggccccagttggttttggatttgaggcaaagattcgttcgttgttgctatttggtagggtggagctgagtcagatatggattatgcaaatttcgataagtcagagactacttgcggtgagggcgcaccctaagactaagagcatcaggagacacaaaatttagtcttacactatcactaaatttggtgtcaaaaattatttctactccaaccacaataccaaaaat

SEQ ID NO: 267686 - DNA, 674 bp, Cannabis indica
tcaaatataatagaatttttttgttaatattttttgtaaacatgtataagaatttacaaatttgtatatattacaactatgtaaaaagtatttttgataatgtcaaattacttaaaaatttatgtttatagatataataaaatttctataaaattaatctcaatttcgctataaacaattatagttcaaacttgagacgattatatacagaaataatattataatcataattagttattaaaattttaaataccggtttaataaaatatataattttttttaataattatatgcactaacctactacatctaaccattttcacgcaattaggtgtaatgttaatgcggtgttaaactaatttattaaaggttttatttttcttgtatttgttcacgtgttactaaacatgattatttttatacgtaaaatatatgacaattaaacttatacaaaaatatatagtgcaaaaattaaacatacgtacacactaattaaaatatatattgaaagttactttaaaaaatatatattgaaagtaattataagataaaatgaaaaattataaaaattataaataattaagaaaaatgatcaaatgcatagaaagaaatactaataattggatttttatgtaattttgaccaattcagaaaaaatatatgtatataactca

SEQ ID NO: 267687 - DNA, 605 bp, Cannabis indica
tttgtagcagtgcaatgatgaactagtaattttctgaggatttaagtcttaataaatgtttaattttgtgttggacactcttaccagtctttgtttcagctacttgggttcctcttgcaatttcgcaatggctaggtttttggcatttctattagtttattggatttggtgtgaagggtaacttatgagcctactatctttactgatagtggaagcaagttgagctgaatgcctctataaaggcacagcacacattgtagcgtgtaaatatcatagttagccttactttcacttatgggtaataaagttggtaaataatctccaaggatcaattatcactttggtcttagcttcacttctatggtcattttttcctttttaatattgtttggaagcatattctactactaaataattttattatatattcttttccagtgaccgcggtattgtactgtatgacttgcggacgtcaaaagaagtaacaaagataataatgagggtatttatggcacatctcacattgatattcactataattatttaatgatgcccaaactatttccaactattcttacctttcttttattttattgtgacagaca

SEQ ID NO: 267688 - DNA, 1504 bp, Cannabis indica
ggaacaaaattagtatttcgatctacaagaaatggaggagaaaaaggatacaagaatctatacataatggaaaatgcagaatgtggtgaggttggaggaacaataacaaggctaacagaagggaattggactgacacacattgtagttggtcaccaaataatgattggatagtattctcttcatctagagaaaagtcaaatgaagcaccagaaactgataatggtcttgacccaggatatttctgtgtgtatctagtgaatgcaaatgatccatgtgttgtggtaagagtatttggaagcggggatgatcttcgagggcatgtaaatcatccatttttcagtcctgatggtaggagtattgttgtgacttctgattttgctggtgtgtctgctgatccagtctctatgcctattcttccccactctgttagaccttatggagacatattcactatacaaatttatccaaataacattgcaagcaaccaagatgcaatgcatgtcaaacgtattacacatagtaggtatgagaatactactgctagttggacaaagttctcaactcaagacccacatgcagcatggaatattcaattagaatctaacaaagatcaccactatatgctcaaatgcccttatgcacatcctaaaacaggttgatattgctttctttagtacttgaattattacaattatagtacttacatttgtatctaacttattctttaactgtcaaaagtacaaaattattagagtagtaaaacttaagtacctaaattattttttatttggagcaaaaatactaagattatcatgtttgttaaacataagtacctacctaaattatttttttggtacttaagtttgtcaacgtaataattttaatatttttgctgtcaaaaattaatttagataattaagtgctacaaacataataataaagtacttttgccactaaaataataatttaaatacttgaatactataaatataataatttaaatacttcttgcagcaaatatcactatttttattacatgcgcctttcttaattttgtcattttcatttcatcttcttaattccaataataattaatatatgtttatttccaatgtaagctcttgatcatcgtttcttgttttcaatatggtgataataagaactacccaatcactaaaattgtcgtggtttaattaaatgtgctttttatcagaaaaatggttgtgtgaaaaactaatttagttacacattgtacttaaataccactgtaaaattgcaagaaatttttggttataactaaaataaaagtgattgattaatgcttaaatttatatattttaagattttaattgtatatataaatgtatataaaatcatttaaattgaatattttcatagttttagttggaaaattattttagttgaaaatatttaatttattttgattttgtgtaatttttttaaatgtgagcaaaattctataaatgaaaaatgatgtcttaa

SEQ ID NO: 267689 - DNA, 928 bp, Cannabis indica
tgtaaccaaagaacatcaaaaataagataaactcgtgtagtatataaatttgaactacaaaaccacataaaaaaaattctttctcgtattaaaaatatatagtattcaaacaggggcctcagacagggagatccaatgtctcttttattatttgtgttgcgtatggaatatctatctcaaataatggggagaattggtgacaaacctgatttttactttcatgctagatgtccagcaaccaaactaaaccacttggccttttctaatgatgtgctacttttctacaatggagactttagaagtgtgtattactagaatcaaaatgtaaagttctagaaacctttcatttgctggtagagttgttcttatcaacttagtcttgatggctatacatgcctattggtgccaagttttgatatggcccaaaaaagtagtgaataacatacaagaattttttatggaatggtaaagctgagtatcaagggccaggagcaatagcttgggattttatttgccagccaaagtcagctggtggcattggtttcaggaacactgctacatggaatagagctactatggggaaatatatatgggtcattgccaataaagaagatagtctatggatgaagtggatcaacagtgtgtatttacatgatgctgactggtgggcctataatgcttcaagccaatgcagctggtattagaaatgcttagttaggctcaaagatcagttcaaggaaacattgcaaggaggaactgttctgcaatagcaatatactgtggcacagggttataaattgctgatttcaactcgaccaaaggtgcaatggagtagacagatatggagtaggttaaatgcaccaaaacacagttttatactgtggcttgcaatgcactagcattgtaaatcgagagtcaaactcagaat

SEQ ID NO: 267690 - DNA, 822 bp, Cannabis indica
caaacactataatttgagtaacataagtttagagagggattgccttaatttagttattgatttaaatttttgtaagtctatgtttttcccatatgacattgtgatttaggattgtaagagattattgttaaacctaattcttttgttttcttgatcagttttgtaaaacagtttgcaaataaagttatgtatgttttagcgctctattcttgttgctcattgtacttttagcggaacttccatccctattgatatttcatctttagttttggataatttaagttaacgaagttatttatttttattaaaaaaaattagaaaatcaataaaatataatatagaaagaaaagagagtttaatgatgaattattatgtagctatgcttgaaaagtaaaggctatagggttagctttatgttgattgttggcaatgccaatgaatgatagtgatgcccaacaatacatatatatgtctttctttcaaatacacttttttatttgtttgttgttaaaaaagtaattagttatttaaatttaattgctaagatgtttgtgggtttgctttatccaatgttaatccactttggaaattgctatgataaatcaattaaatcattatgagattagaatcttttgcaattgcatggtattagttatttaagttttattataggttaattaaaattatgactacttttccaatcaatatccacaccacaaagtaactactattactttgattccattaattttcacaaaaataaatctattctttctatatgccaactgcatgtacattcttcttcttctttctataaagaag

SEQ ID NO: 267691 - DNA, 891 bp, Cannabis indica
gttttagaacgatggtaaccaatgctctttccaccatcaatcacaaaagggttaaagtggtcagtgtttggtgctatgttcacagtaatttgtatattttttttagtagaatcaaaaatttcaatgtgtcgataatttccacgaacagttgcaacaaccacagtgttagcatcaatggccgctggagtcattgcttttatgttaagaggggtgacacgaattcattctgattgtaaacccttgctaatgtcagctctgaatacaccccagactccattttttttacgatggaaaaatatgacattgtcacttccccaactcggccaacctccattggttataactaacttgcgatcagaaggattatctacattcatcacaaaaatatctgtctttagatcttcaatctcaccatcccatccacctttttcctggaatgatgccactgctaccatctttccagaaggtgatactgatggatttaggtcagcttctcctgcaaatgcaacatcgagagaaagaaaaataaataaacttaattagtatttgtactagtatgcatgcatgcataattaatatttttttttatacattatgtacacaaattaataattaagtttgtgttagttgtaattttttttgttagctgaaaagtgtcgcaaaatttttcatattcatgtacgttatagctatttaagataacctacaaaattttgagaaattccgaataatttataatatagaaaacaatgttcaaacaatctattttacacgcgtataaaataaaatagccacgcgtgcaatacactatttgaacatagttttcggcgtgttaaacttttttcaaatttcttaaaattttgctagaaagtcttaaataactataacgta

SEQ ID NO: 267692 - DNA, 2727 bp, Cannabis indica
gaggtgtcgccgagggatcgccgaggggtcgccgtggggttgtctgggctggctgcagagatggcgtgggtttggaagaactggaagaatgttgtaatggagagtgagaaaatgaagtttcatttgtttttaagtaataatatttttatttttaaaaataaatattattataaaaagtataaaatttttattgtatacattaagtgtatgataaaaatatatatattaaacaataataaccacacgatttaaaatcgatggttgaaaaagtatcctaccggtagagaacttttgttgagtcctactatagtcttgctcaatatatataggcaaaactatagtaagacttaacataaatttcttactggtaggagaaacttttttagtctgttaattttaaatcatgtgattattaaaatataatatatatatatatatatatatatattcttataagcttgtatataattaaaattttatacatgttataataatatttaattatataacaacataaaaaaattctaccataaaaatatataccttacttatatcttaatgaccgaccacatgatgtaaaataacttagaaatgctaagtcctaccatgcccatatcataacactatataccttatatttgatatttgcatagagtattgctattgggcaccagtggtgcctagcaccttctagatgtgtcgacttgcaattggctagcgatactctataaaaattattatattaaactatatgggacccgatacttaattgcaccaatagcaatattgacacgtaggagggtgctaagcaccagtggtgccctttaacatttctcatttgcatactcacaattaaaaaggccttgtatgattaataatgggaaatttctaggaaaattgttatcttacattttctatatgttcccatattttttcttttaagagatttttagtataacttttacaatcctaactatttacgatcacatataaatttttaaaaattaaaagagaaacatattttcttatgcttttctggagcatattccactaatatttccataaaacactcccacagattgtatataaagtattggctaacagaaaaccaaaaattacgagaccagaaataaaactataccaattattatttaggtaacagaagactcgaacagttatttttctttttgaaacgacagtatatccaacttcactcagatcacacctacaagattagatggtctacttctgctgtcaaatttcagctgagtcacaaaacataaatttgcaagaacctactgaacaatttaacctttagctaattctctggtgcttcagtttcttgtgaacaattttggtctttcaccatccaaaccaaaccagcttacaaattgttaacacccatttcctccccaatttcagcaaatataccatccaccctcatagaacatatattcacctctgcaagccatgttgtaaggtaaacctccatagtattctcattcaactgccgattacgacccgaatttgagacatcagactttgaaacggccaatcgtggttggactggcccagatgtttcctcagaaaacaagttacaaactttcagatcatcaaattctccttgatagagctcatctgaccaattgaaccttttgacatttgaagcttcacaactgagagataacaattctacaacaagaaagcgcttcaaattcaattcaagtataaacatctgaacaagctcctcagacaatttctcaaaacaagagactgaccgaaatgcaaagactggaatcccaccaccatctcctgaatcatttatgtcttcagaagagctagaaaattctactaatgaagcattacttgtccctttgagataacatctcatggacttactagctttgctcatctgagttacaacagcaaccaattttttgtatgatgtcaacaatttgttcttataaagctcttgctgcttaaacagtttccaagaagctgactttctaatatcaggtatatcacttagagcacccagttccattgagggcatgaatttctcagaaaggtaagcgttgacaagagaagtggcaagagatcgtccattggaagaaaaagagttccattcttttcttaaagaagatagctttgaccactggtttcggagatttcgtatggcggctggcctccacagcctcgacactgatggggctagagacgaaggagtggaggcagggcttctagaatcaaaatttactgcttttgaagaaggagaaggggttgttggttctagggtttccattgttagcggttcagctcagttcgattaaacctgaaactgaaataatgaacagtttaccaaatgagatgatttcagtgacaatttatatcataaaataaaatgaacttactattgatatctgatttccaaaacttcaaaatgcaaacaaaaaaaacctaatcagaaagagtaataataataataataaaaacactcaatagattattaaaacagagaggcattactaatgtgtcaaagctttctcaggcaaattagtatagttaaattgtgtattgtatcaatatatgcaatcagttgtttaattaagttgtaatatattttccttaaataaatatttctaaactcatgctacagaaagaataaatatggatccagtgtaaaataatataaataatctttatatattaaaagtagtctatctaacg

SEQ ID NO: 267693 - DNA, 1147 bp, Cannabis indica
taaaaatataataattgccgtataacagtaaaaataaaaaaaaatagaaaatatcagtataacgtgtaaatttccctacttaaaattacacttaggtgtccatattttgtcaacatcaaactatacttaggttgttctaaaaaaactatacttagctacttaagtataaataataataacaataataataataataataaaaaaagtacaacttttaattggacttgattagtacattcccttaaatatttgtttaagttaattatctgtcacattagcgccacattagcgtcttacaataaagttaagacaattacttgctgtgtaattaaaattgattttaaattttttctcccttaaaaaaaataagcaaacatttttgtttgtacaatttaagtatttttttcgcaaatatatttattttaaattatttagtttattgtaacattgacaatgttggcaattatttatgacaactataattgtaagttggtttttttttaactagaggatttgaactcaagaggatgagattcatggggacacaatagatattgataacatgcatatatgtttagatagaggatatcacatatatgattagataaaggatatcccttacagattttttgatgaataaaattaaaaatacaatatttttgtgtcatatataattggtaatagatgcgtgattccctcagttattttatttatttttttaatatatatttgtataaatattaagtaaaataataaatgtaaaataaaaatgagaaatgcatttttatttattttactattaattgaagggtaaaactagctataatgtaaaattatgtgttgaagtaaattaaaattatacatagcttgaaaaaaaaaaaatataaagaagtgagaaatatgtgacatgcatataacgtactagaatatttctatatatatatatacatataaaattaataatttgaaatatactacgttgatagtatttgatttataaattaaatcaattaattgataaaaatatttttattaatggtcacttttatattgttatccaatttaatattttgtattaattgttaaaatattttgacaattaattataaataattaagtatttaaaaatattttaccagaatttaga

SEQ ID NO: 267694 - DNA, 1043 bp, Cannabis indica
taatatgaaatttttttaaaaaaaaaagtaaataaaataatataaagtaatttaattattgatataaataatagagtgacacattatagaaaaaaaaaaaaattagtgactccacctaagcatatatgcttcccaaaataatatttgtatatttaatgtcaataaattaaagttctgataacttaaagttgttagactaactcttagcaactatacttctaacttatggttcataactaaatgattttttaaaacgatcacaataattctcaaaaaaaaaaaaaatttacaacaaaagaaaagttgacgagcaaaaaactctacagcagttaaaatgcgggagaaaaaatccaatctatacttattcttttcaattaatacaccaaaataaatatagaatcaactggtcaggagtcaggaccataggattctatatatgccattggcagcaaaaaattgcatttaatttagtttcaaatttaaaaccgtagaccattaaaacatttataaatttataatattacgtccaaaaaaaacagttataatataaataataaatgataataatattgcattaaagaactgaaaaatcaataatgaagagggaccatacaataatgcatgttatcccagtttctctaccattcaaacttattgaatagcagaaacaagttaatgctgcatgaaaagatcaaatgtcagaaaaaattgttttcaacttttaaatatgaggttaaaataataataaaaaattacagttcatttaaggaaattacaaaccaaagatttgaaatttgaattttggttggagttcaccatttttatgattcaaataattcagcagaaaacaaataaatacggtcgatatattttttggcagtttttttttttttgaaatggctagtttgtattttttttttttttgctgtggattgatatttgcattaaaaaatatataggtgattctacaatgcaccatcttgggatgtattgatcctttatttgtttcagcatttaaaagaaatttttagtttttttttttt

SEQ ID NO: 267695 - DNA, 1137 bp, Cannabis indica
tctaccaaatcatgcccctcaaacttttatatgtattaaatcatgccccctgaactttcatccatgttagtaattttttactaaattagataaaagtccttaaatttaacaatcttaatagttcagggggaatttttaacggcaaaaaaagtttagggggcatgatttagtacatgtcaaagttcggggagaaaaattactaattagccattattttttggatagacaaactgtaagctgcactatatttgaattgaaaatatcacaacaaattccaagattctagagcaaacatcaaaaattcaccaatgaactgagaaataaaataaaaaattccagcttgcaaggaaggatatggcttttgcttttcctatgttttgggccataatattgatttttcatttgggccagagaaaattagattaggttctcttttagtgttcatttcctttgttttgtgccacaaaattaagtttggtctaaaagatgagatctataactcatagttcataaccttacctaaaggagtaatttgtaagcacacattttatttttattatattaataagttattgggatgccaaactttagatctatatatgatgtgatataatgataatatcaattattaatcatttcaaacactctatatttattttgatcacaattcagatattttttctttacaaatatcatatcacacgattcataatttagatatttcttttgagcatagtatgttgatatttgtagatattatttatatatatataaatatttcaagatgattctagaaaaataattggccatatcgaaaaactaagaagaagggcctattccagtatagttgtgaacttaacttattggctttgaaaaggcctggaagaaagatctttcaagattttttattaattttttttgtttaagtcgagattgtttaaccacaaaattatttaattcacactaatagattttctattacattttatgatgattcttatctctttaatttctgactcacatccactatctatttattataatagatttttagctaatttttttgctcttttttattttattacttttttccacaaaataaaaaacatcacaaataatccactagtctccttgttg

SEQ ID NO: 267696 - DNA, 879 bp, Cannabis indica
taacaaattaattatgaaatattgtcggtgctatatattttggtgctccgttaatgctctatgtatatattcgcatgcacactttaaaacaaattcaatggaatttcgttattgtttattaaacatggtagtatattttgtaagaaatacttatgatagtcacaacatatacattaataaatgttgtttactgaaataacatgtacaaaaagaaataaatgcgcataattttaatttgttatcccttatgcatattttgtttaattattaattattgttattgtaaagacaaatcatatgtaatattatatatggtggttgattatattgtctaagtgggagaatattagaattaatattatggactaatataatcataagtaattctaaaacttcattaactatgtgcctaatatttatcaataattataatagaatgattaatagttactaaatgtattagaagcacttgagagtaccgtcatgactaaaactagcctattaaatcctagtcccccattagtacccttactggttcaattagactaataacctcttatagttataagggtgtatcatatattaagttttaagagggtttgatgaatgtttttgtgaaatttggtatcattcatgttgtgggtttgtaatcgtttttttgttgaatattttcttgcaaaaatatgggagaaataccaagatataatgtaacactccactaatttaagcgtgttatcgtgattttatattaattgtgcaatcggttgctaatcaacgagtttgttgaaaatcgtgataaattaaaactttactaaattaccctttaattgaaaagaaatatcttccgcataaatcgggatcctgtatttaaaatattta

SEQ ID NO: 267697 - DNA, 1081 bp, Cannabis indica
aaaaaaattaaaagtataaaaatgaaaaaaccccaaatatctttaccaatttacttttatttgtccccacagtgacagggttcacaaaatttcaatataaaaatggtgtaatatatggaatcttgtagaatctagatgagagtatacttgtaaattaaataaaagatgctagaagatcgattgtgttgagcaagttttgactagtagctgtcatattatgtggatcaatttgttaaagcttttcatcaataacaaagcattttttttttattctcataaaagaaaaacatattttattattattattattattattattatttaagaataataaaacatatttgttaaattgttattaactcttgatcaatagattagggttgaaagtgttggaatatccctttccttgacacgttactagcttgtgatggggtggagttttagactaaacttatgatgaatgcaattaaaattaatgtagatgcccctacgatattcatccaattaaatctgtactattttgatcatagtacatccgatccgcattaagtgcggatttcatattatgaatctaatccaatccgcataatagctcaaattcaatccaatccatagaagtgtgtattggatcggttatcaaaatattttttttcacataattatattgttattttatgtttccaataacaaattaaaataaataaaataacaaattcaagggaagaaaagaattatatgtataaaatgtttaattttattttaaattgtatgtagaaaaaatatatatatgtataagaatgaaatatacatttaatataataagttttgaaatatatgtgtattatatgtattagaattttaaattagtattttctttacattaaaattttaattgtatatataattttttaaatttttttataaatacgtgtggattagattggattggatcggctacttttacatgtcaatcaacatccaattcgcacaagtatgaatttgaattttccaatccgtacaagtgtgaatattcgcactttacaaattggattggatcgtacgaattggattggatcgacta

SEQ ID NO: 267698 - DNA, 1110 bp, Cannabis indica
gccaaaaaaggactttacaaatgaagagagtccaattgtggacgatttgcagtgtgtacgcaagccaaatgagcaccaataaactcattccaaagacaagatttccctccatcaacttatataacatagtaacagccgcccaactgtttacttcctcgtctaggatcactacaatgcagcataaataagaccatgattattatctcgattggaagcaaaggattatattccacccctgtctagctcgcgaacgtgatagttgactgaacaagacctaggcaatcgctaaatagtttcaacagtgtgttgaccaaaaagttggcaaagaagaatggaaatacctgcaccttcatgaccactacccctgttccgattggttactctcattccactctcgtgaataacccatgtcgcttttactgctgaaagtagccctacaaatttgatgaactggtcattctcaaagatcatcaatgagcccacatcgccatgcacgaaggctacatccgggaactgattaggaactggcactaaagaaagtaaggtcatgaatggagcagagtagaagaatatcagggctaatgcaatggagattattagcaccatcaggagcaagagtagcatctagctcccaaaccactgaaaattcagacgagaaggcatggttgttgagagatgagtgactgagagagaaatagaaaagctataataagcttaatacaaagatactgagagacaatggatttattccctaatcgttacacaataacagaatagaaaatgggaaatacagcaccacagtcacacttatcactctaacatatgccacattcaataacaaatttacttaagaattgtatattatatgtctatatttagacaataaattgagaacaaaagtatataaattaatcttattttgttgtcactataccgagtaacatatataaatatatatatttatatttatataaaaagtcaatcaaaaggtaaaaaaggaaaactaaagatatacatatatacatacatacacaattaggccatacaatttttctaaatataggctaagtctgaaaaacagtaagacatgtatagccactagaacataaa

SEQ ID NO: 267699 - DNA, 980 bp, Cannabis indica
atgaataagttaaagataaacaacttgtggttataggagaccgtggcaaacatacagaaggtgctggacgaggtcttggaggggcattttgatacacctttattcctgcgaagagaacccgaagttatcagaaaggagaaagacaatctggaagacgaaggactattgaagtgttccaccagtaacacaccgaaagctttgccatcaaaggcgaggccccggatggacttagagccctctctccaacaaaagagaaccggctcaagggcgggcccaaaggacctaagggaaaaactcaatcaaaaaacaagtgtcgaaaagaaagtgccgtcatcaacaatgcaccaccacaaagaaggcccaagacgcacgccgcaggaccttcgagacaagttgaataagaagaggcaacatcatgacaaggagatggaagatctctgcagaaggacagcctcagccgcctcagaggagggaagttaagatgaagaagattttgacgatgaatctcatttttctagataaatccaatccgaacaattaccccctaattttaaagagccaaacatatcgccttatgaagggatcactgatttgaagtatcacttggacgctttcaacgagattatgaaaatgaaaagaatcacgagtagggtgacactttgaggcgcaacctacaaagtggtataagaggttggcgtcttggatctataactttgtggaaacagttcaccgatgagatcttttcccaacaccgtgcttcctgagattatgtcgtcccgaggaaaagtctggtgaatatcaaacaagcagaaactgaaagcttaaaaagctacatctaagtgcgttcaacaccgaagcggctaaaagtggggagacgtctctaaggaggagtcataaaatagggctatcgctgccagagtcagaccaagaagcaagctgcggaacacatgctcaagagagagctggatgaccttgagaac

SEQ ID NO: 267700 - DNA, 1847 bp, Cannabis indica
tcatcaaaaagaaattttttggacacaacgatcgaagtaatttttgttaaaggagggagaccgcactactaagtattttcatgctgcgtccagctctcaaagaagaaataattttatccaccaattgaagaatgaagcaagggattgggttaagtgggaaaccgatttacccacggtaatggttaattatttcattaaaattttccattccctggggtcacatggtgatgatattcttgataggattcaaccctccataaatcaagaggataatgttgctttgattcagccggtgttggaagaggaggttcgtatggcagttttttagatgcatctagataaatatcttggacccgatgacatgacacctgtgttatatcagaagtgttggcacattgttggtaaagattttgttaggcttgttcaggacttttttcagtctaaggtaatgcctcaagatcttaatgctactaatcttatgctggttccaaaaaagaagtctccttctatttgggggatttgaggcccattactctttgcaacgtactttataaggttatttctaaggttatggctaatatgcttaaaggtttattgtcaaaggtaatctctgagtttcaaagtgctttcattctgggtcgacttatcactgataatgttcttgtttcctttgagattcttcattatctaagacgtaaatagaaaggtaacactagttgtatggctctcaaattggatatgagcaaggcatatgataggatggaatgcccttttttacaaactattccgcttcgcatgggcttttctattgactaggtaatgatgataatggaatgtcttcgtactatatcttataacattgttcatggaggagaaattcatgagcctattattccttctagaggaattcgtcaggggatcctatcttgccatatctctttataatttgtgcagaaggtttttcggcattgatttgtctttacgaagagaagaaatggattcatgggtgttaggtaactggtaggcctcctattctctctcatatgctgtttgcagatgatagtttcctctactttaaagctacaagggaggaggcgcagggagttctagagttgcttaataagcttgaaaaggcttcagggcaaaaggtgaatttgagtaagtcttctattttctttagctcgaatacggatgagggagtttgtcatagaattttgtctactcttcacatgagagctgcagatgatcacattttttatcttggttttccgagtgtaattggaagaaataagaatgtgacgtttggttttttgaaggagaaagttaggaagcgcagtaagaactgggatagtaagttacttttgagagcgggcaaggaagttttattgaaatctgtcatccaatctttgccttcttcaactatgagtgtctttttaatccctttggaaatttgcaaagatattgatcgtcttatggggagattctggtggcatacaaagtcttctgatggtagtggtatccattggaaaagttgggacaagatgtgtctacataagcataaaggagggttagggtttcgtaatttgcgtgattttaatctctccatgtttggcaaacaaggatggtgtctgctgaccaatccttcatctcttattgctcgagtttttcaagccatgtattatcctctacgcacttttcttgatgttgagttgggttctaatccgagctatgcttggaggagtgtatttgaagcccaagatgttgttaaaattggtgctagatatagagttgggtctggtaattccattcctattcttatcctgccgtggcttcctaccaaggaaaac

SEQ ID NO: 267701 - DNA, 1254 bp, Cannabis indica
tcttgactttatagtcattttatacctaaataactcaagtccttaatgattttcctgtctgaatgaggtctctaggatgaaaatccttgtgtggggaccataaactctatgttggggcacacttggggtgtgtgttggtctcatcacaaaatggttggttagtattttcatgagcttcccagaggtgtcatggggccctcaagtaggatatcttaatttttttgacccttgtaagtcttggtcaaagtcgcaaggttgacttttttaacttctcaaaaattgagtataacagttaccattaaaacattacccacatatataaatatatatttatatatatatatttataaacatatatgaagacataaattattagtttatataattataaaaaaaataatttaatttaattcaattttattatattttttaaatgtctttaatttaatttaaatttaaacttacatcatatttaaatttaaattctattctataaaacttaactttaaattctattatacttttaaataataataataataataaataaataaataaatagctatagttcaattctatcattattttttaaatataaaaaatttaactcaaatttaaatttatatttagacttatattatattttttatatatatttttaaaattaataataaaaaaaataatctatttaaattttattatatttctttaatatataaatttatatgtatatatttaatgatattagtttaacttttgactttaacaaaaaaaaataataaataaaaattgttaaaccaataattttcgttaaataaccatggtcatactttatattaaaagtttatctaatagattttttttctattattgtattttagaactttgtaatcaattatctaacatcttaattaatatctaaataaattattttctaaataactaaattatattattatttataatttatttgggtgttgaaaacaaaaaaaaaatatctctacaataataataacagtgagaactaagcattttctatagatatattaatagagctgagaatcccattcactccaatatctttcttcttaagcttcaaaatctaaaatgatatagttcgattagtagttaaattggatcagttgaattttaactcaacatttgatttttaatattaactaaaaataatttaaataaaaaaattagaaaaattaaactatatgtaaattcttagagtttttttttaagcatttc

SEQ ID NO: 267702 - DNA, 2559 bp, Cannabis indica
acgatataaatacattatgattatcagacagaaggttttaaacgagtctcatattatgccatatttcatacatccagaaataaccaagatgtattacgatgtaaagccctctattggtggtcagatatgaaaggtgacattgtggagtatgtgtcaaatgttcaacttgtcagcaagtcaaggcagagcgttagtagaaatatttcaacctctgaaaatacctgagtgaaaatgggaagaagtaaccatagacttcgtggttggattaccaacaacggtagggttctatgattctatctaggtaattgaggataaatgtacaaagttaccacagtttctttatcagtgcgaactacgtatacggtggattaatgtgctaatttatatgtaaaggaaatagttcaactctgtggtactccaaagttaattctctcagactgagatctaaagtttacatctaaatgctagattttgcaatgagcaatgggtaccaagttagatttcagtatagtttttcaccctcagactgatggtcagtctgagagaattcttcaaatatttgaggatatgctacgggcgtgtgtattgattttgagggtttctaaagtaagcatctccctttgattgagttttcatacaataatagttacctgagtactattggtgtggcaccgtacaaatgctttacggaagaaaatgtcgttcacccattcattggaatgaaattggtgaacagaggaaccttggacctgatgcggtctaaggaatgagtgaggccataagaaagattcgagttcatatgtttgccttatggagtgggtggaagagctatgctgatccaaagcgtagagacattaaattccaagttgggaattttatctttcttcaggtgtttccaatgaagggaactcgaaaattgggaagaaaagaaagttaagtcccagatttattggtctgttgagtttctgaaaatgggaggtcaggtagcttatcagccagccatactccctgccatatctggagttcacaacttgtattttaatgtttcagaagtatgaggcagatacgatccatatattgagttacgaaaatattaaacttcaaataaacctgtcatatgagaaacaatcgatctaggtttttggacaagaaaagagaaagcattgcggaacaaagaccatatcattagctaaagcgatgtggatgagcaacaagatagaaaggtgacttaggagttaaagtcacagttgcgggaacggtatcacgagttgtttagacaaatttcgaggacaaaattttgtaaggaggggatagttgtagtatcccagaaaatataatgatgtttaattgggcatatcttattaaatatgtgattatattgatattagagtacgattatgatcttacttaagctaattgtgtgataattagtgtaaatctaattaattattaaataaagcataatttatcaattacagagattttatcagattatgtgggtataatagataccacttttgaaataaaaagattttcgggtttagcggccatggaaactcgacagaatggtcagaaatgtcacgacaataatagatgagttgaattggaattataccggactagtttagaattttatgtggtcagtttggcggattaattaggttttacaaaaatacccctagggtgtgttatagcttaagttttatgggaggggtaaaatagtcattttaccctaacttgtcttttgtggttctctagtaattatgttggctgaatacttaagttattatatgttatcttaattactttttctagaaaattaaaagaaaaagaaaccctaaactaagtcacattgagtgtttaccatcttctccctctcgtggccatagaaactcagcaagctttagggattttcttgttacttcagctgatctcttgcaagttatgatcaaagattgaagttgtacatacttgatgagttttctttcctttctctttgttttttttttttcaagttagattaagtttggttgcgatttctttgggatttcatggttgttaggtagtctaggttcaaagcttattttggttttaattttaaggctatttaggtttaaattggttaaaggttatggctgtttggactggaattggaaattttgatttgagaacctagttttggttctaacatggtggtatttggatgaattgttgtgaattgctgagttgaataccttgtttttatgttaataaattgttctagagctattggacaggtttggaaaggttttggttcggttttgggggaagaaaacccaagaaattttgcctaccagaaccggtcgaccggttggttctggtgtaacaaaactggtcgaccgattagtctgcaggggaaattctcgatttgctttgagatcggtttttggctcaaggtgatatccagtatctagtttaggttgtttaggtgttgtatggctaattttggagctagtggaagttagggtttgtccagtttagggttttctcctggaactttgatttaaggtatttactgaa

SEQ ID NO: 267703 - DNA, 1100 bp, Cannabis indica
agaagttcacttgccataagttttgcagcctctcaaaattcattatgctctcatctctctttgttccatatctttctctcactgaaaaaatggagcttcaccggctttaatggcagatttgtgaccccaccatctcgcaaagaaacctaggaacattggtctccaaaaccccattgttcctcccttctatccccgaatccactttctctgcacaacaaaagagtcgatcttctgtgcgctaaaggacttgttccaccttctttgagatggaaacaactcaccaccaccgacggagaaaacaaaaatcgtaattagattagtatttggaaaaatctcagacttaactttaagtaatatataatatttaagtaacaaattatttgaaatgattttttattagaaaaaattattgttttatattttaaaactcctgaaaattattttttactaggaaatgtcctagtccaaatgaccacacatatgaaaccatatggttgtacaccctaaaagtgactcttgtgaggaagatttgttatgggggattcctttatcttgggacatacttcgacgagtacacgattattgttgatcttcccaacaataaggaattcaaggaccaattcttctagaccaccaaactttatccatgctattattacataacttttcaaaaactcacataagttttattcttttgtacttattttttacattttttacttttctaactcgaaattatttgttgctctcattagcaattctgctgaagtctgactcaactggagttgtggcgagacatcattagcaattggttaatttgttagataggataagggctgctagttttcttcttcatgagccacacttgaggaattgtggccttcttagttctgaccaatcaccgatggaagtaaaggttaccaagtattcaatttggaattcatgttataattcatatttatcatagttatttttttagaaaattactttatatactattttttatatatatatttttttaaatttagctattctagtggttgcttcggtaatttttatatgggttgctattttaatttccataaaaatacaaaaaaaaa

SEQ ID NO: 267704 - DNA, 750 bp, Cannabis indica
agtccaaataaataactatttaaaattaaaaaaatatcattaaaaaacaataaaataatttttgtttctcttttttcctaactaaatacaaaaattagagaggtggaagcatgggaattttggtagggatgggaggatgaagaaggggaaagacaaggggtaaatcacattggtatgttgtatgataatcatatgaaaaaacacttgaaaatttgttggaatatttctttaccaatcgtgtatatgtaaaaacaaaactcatgaggagcagtgcctagaaaaagaaactcttcatctactgctgctgagcttaattggacaaacacacaccaatcaccttataatttcttatatcactcatcccaatcttcatcaaagagttcccaaactttgaaaacagtgtacttgtaggtggtgtttgatttaccggaatataattgtaatagtaatagaatgtaatggtaataataatgggaatactattaccatgtttggtttattttgtaatgaacattgtaattagaattgaattgacaaaaatatccttactttatttatattttcaaagtgagaaaaagaaaggataaaattgtctttttattatttagttgtcattgtaatcctcattcacgaggtgtaagagtctaatgagaatttataggattggtgtaatgcccattataatgaaattctattacaaaggttaaaaacacaaaccaaacattgtaatgcaagcagcaccagattcct

SEQ ID NO: 267705 - DNA, 1727 bp, Cannabis indica
aagaagaagaaaaagaaaaagaggaagaaaagaatgaaaccctaagctgagataaaaatgaaacgaaaaagaaaatggattgacaaaatgtgtgattgattgaagcatatgcaatggcggtaagtaatgagtactaagcttctccatgcgaaaagtaagctactgtagttgtagcttcacaaaataaaaataaaataaaatatgggaattgggctaaagataacaaaaatatggctttcataaaacccataaagggaaaaacaaaacataaatcccaaaaaaagtaaagaataaaaaaaagtccataaataaattaatttttactatatattaattatatataaatatatctttttagtaattattacatttaattattaatgatgtgaataatattttttttagtaaatatattatgttgaataatattatataaaaataagggtttagcacatttataatactagttattgctccacgtgttacgcacgtgaagtataaattccataatactaatagaattgtgttcattaaatttaaaatattaaaagtttttgaactatgaaatttgtaaagttgttgtattctctaattttttggtacgatctctcttgaactatagcaactataacaaatgtgtcctttcattatatttaatttatttttaaaaaagtatttattaatatagcacttatgtggcgttaatatagtgtgattcaggagttttggtgaaaaatacaaatataaatagtgctttggaaaaaaataaaaatatttaaagagttaattttagtatgtttaacatcaataaattaaattttagatatgtttatcggttggctaaatagataataatgtaattatatttgtaatacatgaccacattcaagaacaaagataaagagtgactataagaaggactaaaatataaaattaaaatttaagtgggttatttttaaaaaaaaaaaatcttactcaaattaaagtgttatgatttggttttttttgttccaaataaaataaaagtgtgtaattgatgactaatttgaatattgtttttgaaaatgtaagttatttgaaaaatgattacatctactataaattaaaaaaaatatgaaatttaaaaattatgttattataattaaatatgaatattcataattatagtatatataacattgtgcactttaaaaataacataataacaataataattaaataaagtcatttgtacaatataaataataataataaaaataaataaagtgatttacatatataataaagtgatttacacttataaagcaaccaaatgttttacatattaatatgtgagtatacatgtgagaataaagtactttttagtaatttacttagttaagacccaaaatattgtcacttttttattatggtaatagatatactagtaatacccttaataaacaaaatggggatctcttaaagaatgcaaaaatcaaagatatataattaaaaatatatgtatctatataattagtaccaattaatttcaagtgtaaattttatggctgagattgtatactttttttttaatcttatggtcgtatacatggtacaccccaaaccataagcataagacaactcttacccatagattttttaattttctttaaataataatgttaacactcatatattttgatttgaaagcactaaattaattaataataattacccaggaataatat

SEQ ID NO: 267706 - DNA, 977 bp, Cannabis indica
tggtgtagggtaagtttcctaaagctctcaagtgaattctagtagtgagcactgccttctttgccgacttgttttccattagcttgactttctaactcaacttttgtgcagactggttcagaaggcttagcttgttccagacttttaggaggcggacatggtgcaaataatgagtcactcaaccatatatgatctaaaatgttatgatcatacgatgatttctcatattatgttttcagttattaatcacctttctttctttgctttttgcctggcaaagttcgagaagtagcattatataaactccatccttgatattattctaggccatggattctatttctattccaattagtgcatgcttcatatgcttacataacaaactttttgtgtattctttctatttgtttggtgcttcatcaacttgtggttgcaaatttgtatttttgcatttaaaactctactaatacataactatgctataatgcttaagggtttaaattctacaagaagcattcctttttataacaaataaataaaaataaacgtaaacattaaaaaaaaaacagtaagggcttgttttgtacattgtgtaagggtcgtattgtattaaataattaataatattatgtttggataaagtaacgtattgtattaattattacgattaaaatttttaatacttaataaatggttcaagttagcttgcattataataattacaaaggatttgaggttaatttcaatccctgactcggatttgggacctaatcccgaactcggacctaaactcaggatccagactcaagacttggactcgaggtccgaacttgattctggacctagactcaactcggactcgaattcaaacatgaacctgggacctagacttaggactcgacttgtagtcgatgttggggtctagtttatataatatgtattataactcaatactaaacatcggtcccgtttgattt

SEQ ID NO: 267707 - DNA, 723 bp, Cannabis indica
taattagttactggggacaaaagaagctagagtttgttatacagtgaaacatggtaacaagaacattttcctatgaagttaataattagttaccagttgacaattcaattaataatatgattcttcatcttattgtgtgtcatgttatataacaaataacatttttgtatgaaacttgcatattaattaattgtttaattttgatgtcgatttatgatgaaatttaaaagcagacaattatgtagatgtcacctatatatgtatggcatatacatattaaaattgatgatatatttattattatgcattaaatactattttatatgaaggaggcatagactgaggccaggccgacagttttatgtatgcccacatggataaattaaattaaataaaattatacaaataatatatataaagttatatacaatgatatttgatatggtatattaatttaacttattgaatggagatattatttaggcatatagatggcttaagtctgattggattgtacagaaatagatcgaaccatagatgcagctgatcattttcttcatctatatatttccctattccctttgacagctgcacttggccctcggagtgtaatatccagattaaaatagtatttaatttttttttttttggtatattaattgagcgaggataattatcttgtttctttttgttgttagtgagttgatattattgcttagagta

SEQ ID NO: 267708 - DNA, 721 bp, Cannabis indica
cagtaataattttctgttataacatttgttaagttgttaaactgattgttcaacaaaggatttgttgcctccaaagctgataattctctcttcacacgtggttctggtcctaatcaattcattctcttagtatatgtggacaacatcttgttgacaggtcctaacagcattcatatctctaacttcattgctgatttgcataaagtttttgttgtcaaagaccttggccattggactattttcttggtgttgagatttgtcgaactacttctgaaatgcatctttcccagtgtaaatacactgctgatctccttgcaaagctgcatatggagggtgcaaaggctagtcctagtccgaccagttcctcccacttcttgtctttacaacatggcgagccttttcctgacaacacactatattggagcactttaggtgctctacaatatcttacattgattcggcccgatgctgcatttattatcaataaagtaagtcaatttattcatgctccaacatatatttattgatgtagaaaataatgaatcaaattgtgtatgtatttcatagaatagtacatatttatatacaaaggtagaagactaaatgggaaactactaaatacaaatagaaaactactaaaatacaagttttcttaatttctttacaactattatattaacactctccctcaagctggagcatagatattaatcatgctcag

SEQ ID NO: 267709 - DNA, 1302 bp, Cannabis indica
taaattcatgagtgattttaatcactttgtacaaaaaaaaaaaaaaatttattaatcgtcaatttccttaccaaacaaaataacaaattactttgtttggtgaatgtttgataaaacaaatataaatatgttttaaattatgatttttgtggagttttgtttgaattttttttttttaattattgtgaacgttttttctaaaagtataaaaattactgcaaatattcatttttattttgttcattttttttaataatttattgatatagtattaatgtgatattaattaatgtggtttatcaataaacaaaaaataaatgcataaatcaaagtgtgataatgaattggatagtttaaatttgttaaatacactcttgtattttaattatacttgccaactataaaagtatttagttttgaccttataaagatggtcatgtgggaaaactatctataatttttattaatggataatatatagtgtaattacaggaagtgttttattaatttttattattttttaataactaactaaatttaaaataattatttttgaggttgattagaatttttacatgtaccataccatattatatcttttgaatttttcagtttgttaaatttttttttgaattattaaaattgttagatttaaatatttttgtttaattttattaacgtaatgtagataaaaatttagagaacacgatttagttcatttcaaaattcgggagacacgatttcatagatattaaagttcaagaatacgatttagtacataaacaattatcacattagtaaaatgaatgaaattggacaaaatttttaaatccaataacctcaataattttggagaatttttaaccacttaaatagttcgaaggtataatttattagttgtcaaaattttctagttagtttttttttctaagtttttgagaagtcctaccgtcaatctcctattacaatctcttagtagacattcacgcccgaaaatatatgtcggaatatttttttaaatgtttttttttatggcagtgttcgttatgtttacaatattaaccttataaatttttgaaaaattttgaatgtttaccgtaccgaaaatatgttaaaagttttttaaacacgcgtggtaaactgaaatattagaaactctgtcttcggtactgtaaattattcagaatttttttaaaatttacaagaatgatattataactataacaaataccgctatgaaaaaaaatttaaaaaataatattttggcatttaatttcagacataaaaattaaaaaaaaaata

SEQ ID NO: 267710 - DNA, 510 bp, Cannabis indica
attatccaattttcaaggtaaaaaaatttatactatctcttttactattatattaatatttaatgaataaataaggaaccaaagccaataatttaatttttatttttaaaattgtgcaggagctatagatggaactcatatctctgcaagctcatgaacccattaatgaacaaataccctatcgaggtcgaaaggtggatacaacatgaaacaccatgtgtatatgttcatttgacatgaagttcacatatgtttttgctagatgggaaggagcggctaatgatgcacgaatttttttagaatgtgccacaaaaacccaaattatgaatttccagctccaccccatggtaagtgttatcgaacttattatgtttattgatattattatacattaatatttaactaatatgaattacattgtttaggaaaatattatcagattgattctagatacacaaacatgcctggttttcatattatttgaatcaatatgcagatcgtaatccttca

SEQ ID NO: 267711 - DNA, 785 bp, Cannabis indica
tcccaaccaaatgccacctaaatactcttaactgcttttgtaagccatctggatcaattggttcccacttcatattaacaaccataaataaagaaaaaattaattataggtgaataagtatatgtataccaaaagtaaccactgtaaaacaaatttctatttcaaatgacataattatagataaaaccattttatacccgaccgaaggataaaactaagcacatccaaaaggcgtactctattacagtaaaaaaaatacatagcttattgaaggtaaacatttcgaagatgcatatccttattgtattcatcttcatacacttctgaggccataaattctggtgttcttgagagaataaaaaagaaaacaaatacaaacgaacaaaatcaatctcatagtggtaaaactctaaggattcaagaagaataacataatcaaacaatgttattatacatgtaccaacaacatgaaatttctaacacacaacaaaaattatacaaaacaaaagtaaagccatgtagatagaaaattaaaattctattaccaataaatttgtcacggaatgataaagtaggatttgaaaagcacaaaatttacgtagcatcaattcttgtttaaatgatctttgatctcacttcactacatctttctaaaatctaaatcttgaccttcaagatcccagacaatgagttaagtccacaagatcaattatcaatatctaaaataataattatatgagggttaactagagtaaaacttccaaaattttcattttgcttgcata

SEQ ID NO: 267712 - DNA, 1748 bp, Cannabis indica
atatttggaaaaataactcttagatatctgtaaactaacttaaatatcaactaattgaatatactaatataactaaccatgttctaaccatgttatagaattttctttaaagaggtttgtcttgcattgacaatataaaacacctgcaaatttgataaacacaccattattttgctatcagttgttatcattgttatgtcaagtttcagagcgttggcaaaaccttaatgcatttataatgcaacataaaaattcataattatgtttcgatgtaagtggctctagattcatacggatatactaaactttttgatgatttgatgatattaacaaatcgtccattggaaatttgcaaaacagcataaatacaacaggataaacattagatatagtattgatacattttttttgttgattatacctgatttggattatttgggagctctagatctatttgtatgagatctacattttctgaatctaaaaagtgatattaggaggattagttattctttataaattcaacctgaattcagtgttgaattttagtttgaactagatttttctgatctttctttcctcaatttgaaacagtatttgtttggattgattttgttcttcttctcaggttaagtcgctagaattaatggtggatttcaaccttgttgggtttcgtttcggttgtcttccttggttgatctgtcgaagctttcgtaggtgtattttttgattcgtgcggctgaaggtttagaagaagaggtataattgtaatatataatttgtggaccgtataaatatttaatgggccgacctactgtattttggtaatattattttatcttttttgtatatacctaaaaaaagtctttacaaaaaataggatgattatttttattttctaaaaaaatagtttagattagaaatatttgttaaaagtaataaaataaatattataaattaaatatatatatatatttatatattaaagagacttaaaactaataaactgtaaattctcttatcagaaaaatacaatatgctaaatatgttaaaaaaaatagagattaccaaaaataaaaataaaagaactaaaataattattaataacttttttatatattaatcagttttaactatttttacgaaaaatgttgttagataagaaacaaaaaaaaggttaagttagagattgtataatgttagttaattgttatagtgagattttctcacatagaaactcgagaccggactcctattaaaaagacatgtgtattcactttcctcaaggagagctgagatgtcgatgagagacccctcgaatatgagcctcgcctgaaccagattcagcggaatgatgtgaccatgaccgagtccagtcgcattcgtatggctcgcgtagtgtaggaccaaggaacaatttaaaactcgcatgtactgggatatatgcgagtatccccgggatcctcctgtaaaattgtagagatcgattctctgttctgggagctggtccagttgacccaacagccttgataaaccggtacagactcgcatgtcttagtttatcagctcgctacaagatgtctgtataagcgacttcaaaaggatgcagacatcctacactcgactagtcctgaatgcatcttaagcctgcgagcttatgcaagaatgtgaacagccaactcgcactatagaagtcgcataagtcattgtatttagtgagttaaattggaaactgttcttcatttatt

SEQ ID NO: 267713 - DNA, 937 bp, Cannabis indica
ggggagaaggttcagttcttcatccgaaacttcagtgcctgtgagataacttctccttttcttgatactgctgaacatacctgcataaatacattttgagagagtacaattattacttagtaccttaataaaactacacatatatccatcctaatatctatagctcaacaatacattaatgtccttttttccttgggcatttcaatttcaaattgctccaacacgtttatacttagatttgattgaatgttttgtaaaaatagcctttgttatactgtgcgaccataaacgaccatggatttcatggtagcatagagtaaattaagtgagattattttgaaaattttagtatttaaaatggttagtttggcaaattttccgatttgatttctgaaactagatcccagcctaagttaataataacctctctttctatggtttgacatcatcaactataaaatttaactatgcataccaaatcagagatcagaaccattttgttttagacaaaaactaagcatataacacaaacactatgcagaaaaagatccaatatttaacaatgaaacaacaaaatagagactcaaatatcattttcatatcagaaaccctaaaactggttgtcgagatcaatttgagattaaattacttgcaatttccaaaatcacaaatttttcgtctaatcaaaaggggctaatgcagattgtgaataagaattaaagaaaatagaaaagagaaagaaagaaaggtacgtgtagactccgacgagaggggtgaggaggagggtagcgttgagccaattctcggagaccttgtggtggatcttagaaggcagatcgttccaaagacccggcatcactttctgctgaaacggagaaagagcgtacaccaccgctttcagcctcactggttgctttcccatcttcttcttcttctt

SEQ ID NO: 267714 - DNA, 2082 bp, Cannabis indica
aaacttgtctaggcatgatggattctaaaaaaataccaaacagttagctacctagaccaacaatgataatatgggcacaggggaatcctcccccataacttcttggaaaggtccccaccgaattcattatcaagaaataatattctcaaaagagcaattgttttagatagtgaattgggaactacaaaaagttaaagataagaaaactcacacactatcaagaaccaaaaaggttcaggacaaaggagtaaaggttttctagtatttcaacaacaaaatagacttttcccataacaataaaacaaaagacctaactcctacttgttcctaaagctattcaaaatagtatccagaatattttacatctatcaacaataatattccaatcataagcctaaagtcataattcccaatcaagaagtaaatcacacataattcctatatcttgaacatccaaaatggttcatgaaatcaaaaaggaaaaaatttacgtggtgaagaattaggcgataattctagacttgagtagaaatatggagtggaagagcacacgctaacgttgaaagatggtcgtagagaaattccctttatagtaggatcttcaagacgatcaagcctttctgcactggtgttggcatgatcgatgagggaatcaatttaagaattgatatccagatatgtaatttcttctggtgatagagtcgtaatcattggggaggagcgtctagaaattcttttgccctaatttgaagaagaaggtgaaggcaataatcaatgtcttgccctagagttttaattcatgatttttaccctcaatgattcttggtttgaaacgagaaaaattgaaagattgagtaaaaatagtaaaaggtggcattaagagctatttataccatcaaagaataatctacgtgaagctaggatcaacgacccaatttcatattccaaaaacacataacagatccaatgtcatagaagcccatccattaggcatttaatcctgtagctagaacaaaggtaaataaaatgatgatattgtcctcgagaatcgcactaaagtaaacagttgccacattcaattgctttgctatacacgctttgtcaagcgaatagatgcttcgccagctattaagataacgccacacaagactttaagttcgaaaaattgaaagatgtttcccattcatagaaagtattagaatttataaagctttcacttttagcctccacctgtccacatctatagactgaagcaagactctgcagtccacaacattcgagaagcttggggcgtaaatgttatccgtgtttctggcaagggacacgtggattcttattagaagtttaaagctcataagtgggcccaaaattacataaacttggccgagtccaattgttatctagccctccaaaagaacaactgcacgcctcgccaaatgagcttacgttaatgctcagcatacagaagaatgttaattccgtgtagctggaagatgttctcagtgtatattcggaagtcaatcctagtttctcatttactgctctgcacaaaatatcttatctgaaaagggaaactgaattaatcaaagatcaaataattaatgtcagattaattatccacaatcaatggacaaagtatgaatatctatcaccttgattagatttgcacatttgcatacaagtattacttcatggattgagcttcacaaaataagcaaaaatctaaatattatatgtgaactccccattagaggaaaagggtaactatgtatgacatctattactttataaatacatattgaatccttcatgtaaagggttggaatttcttgacttacatgctcaggatgagaatagagtgctcatactcattgtacttccttaggcttttctagcatatctaataataatactgactcgtagactaagccttattaatgtctcaatcacgtaaaaactctgagtgtcttcttcatttatcgatcttttaattggagttttttcagctctattgttaaataattagtttgtcggaatttctcagtaaacaaaaataaatatgaacaataaaaaatttatgag

SEQ ID NO: 267715 - DNA, 879 bp, Cannabis indica
tattgtattatattaattattatgattataaattttaatagaatatgaattatattatttattacacaacaaataatctgtattaatttatatcataataattacaataggttcagggtcccaaccctgaacctagacttagacctcgaacccaaacttgaagccgcacctgaacctcaaacccgaacttaaactcagtcttagacctgggctcggggttagagtcgagtttatggtaaaaataatataattttacacaagttatcgataaaaattaatgccaaatttagtattatattaaaataatattgctgcaatctaatataattaaacacaatacaataattaacaacgtaccaaacgagttttaagtaagtggtagtactttatgagtttgtaggtggttaatggtttatccttaccttcctataccatgaatatatatatatatatgagattcgatatttaattacattaataattatataatgcttacttatttctttattgttggaatgttaatgtataataatttggccatttgaaatatatatgatttaggtttttttaataaatattattttagatttcatgtttcgcaaaagttactaactggaccctctgttttgttaaatgacaaaatggaccctatattttccaaaaatggtaaaaaaaagacaatgagctctcatatcaatgtttgaaaaaagtcttgtgtataagtcttgtcttttgacatgtgtttgatgttcttatgagtctctgtttgattattgtcttttgctgttttatttgatcgagtgaaatcgatttctggtgactgtgtttgcttctgatatggatcaacaatattctgcaatgagtttgggagatgatgat

SEQ ID NO: 267716 - DNA, 2289 bp, Cannabis indica
ccctcgggcttggaatgacaaactaaagactactctgattgattgggggttcactgcatcaagagcagattcatctctgtttgtttatggtttagaacacgacttgatcatctttagtatatgtggatgatatactaattactggccccaatactacactcatcaacaagttaatctctgatcttaaccactattttgaactaaaagatcttggtgatattcattatttccttggtgttgaagttcacagaaccaaagaaggaatatatctgtctcaaaccaaatatatctcagatttacttgtaaaggttcatcttgatagagctaaaccttgttccaatccttctagcagtgcacataaactctctctatatgaaggcacaccttttgaagatcaaacattgtatagaagtaccttaggcgctttacaatatttgactcttacaaggctagatgtggcattcgttatcaacaaactgtcacagtttattcatgccccaactcgtgtgcattggaaagcatgtaagcgtttgctcaggtacttaaaagggacaataaatgaggggttattactcaagccagcatctagactctctctgcaagtttactccaatgctgattgggcgagttaacttgatgacaggcactctactggtggttatgcagtattctttgggccaaatttagtctcttggtctgcaaaaaaacagcaggtggttgctcgatcatccacataatttgaattagagctatggacaatgctgcagcagagataaaatggcttctttctctactttctgagctgcacattacatctcaagatgttccaattatctgggttgataatcaaggtggtgctgcccttccagccaatcctatttttcatgccagatgcaaacatatagagattgatttgcactttgtccgtgaacaaataatgaggaaggaaatctctgttagacatgtcccaattgttgatcaggttactgacattctcacaaaatcactacctaaagaacgatttcattatcttaaaggcaaactcaaagtgatttgtacaccttttcgtttgagggggtgataaccaataagcatgtgttagttttattggttaatttaggttgttatttcagttgctttcttgtaactaattctgttatttttcagaattctcttgctttgtacgaatcttagtataaataaagtgctcttcctcagttttaaccaagtagcaattcttggttctgaggctttcatctctatctttctttctctttgtctttcattcctttactttgttttaaaagctttcatcctgcaccaatagttactggtttgttcttgccagtcaccggagtccaatgaccaaccaccagtaagttttccgaccgtgcgtccttgaatactagaaccaccaactgtgttgtccactcgagatctctttcaggaactagccttcgaagaactggcactgcctttataaaatcaccatacttccatctttgaccatgagtcacagtttgaggtaaagaaatatattctctcaagggggtgcctaatgatatcgtaacaaaaacaaagctccgagagtttttcgtattttaacggtatatttgattttggctcccctttaatcaaagcaaccttgagcaattttagaagaggcttagtatcaacaccaacacgagcacagatgaactttcccaagaaatatcttaaaaagaattagtatcgattttggtaacagggtgattaatccaccaagaactcggcctatatcctcagtcatacagcaaatgggtaaaagatgaaattgaaccaagaattttacccgactaaaatgaagtttcatataattgtcaatccctgtaggagccttgagatccaacaattatttctccacaagccaggggccgtcactgaaaattttacgttgatcaagtctgagaatcgaaaaagaaaagtgttattaccgacacactcaatcttcatggcaccattgatttttcaaaagccactagtagcattaatcatatcatcacagttaaaaacttgtgatgagatcatcttgccaaccaaagtttttgcaacgttgtcagagccgcttttcgcaacctctaccttaagatttgcctctataatctcatcttcatcactctcacaatcaaagaaatatgatccatgtcaaataatcacgaccacttcaataatcaagctccgcaatctaactcagttactcaaacactgtcaatgagaacaatagagaaagagaccaaaaatatgtttata

SEQ ID NO: 267717 - DNA, 1720 bp, Cannabis indica
catatttttacaaacttatactttaaaaaccataataaaaattagtctaattttaatttacaccaaaaaagaaaagaaaaaaaatggttctgtgtgaatattacactaatattattaatattattattattattggctttagaaaaataataaattaaggaacactagtattaataataataataaacttacaaggcacaacaaactgaagcgtaattggttatccttgtaatcttttccagtgatagggccatagattttagatccagttttaccccatacctgttttaatcatcattaattaaatacactaatccaaacctaaaaacactaattaattaatcaaaactaaattaattaagctcaaattataccttctcaagaaaccagggatgatccacaaacactctatcaactcctcgtttatgacaatgaaagaatccaactgtttcaactctgtcaccaactttaatctgcaattttaatcaaataatcactttattttcttagaccaactttctcgagaaacaaacagaaaatataacttacatcagcaagaacagaagtgtcccatgcatccttgtactgatcatatcgtggtgaaatcgtcataactctatgcccatttgcctaaaaatcaaaactttaactatcaaaaaacaaatgatccatccaaaatttttgtaaagaaattagaaacttacagccatggccggaggaagaccaccaagaacatcaccaagtccaccagttttagaccatggaccaacctcagccgaaacaaacaccaacgacattcctttcccacaaacaattttcccaaacgacttgtcgtttttctcagtctcctcaacttttttcatagcttttccggtcaccggagtttgtaaagatcgaaactttaacatacccagattgttcagagatcttaatccactgtgagtcattgtttggtaattcctctgagccaaattcgccttagtctccgatcccgaacttccatggccggcgacactagaagaagttcttgacacaaaacttgaagctgtgatcgtcgccattttttccggcgaagctagctctgtaaaaagaaaaagaaaatcagttttagaaaaaactctgtaatattctcagagatcattagctgtaaacaatacccaccagctaaaaatcgaagctttggagaagaaaatctctcgaaaactcaaatgagaaacagagagatagtacgttagctccaaatttaaaggaagaaaataagaaagtagcggaaaccgaaaactaatcggagaaaatatctgaattcggttagtcaaatgaaaaggaaagaagaaacttcaacgagtttgacttactataaattgttgagaagaagaagaagaagagctaacgagtaacgagtgagttgagagtggtgactcagttgaagaaagaggtcagctgagttatataactcgggcgagttgacagttctttgtagtactagattgtcgtgcgatgacacgtgtcgttttctcagaggatgaggtgtctttttctttgggcagttcaaggtctggtacgataaacttttctgtttcgtatcacgtgcgtgagtttcctaagggacacgtggcttccatgattcgaatatactggaattagcggtcacacattcatccaaacataaaaatgtgaaattttgtgttaatttaatttattatgtaattaaaataaattt

SEQ ID NO: 267718 - DNA, 1438 bp, Cannabis indica
gatatgattacgtatacacttattttttaaatttttaaaatttttattaattagataatatatttgataatgcatatattgtaatttattatattcttaaccaaaactcacataatcaaattttagtgtgtctatatatagactgaattcgtaaatttgatataaaatttttttattttcaaacttaagaaaaatatggtgtgtaaatctgtttaccataactaaaatggaaagcactcaattccttattacaatcatttgagtttgaaatataaaataaataatggactttttcatttttacacttcgaaagaggttctttttgcaattttacggaattctacatagaaactcttattgcaactaccgctataacctaaatcgtaacaaaaaatcgtatagcaacccacataaaaaccaccggagaaaccactttagaaacttaaaccgtaaatttgaaaaaacaatatatgatgtaattcctcaataaataataataaagttaaaaatataaaatatttataatattttaaatttaaatttctttatataaaatatttacatttttttttattttaattcaaagttaaaccaataaatttaaaaacatgattaaaaatatctataatattctaagtattttaaatttaaattaaaatttctttaaagttaacgtagaaacccaaaaacgttaactctagaattctgttatatagccacactttatataaaatagatatataaatatatatttatatttattactattaggcctaaattgaatttatttgcttaatcttttctttaattttttttaatagtaacttaagattgtgatataattttcctattattagtacattctctagtttgaacataacatagcatgggtgtcgcattatgagttattagcaaaacctatactaccctctgttttgttggccatttaatttcatttcattatgtatctcaaggtaaaagcactcttgaaacagtttattctactgaacttgatgatgatgatgatacaaacagtttattcaaacaagcttgaacttgatgatgttctatttattcttttcccaaaacaaaaagcttgctacagctgctgcttatgtgtgtattatttactgacaattctgatctttacaggcatgttaatatgtagatttatatctagggttattgcctattggcaaaccccattaagattagaaaattacactgatttcttgtgctcaaaactactttgtagagttgtcagtagtttgaacttgatgttttgtttgttagtattttttgggcttttttcataaatgtacaacaaaaacaatataattataaaaaatctgaaaaaaaaatattattttaaaaacttatacattttgaaaacatggaatgtaattttattagaagattatggatcaagttgattgag

SEQ ID NO: 267719 - DNA, 1111 bp, Cannabis indica
tttaaaatttttcaatttaattaagtaataagtatacaaaaatataaatattaaaaatttcagcatgcagaatatcctttatttatacaatatttactaatttaataaatcacctctcaattaacaaaaaaaacatgacaaatataaaattattacccatccaatagcagctaaccacaaaatttactttactacaaataaatatttaagatattcaaactcatctataatatacatactatttcacctattaaatcacagtacatatttaatttcaaaacttacttcgctacaaataaatatctaatatattcaaactcttttaaaatttacataatattattaaacaacatatataagtcattatatatacctcttgcaatgaacaatcgaataaattttaccttgctaatcaagtagatttatacaatattaaaaatatcataatcgttattttatattttccaaactaattatatttttatctaaagttacacatgttgacttatatattactccaaaaaatttaatccaaaaccatcttatgatcttaaaaaaatatatatatctacaactattcaaaaactcaatacaatatacacttttcaataattcaaaaactcatatgtaaattaaaaagaaatggacatagtttctccaattttaacaaatctcaaaacaaaaggtttgatccaaacttttaattgaagcaaaataacattctaaccattattttacatatccctaaatattttcaattcaaaattaaacaaaatattaaattaagattacaaactaaagtttaaaaaacattaaatatacattctaaatttttttaaagtaaacttctcatgtattctaactactaaatttcatatccttaaccaaatcttttcacataatttattgtcaatatatgattattattacaataagagtacggcttatagttaatataattgtccaataacttgatattaatgatgtgtttggtgttttgagatgagatttgccattatttgaacttattgtattatataaatttttttgtgaacctttgtttattttgttctctttttagctcatgtttttagttatatctaccaacata

SEQ ID NO: 267720 - DNA, 540 bp, Cannabis indica
tcattgctcaagaattatagatcccattattaaaatcccagtttttttttaccacatgcaattacagtaaaatttacaatttattacagcaattaacataacgatatgcttgtatctaatctaataacatttattgctattttgttacaacttacaagttacaaccacaggtttgaaaggtgaacccaccgacgactcataaaaaattgtctgcctaaagtattacaaacacacttttaaaggtacataaagatataatgattgcattgttaagggagacccacaatatcattattcacaggatgggaaacttggaacgtaaaagccactttcatagatagttgattatgattattaatattcgtatacaatattatatatgccatctcaataacaaaatatatgtatgaaatgaattaacaacctttgatttatttgactgagaatattttcacagaaaaagacgaaaaaccagttgtgtatagtgtaccaatttagtgatatgtaaagaaaaccctaataaagatttgtattgtgcat

SEQ ID NO: 267721 - DNA, 733 bp, Cannabis indica
gtactcttaattcaaccattcactagaagaggaaagattcttgcatacaaattcaataaaagtactcttctttgtttcttgacataatataaaaactgaaaaactctagacagcataataagcataactaattcaaaacctttgctaacctgaaatttgacatacctcactagtaagttaaaaactcagtattagtagtgcttgtggtattagtggttatcgccatcatcgtttggtggaaatgcttcctaagaaacaacactagatttaaaaggagaggtacgtaatcataggagatcaaagatcatatcttcattaatactaaaattaacataaggtattacaatatttacctatcttcatatatgtttatgtaataaggaccgtattgtccaaatcatgtccattgtgttgtctcaagttatgtctgtttttcaactgagtctctaaaacagtttgttaagtcggttttattttgagtaagtaatgggtttgtataaatactcttgatcagctcagtaaaattcatttactcattttcagaaatagaaaagtgtacgtcctattcatttgaaataactaacccaaactaaaattttagccatttcaactagatttcatactctactcatgagaatttaagtcatgtgcagttcaataaaaaaaataaactttatttcttctgtttctggaaattaagcactcaaaatcttttctaatttgaaatactaaa

SEQ ID NO: 267722 - DNA, 688 bp, Cannabis indica
aaacaacaaaatgttgttttctgttttaaaaatcaattcacttttggtcaatattgtttttaaaaatcactaaccaaacgtgacttgtgttttaaaaacttcaaaaactattttttgttttcatttctgaaaacaaaacaaaaaaacaagaaaacaatatcaaacatgctctaattttttggtgaataaaaatcttgaaactcgtttttcctaattctttattacaatttcaagagtgtaatgaagagaattattgtacaaatctatttggaatctaaattatcaacatatagatgttaaaatgggattattacactcatttaaatcattaaaattgggtagaaaatgttaaaaataaaaagaggtcgaggagttataaaactccaaaacttagtatgctgaaactaagccagatgacatgtcgcctagcacaggcaacatggagctacaatttcatgtaaaattcctctacgacatgggattggtgaggcttgaccccaacttcattcttttgttagaaaaattaataatctcaagatacaaaatttgtatataatatagatccatagcaattacaataatttgatagtgcaatactatcaactaagtctttttctctagatctctaaatcagaagcagttttatttatctaattatcaaaagtatacaattgtgatgagacaatat

SEQ ID NO: 267723 - DNA, 605 bp, Cannabis indica
gtgtaatggagcaaagagagcaaccaatccaagaaattttatttcctttttgcttctgttggagaaattgggattaagaaacgctaaaagccaccacctacaatatgaaatgtattatatcgctattaatgtatttaagtattaaattttatataatttaatcaaataattagtgcctaataacaatattcaattgggattcaggctgaatgtaaaaccatctttagcccatcttccatggttgagtcatgagtggtgctattacaactgcttttagaagtgttcataaaatacataattcaatccaattcgcacgatccaattcaattcaattcaattcgtaaagtatggatattcacacttgtgcattaaattagattgaaaatatattttaaaattcgcacttgtacagattgtacgtgtgattgacatgtaaatgtaactgactgatccaatctaattcacacatatttatatattttttaaaaaattatatatacaactaatattttaatgtaaaaaaataataatttaaaaaatttaataggtatgatacaaatatatttaaagacttaacaaatcaaatatatattttattattattt

SEQ ID NO: 267724 - DNA, 791 bp, Cannabis indica
tatatatatatatgagacgaaaattcaaaagtaaactcacttttccgatcattcatttcgaaggaaaccattttgtcggacgatttactgcatggaatcacagaaaatgtaaaatttagaattaaaagatagaaaaagagggagagggagaaaacaattatgatgcaagaaatgaaccttagaaaaccgtaaagtggagtaggaaaactgtggtcggaggcgtagagagtgagaaacgagaatggagattgagttgggttgggttagtgagggatcggatctaaagtaaagaaaggaaaggaaatggaaatgaagccctaagggtaagatggagaagagaagagaagagaggatgaaaagtgaggtcaggtgtggttgaatttgaagaaaaacaaacaagtgaactcctcctcttccctctttgctagatagatgaacatcaaattgcccaacacacaggagttcagatggaatcgtaaaatttcaaatgcacccctaaaaaaataaataaatgaaataaaaaaccacaaattaattataaaaatttgctcttaatgttttcttttcccaatgttttgtctctttttttttcacaatcttttacaacaatagagaaaataggataagaaattttctctcatccaacaagtgtctccatccaacctaagagcatgtttggctaacccgtgagcagcttggttagccgttctcttaacatgagaggtaacaataccaagaatagaggatagaagaccacgaatatcaaaaattaaatctgataaactagataa

SEQ ID NO: 267725 - DNA, 507 bp, Cannabis indica
ggggccagcacttgtactggacccaagttgagccatgggatgtccacgtgacatccttagctttatctttcatcgttttagggtcactaggacctgtttgcttgagcattgttgaaggttagcacccaaaaacgactttgctataccttgatacttaggtgccccctaatgtcaactaggacatcgatacgatttccaatgcctaagttgaccaccctagtcttgggaggtagggtccagggttatttccttcttgccacatgctaaaagtattgtctatatcatcgggtcaaatttttaagtaaatatgtacaattacattcttttacgtatgttaattttcaaaaattaaatggttaaatttttgggatttagaaccaaacaatagattccatctccttttcctcttcaagtacccctctatcatttcacctctcttatagaatgttttattaatatataggtacttatgttaaaaaattattaaatctattacaaactcaaaaa

SEQ ID NO: 267726 - DNA, 1029 bp, Cannabis indica
ttctcatagggggccatgagaattggagagtgtaattggaacccctcaattacttccaattacacaattacagtgtaattacatgggcaaacatgtcaaattgtgtaattacctccaattacacacaaatctaattacattgtggctttccaaacgcacccttaataagttttatacatatattttcagcataaatactttatttttttaatttataatgactttatctcatcaataattaaattttgaatggtcaaaaattagtaagagatgtgattttttttaatagttgtaagaatatatataggccattgtggagtgtcccagtcaagattatggctttggtcctcagagccttaacataacaaacaaaaggatgaaattcaaagaaaacattgttatcttgagcaaacttggaaacacttagcaaattcttagtgattagtatatgcaaaagctttttaagaaccaaagtcttggtagaattctgagatttaaaaaatgcattaccagtatgttgaattgtcagacctgaaccattgtcgacatacaatctttcttgaccagtgtaatctgcattttgcaccaggttggtaacatctggagtacagtgattggtagctcctgaatcagggtaccattttggatctgtacttggagttggcatagaagcctgagcagcatgagcctgcatagatttgttgctatctggagtaggaagcacaccagtatagcttttattgaacctgtaaaaatattccaaagccaagtgtcctgtcttatgacagatctgacattgtggtttgatttgagtagtttgaggccttcctccaaaatgattggagtagtttcctctcccatgattaacattgcttgatccacctcgagagttaaaaccagaattagcacctattgtaaataaaatcctggtggataaaaaaaggatattgaggagtattgaagggaaactgacctcgaggggcattagagcccctgaaattacgattgtagtgagctagcaaggcttca

SEQ ID NO: 267727 - DNA, 672 bp, Cannabis indica
aaaaaaaaattaatcatataaatgatacccttttcgaagtaaacaatatccctgtttttattaaatatataaaaatgaaatgttttgtttggaccgaaatccaaaataaaaatgggtgtagccttagtcccagacgtatgaatgtgacagagaaaggctgcatgcatgtccctacactactagaggtgaatttgtcttgttacttaacttcttcaccccaacccaacttaatgttatcttcattcacatacatacgaaacgtgtcctttccatattttgcttctaacgatcccaagattatttacctttattttttataaatccatattcatttgcctcaaaagcctcaattccactctaattattattttttttcatcaactttttccacttcaatcaactacaacatttctgaaaaaaaaaaaaaaacttttgtattatttcattaaacttcctaaaacttgcactgtttgacaacttcatcgggattgagttctcctactcatgttctaggttttaagttacatagtattgagaaagtctgtatgtagtatatgtataatccataaatgagtgttttggtagatctctatctagttagaagcattaattagaaaagttttaacagagtataagtgagtattggacagacctaaataatatgactctaat

SEQ ID NO: 267728 - DNA, 1232 bp, Cannabis indica
aagtgccacaaggggcaaaccattgtctcggccttagggccattaacctgaaaaaaaacgaagcctacatagtaggagacttggacagttctgcttccttggctgcctcctcgtcttcttcctcctttttggtcatctcgcagaaagcaagaatttccttctttgattcttccaagaaacttgtgtccatatctgaattttccatctaagctcggtaaatggtacggaggccaacaacattgcatcgttctttggtctcggcctcttcccatcaagtgtcatcttggctgcagcaagttcccctttgagcttctcgcattctttggtcttatcctttgcctcattctcagcaactgcaagcttggcctcaagattcttcttcaccttcttggtatccttagttaggtgagtgttctctgacttggaatcatgccattcttttgtcagagtcctgcattggcttgcccagttcttaacctcgctttccaagaatttcagttttcccataccatggcattgggcgacgaaggaaaggaaagtttgttgaagacgaattaaaaaaatgggtaagtaagtctgaaaagttagaaggaaaagtaagaggataaggaaattagagtctatcgagaggcatgagcaacacttctcttaagcatattctctaattcccgttattaatctaatcccattcatgggagaggaaagctttgaagtgacgctagaaaactgcgccaaattctccagtgtacttcaagccaagactgttggcatcgatagggagagtctcgagggcttggctccaagaggcagaagcttggtttgcattgggaaggggcttgtcggtacttgtgaaggctggaggaggaatcgaatcctgggtttcagattcagagacctctagattaacggattgtgaagctcgcttcttcttagttgtggtctttctctaccttttgagaggctctacctccacgttagaaggagcctctgaggtggtcactctcttctttcctttcttgagggtgagaccctcgaggttcatttctacgagacaagataagttgttagcatttattgaaagacaagtaaaacgggagattggggataattttctgcctaaggaatttaccataatcactagaagacgaggtatcactagaagatggggtagaaggaccataatatcctctaacatccctacaacccgtaatcctgaatatatcatagggatt

SEQ ID NO: 267729 - DNA, 593 bp, Cannabis indica
actgagaagaaagagcattatgaaaagatgatattttattttataaagtgtgtatgactaagaaaactctgcccaagaaatttaagaaactcataactaactaaaaaccttcttatcagaagaaaaacaaactaaaaaacctttagcataatcttgatgaattaattagcacataactaagtacgtaacaatataaattgatgaacaagagagggtcaacggtcaaaaggcccaaaagggtcaagttgcttgcagagattcaagtaagcaagatataggactcgatctttagccccagtttgatgaatctcataatgtttgaacacttataatttaaatggagacaatgtaatagtgtctgatataaagcctctaggttctgcgacatcactgctgactttgacttttattatcaatactaccataataatattctattatatgttatgtatgtatataaacagcacaaacttcctcatatctatctatatttccatttctaaaacacaagatttccactctctcattttagcattatccctctgccctcatagcgataacaaacaatttaatgaaaaattaaataaaagaaa

SEQ ID NO: 267730 - DNA, 2265 bp, Cannabis indica
ttctccttttcggggaaacctttatcatgcaattcagtagcagatacattttacccattttcttcaaattgatcttagatggaaaagatctcggaaatataataatgtgtgttatactacatttacttagtttatgtatcatttatgcaacaaatacgcacctaggcacctgcaagtctatgaccaagtataagggctatgtcttggtggtactagtttatactgactcacgctcacacttcttatgctttttaatccttttggtgtatctgtcttattcgttcttcccacaattctgaactcattattgatgctctattaatgtgttcaaataatttgcagggaatgttgacgagtgtaaaatgtttttcgagacactatacaaatttgtttatcttcaggggacatatttaaagccacatgtgagtatctaccttttatctatggctaactatgatagtgatataagctagatatagtatatttcattatggtatttatccttacgttttgtcaatttcttagttaaaacacatctaaaatgcagataaaagacatcaagtttagaaatctaatatgtaattatttcacatatcttctcagccatgtaaaagtttaggttataactagtaataatttatatattgatttttttattagctagaaagtctcaattggctcttttaatggttatttgaatattacgtactgcaggttgctatcttgaatggtattactatgggagctggagctggaatttcattcccaggaatgttccgtttggtgactaataaaactgtatgtgacttgtgtcatttcttaacttatttgaggtcatcatattcttcttttcattctcaatttaaacattaataacatgctattggaatcaaataactcgacctatcatgtgggttggcatacttcgacatgacagttattttgcattatctttagatataatcaatatgatagaccccaggtaaggatcctcaaaccaaaagcaatgataacaggcaaaaaagaaggaaactgaaggaagaagacaatggaaatacagaactaggtagattttagaattgttattgaatgatcaatgcgataagagcacactagaacaatggggtatgtgataggccttgactctccttagagcaaagctctatatatactatccaatacctctcaccacaatgatccatgtatacccttttacgtatattctactaattgtgaagtctattacaatatttgattgcaaagagttttcatgaaatacctctactaactaggcttattgtcatatgtcttttttttgttgaaaaagaaaacagatgccatatgtcttagactgacctcctcccaaatatattagggagcctcacttattgcggagaaaagccgtggcaacacaaaaccaaaacaatagtttttttttcctggcatatcttgttgggagcgtggctttcttttgtgttaaattatgcttacttaagtatattcttttatctgtgaaaaattatgtaggtcttttctcatcctgaagctcaaatgggctttcatcctgatgccggggcttcattttatctctctcgcctgcctggctacttaggtacataatattcatcttctatggctgtacttctatggcaacatttattccacttatcttatcgtggttcttttctttcttcaggagaatacttggctcttacaggagacaaacttaatggcgaagagatgattgcctgtcgccttgctacacactacacgttagatgaggtttgattttttgcaccttggtttctttgctattatttctttgtttctaaaataaagtaatagtgacaactcttcttacagaggctaagttggatcgaagaacgcctgagtaaattgattacagatgatccctctgctatagaaacatctctggcacaatatggtgacattgtatatccaaacaagaggagcattctctttaagtacgttcccctgaaaactgtgtttgatggtgccgcccccctttctttcaattatcattgtgtaaatatttggagataaaaaaatcaataactaaatctatatctgagacttgcttatttttcttgctcatgttgatctagaattgacaccatcgatagatgtttcggccatgactcagtagaggaaattatcgacgctttggtaagtttataagaaatattttatagagtttatttacagatataaaagttgtgctagcactttaaaatccagtctctc

SEQ ID NO: 267731 - DNA, 1605 bp, Cannabis indica
aatgtgtgtggagaattggagaagagaacgggtcacgcgcagagaaaaacctttattcactggagcaaaaccatgtatgcagaaatgtcaaaacaaagttaggcataaaagtaaataacttaaaaaacaaaactttcattttgggaatagcaaattcaaacaaaacaaaacagaactagtaagtacgatagcaatcaccataaagttttccgcatagctaacaggaaaaagcaagtctttcatttggagttcaaaccttgaaaaacaaactttaaaccccaatctaatcaagtcttccattttctcagcaaccaaacatgtaagaaataattcatacaaaaagcatattcaaaacaatccaaagaggaaaactacaaaacccatattgaacccaaattccaaaattcaaagaaaagaagaaaattaaaaaatcaaagaatttagccctaaaaacatttagaatattttttttaaaaaaaaaaaactttaagaatcaatagattagaacagggagagaagaaaaagaatgagataaagggtgaagaaggaaaaaaaaaacttacggaaatgaaaacgcgtctgattggaaaggttgatgagaggggggtatgtctgaatgtgtcggaggaggaagaagaggtgatcagagagagagagagagagagattgcgtgtgatttggcgtgaaatattattgctgcttacggcatctacgtgtagcagttgaaaaataaacccaaaaactacgaaattacagaaaagccctttcacttttgctctttctctgtgtgctgtgctgtgttgtgctgtgctgttctgtgcagtgacgctatacctattagacttttaaaccattggcattatttaccacttcttttcttgggatcaacgtgggtgagtcgatttcccttggcctagcccattatatacaatacaacctccaccacatggcccaaaattcatttatggacctaagatgggcctcctccagcctacaacattaccacaattacacttttctttggaacttgaagagtaaaggggttgacacggacaagctgtatctctatgcatttatcattgtggacattatctggagaaatcaacataataaagtgcacaattactcttcgagtaacaataaaattgccaatggctctatctctaattactttacacattacactgcttgcttgcttaccccgacggtggaggtggtgtctctcgcctagtctcctcctccagaagattgaatcaaaattaactgcgatgttaaggttcgtagtaattccatgtgcatagcggccttggttagagatcactcaaggacagttttgtggggtgctgccaacctactcaatttcacaaattctctgattggcgagacaggggcgtgttagcttgctttggaaactgctgcttcgaggaagcatgactttatcctggtcgagagtgattcagagaagattattaagacgcttaaaggaatccactccatttagaatattgataattatatttctttttgtaatcaactctctaagaactttttatcatgtaatttctcatttattctcaaatgttgtaactttgcagctcacaatgt

SEQ ID NO: 267732 - DNA, 784 bp, Cannabis indica
atattcgcctcaagtaacacactaacatgattagccatcagtacacaacccaagatgccacatgcccaatagactcgtgaggaacacgcaccaacgatcatttgacacgtggactacaccaacataataccaagagtttggaacacttctgcaatgttccacggcagaatattaagaggccgactcaattcatggccccaaatacgatctcacatttggatgaaggtagcaagcctccgtgactctcacgccatcaagacttggggtaaatattatccatatttctggatagctaattgatgggtcattgcggaggcccagcaaggaaaccaagcccattcattgaatccataacggtcaacaataaagctagacattaagtccgaatcaagaacaaccgttaactggtgaaatggcatgaactaaaggggatactcacaggaatcatctggaaacaaaatacgaaagagtgttcaagattacttagtgtgtacttaatagttggcctaatgtaggagtatttatcaaaccgctcacactgcacaaattgccagcaccgcaccacactgtagaaaaatacagtttgaaattctttacggtgcggttactgtttgtattttttccaacccgtgcagtgcggtttacgattttgaatttaataattgcggttaaaactgcaccgcactatatattacaaagttactaatttgtataatatatttttattctttttctatataagaataaatatatgtaatgtatgtatatattacattcttttttt

SEQ ID NO: 267733 - DNA, 1103 bp, Cannabis indica
cagatcttcattatctagtgaagattctcattgagcttcctaatcacttcataattacaagtacacacaactttcgacttttaatgatcagaaatagggaatttacatttccattcctaaaaacaaacaaaaaatataatgataacagggaaatgtaaaaaatatatccaaacaacaatgagaatacaactacaatattacgaaactacaaacaaaccactgagtatcgaactataaatatttgttagaagttaggcctaataccaacgatgaacataaaaatataaaagtaaaaataaataacataaaaaaataagaaatgtgaacaaatttgcataaaacaataaactcaaaattagaacaaactacccaaaacacaaactaatgtatggatttgtttacatatataaaaacccataaaattaaaataacaacaaaaaactaaaccctaaagtgaaattagaataataaaaccaaccaaaaacaaaaataaatgacattttagagctagggcaaaattaaaacgaaactacgaacaaaccttaggaaagtcatctggtttcctctttcccttctgacagttagagttaaaaaaaaattcaggcaaagaaaccttcaacttcttcttcactagttgaagatcacctttagccatgggagagcaaaatcagagtcatcatcgtcaatcactgggcgtttcccttttgaattattagcaactgatttacgacccatttcggaagcttttttggcaataaggatggagaagcataggcacgggtaatcaccattgcatataccaaatgaaagatataaaaaattgaatgagaatggtggcaattggatgaaaaagttgaagatggttatggctggaagtgggttttgatcgtgtatatatttcgtgggttttgatcatgagagtgtgatgagagtgtgatttctgaatgtaaaactaaaaatgaaatggaaagagaagttgaagcataaatccaaactgaaaataaaaagaaatgtgataagaaaaaaagggaaaaagttagatgcaattaagttgctatgcatgtatgtgtaagtggtattttggttaaataattttttttttt

SEQ ID NO: 267734 - DNA, 684 bp, Cannabis indica
ttattggatcaacagtatcaattgattataacgtatgttagtttttcgtctttatttatttcgtttagtaataaaaaaaagacattacaaagctatagctatataacttttttgcaatttattcttttgtttcgttttctttatttatttatttatttttgctatttagtttatatatataatttatttacttcgattatattatgaaaaacatttaatttaatttaatttttctaattatttatctaacatagctttaatatcttgtccctaaaaaataatactatcttgtaaaaaaaaccgttagttacattatttatttttaactacgtacgaatatattatatataataaagtaattttattatctaattaattattaaaataataactttttaattgataacattatagcgttatattaaaacattatatattgggaaaaggagagattcaaactacgtgtattaccacgaaacattatatctttctaaaacaatatatataatatatggataagatataattaaatccaagtccaatctaatctaaatctaatattctatctcttgcatacgaaatagttacacttacgacttaccttacctgtttcataaatatatatatatatagattacacttaataaaaaggtattgtagttattatttttatatttattatga

SEQ ID NO: 267735 - DNA, 1224 bp, Cannabis indica
ttttgttatttaacaaaacacaaggtccaatctgtaacttttgcaaaacacaagatccaaaatggtatttaccctaatttatataaatgaaatttctttcatggagctaggtatctcatgaaaatatataatatattcaacaatattttaaatttattttattttgagaaaaataggcaatataaatgggaaaaaaaaaagacaagactatgtaattattaattaatataataccatggatattatataaaaataaaattgaatgatgaaataattacctgaattaagagcaagggataagaagaaattccaagagaatagtcgacagttggagtgagtctccggagttgtggggtaggagcaaaatcaccaaagtcatcgatcacagcggttgtctccgcggtgacaaagaggacaccttcttcgttgcagtcaatctcagtccgcggatgggggcctcggccacctccgtggacctggacgggccgtaagcgacccgctatagggtaaaaggggacaagaaccttactaagagagtgtttgagaatattagcatcaaaaaagttattgttattatttgatggtgatgatctgaagaagtagatgactggattatgacttggattgttcatctggtctaaaactgagagccaaagccgccggcgtggagtgttctccgatggcttcaccatactcctctctttttccttgattattatcaccatcgatcctttattatgttatctttactaataacctaatcaatcgtttgttcaccttttcttgctcttttgcaatattaatatatagacatcgcatcattttgcaaatgtggttataattagcgatcaatagtgcgtgatatgacatctttaattgcatggtgtcaagttgtgcctattaacatttttctcatacatttagaacaaaaatattaataaatgataccttgaattattattattgcatggtagggtcgtactagtgggaaaacatgttattgtacgtgtcatatatattgccatgtgcatattttttactttatttttctttacgtgttgttctttcttatttgctaatgttgtattatgtccattagtactgtttaattaggtgatgaaattgatgccattatgagtcaagtcattatcagattctttgtagctgacatttataatgctgatcattttagtcatgaacacattcaactttagtttatccata

SEQ ID NO: 267736 - DNA, 1292 bp, Cannabis indica
tttttattattttcttttatcctatatttttttattgaaatgtaatgtatgaaacgtttttcaggatcctgcatttttctaagtttcttcaaagctatgatagaagcttgaatcttcagaataagatgctgtaagttgtttactttagaaaaactttattttactacaaccaagatatacgttccttttttcctgtaatatgaaccatctatgtgttttaaagattttttatggtcaaactacataacttatttatttgctgttgcgcattccttttttcgtacttcatttgctatcaagaaaagaatgaatttgatgatcctaatgttatcgatccgtacccaggtttattctcaagttaaatgacattatattatgtaacatatgatatacttgcaaatttttatgaagtttcaattgcacagagccaaacagtgttatatcatgtatgattttttttttgtgcaagcttgtatatttcatatggaagaaaaacctaatttttacttctacatggatattttctgtttgatttgtcatttatacatgtcttgtaacagtatgcagatgaggatgagatgagtattgatgaaacagagtcagtggatggagaaagtgtggataagaataagagcctatttttgagtagctctgatgttgactcttggtgtcaactagtcacagaacagcaaaatctggctgcccttacgagtctgttaaatggatatcggacagcatgccactatagagctcagtcaagtggtgtcattattgccggctcacgccatagatttcaaagtagtgaaaccttttgcaagatactgatttttacacttaatgaggctgataatatttttaggaagttgcttggattatcaaagtccactatcaagaaggagaaactttcggaactaaaaagtagctcaaagtggaatgcattcaagccactcattaaatcatatttgaggagtagcctttatcttttgaatcaagttactgaaaccgagatattgaccttctccttagcccgactaagagcctcaatggccttttttgttgcatttccttcattacttcgcagactcgtaaaggtattttacgcaatcaacctttaaaaaaatgtcataagtgtcctacattaaatcaagtattgatgtatacatattatagctgatgtgaatgcctgtgtacagatctatcctgttaatagattatcgtgcagtgtcccctcgctaatggttttcttttcacaaattatacccatgcaattttaaatcaaactaacacctaat

SEQ ID NO: 267737 - DNA, 2240 bp, Cannabis indica
attggtcgaggccaaaatctgtggtggaagtgcgaagttttctcagtttagtagggtattatcgatgttttgcagaaggattctctaagatttctatgccactaactgagctaactaaaaagaatcaaccgttcgtatggttagacaagtgtgaggcaagttttcaggaattgaaacagtgattgataacagcaccagtgctagctttgccatcagatcgagaaaagttcattgttcattatgatgcatccaaacaggatctaggatgtgttctgatgcaagctgatagaaatatagcctatgcctccagtcaactaaaagattatgagcatcgctatccaacacatgatttagagcttactgctgtagtatttgctctaaaaatatggtgacactacctttatggtgaaaaatgcgagatttacacagatcataagagtcttaagtacttcttcactcaaaaagatttatatatgaggcagagacggtgtctggaattggttaaaaattacgactgcaagattttgtatcaccctgggaaagccaatattgtggcatatgctttaagtaggagaggtcccgggcaggttttcagcaccgtgatgatagctcctcaactagcttcaaaagttgttaatgctaaaattgagtttgtagttagaaagttacacaatctgacactccaaccagatttgttagaaagaatcagaaaaacagaattggaagatcctgagctagtaaaaattcgggatgaggttttggcctgtcgacctatctacgtgcaaatagttttaattcctaataacaaattttctaaattaatcttacaataaaaccttcaagaaaatggtcattttatttagaaattaatgaactccacgtggactcctaacaacatatatacttcaaagttcaacaactagtatttatctatactatgaaaaaaaaaaataaccaataggtgactatacaacactcagttaggtctcttccgttttgaatttgaaatgtgatcttactctaaactaatttccactaaaatctccaattgtaccctttatccatttcagtaatcatttgagtaaactaacccccattcacttctacactacacatgcaagtccaactagacttttaaattttgaattttgatagccatctactctacacgccctttcttagttggaatagcccaactattctccatccattgctcaaaataaaaaggccacatatatactatttcctacatgtgcaaaacgttactcaaatagctcattaatcaccacatgtataagaccatttctaacttgccccaaagtctatatggtactatacgaccactaccactactattacaattctaatccaataataacataataattaaacctaatcatatttattcacttgttataaatactataatataaaatctttaatatatgcttatattcatctttgagctaaataattgctaatactcaaatctcttttatttgagaaaaataacacaagcatgtacttacttataaaaatactatttttctaacaacatattctatgaaattattatttttacattgagatatctagactaacgtaataaaaaataataactaaatattttaattattacatatctagatagttattttctaagttacttttggtatttttctagatatagttaattaaatagaaaattaatatttaagttgatttgttcaagacacataaatatttgatatttttattaagagatttaattaaatagaaaaattatatttatgttgaaaattaatttatttaattttagatcaacataaattaaagtaatttttttccaaatttattttattttattttgataaattttaaaatgtattttagttggtaaatacattgaatttcaaattaattagagatatatatacggaacacttctcaatgggtattacccattgatgggtactaaataaatttaactataaatattaattttaaaaatattaaaccattagatttgatccaatgacaaatattaaaagagaaatttgaatttctatgtttcatttagctacttaataaaaaaaaatatcaaaaagtacctctttatacactaaataaaaaatgtaattatataaaaaatatttaagtcaaactcatcttttttatcttttttttttttgccaaaaattttattttattattttttttttcaaccgaaggaacactct

SEQ ID NO: 267738 - DNA, 1243 bp, Cannabis indica
aaaaagagaagagatcctcttgtcttagacaggatcctccccgttatacattgtttcggagttctctctaaaaccagggttacaatatatgaaaaaagaaaatcctagcttattttatcaaacaaacctaaagataaaaacatgataatgattgatcctaacagaaaaaataagacatacaacaagtaacaacttagatggtataacaataaattttgaaagaaacttaaatgaaagccctccctaattttccctccttttttttcttttgtttttttccgaacaagtaacagaacattgtatcaaatcaacgggacagaataaaaaagaaaacaaaggacacatgctatcttttgaaaagttaaaaaagagagcgtgaacttgagaacagagattctgctgacacacatgaagaagaaaataaagaaaaacatgccaaatctctcccaaatgttagtgcaaatgaatcaatcatgtcagctaatcaatgtaaatatatcaaattggtgccaaggtcaccacagcacataattgcaattatttactttatgcataaagaaaatagatgcattaaaacctccttgaatggttaaggacctgaagacacgccttagttgtgtaagcactaatcaggacatatttataaatattcaactatacaactaattactctagcactaaaaactaatgcagctaattagatatgtctaacattatcttacttaacaacaaaatatgaattaaactaaatcataaattcaaattcaaacttcaagcattaaattaaaatcaaatacaaggcaaaaagagatatgaggtgacaatatatgagtgtctgaatttaattgttttgatatttcaaattagaataaatgggactagattttcaatgcaattactcagccctaaaaaagttgttgatatgaacctgcccttggatcctagggtctaacagttgccacctccctaatcatccccattagtcaaacgaagaacaaggagaataataaatacctgctcagatgtcatatccttcgaagaacaacataatttatcattccaaatatcttccaaggatagtaaagttcctaccaaagcacgtattgcagctaatgtgctaacgcaatcaagcttaagactggattgcatcataacatttcatccataaaaattgacctgcaaatagagaaaatgtatatgcctgttatttctttcatattaataatacctgaggaaaaaaaac

SEQ ID NO: 267739 - DNA, 1175 bp, Cannabis indica
aaaatgcaaaaaaaaaaaaaaaattattttgaactatataaaaaaaaaacccttaatgtaattattaaaaataatttatattatatttactcttgatgcagaagtgtcacactcaaggatcttaaaagtggtgaagtaaatattttatataacgcaaaaaaagcaatttcaggacttaaaactcccattgttaaggatccaaaggtactacatataaatcatactataaaataaattacttaaaatagttgttgaaatatggttacaatttgctaatacaacataaactttcacccttggcatgtcagcttattttttgctcaagttacatagatcaataacttagcactaactaactataaataattttcaaattaattgttgttcattcttgtcagggaaaatgagaatgtgtattgtatttcctcaagaaggccaatacagtacagaggtcttatatagaagacaaaatagaggaccctaaaatgaaaaatacagctgtaaagtaaagggaatacaacaagcataataaacttagttaacaaatgtaattactatctaacatccccctcaaactcactgggttggggaggacagtgagtttggtatgaagctcctgaaaacgagagatgaccaaaacattggtcaaacagtctacaagttgatcagagaagggagtgaaggcaagagacagggattgtcattgagcacgttcacgaataaaaggtagtgaatttcaacgtgtttggttccagcatgaagaatcgggttggaggcaccattggcaagagctcgatattcagattcgatgcttgagtgagagaagactttctattttgaaaaggaccacaagattagattcaaaccaagaaaaatgcagtaagcattaatgcttttccggtgatcagggcaagatatccaatccgcaccaataaagcaaattaaagttgaaagtattgtctaatcaaatcaataagcctaggtggactaaccctttgagatagcacaagactctcttagtagcttcaagatgagtggtagtaggagagtgcatgtagtgacaaagtttgttaatggggaaggtaatatcgggatgggtaaaggtatagtattggacaacaccaacatggctgcaatattcaatggaatcttttaggggagaaccatcatggagg

SEQ ID NO: 267740 - DNA, 583 bp, Cannabis indica
agagagagagaggagtaacctgcggctgtggctgccgtgtgtgaggtagttggccggaaatggaataaagcgagcgtttagaggatgaaatggcagccaaagtgggaaagcgttgaagtttcatagctaaatctcaatgataagactacaatctacagtacaagaagcactaagaaacgcccatgaaattcagctatggaacccacatggactcgtgggtcggataacggctatgctgctgctgctgccatcatcgacatcgagcaattcagctaacataatccaatttaaacaacatgtcgttcttttatgaaagaaacgacatctttgaagacaacagtacataaacaacgacatcaaattaaaacgataattgaatgaatacctaaaactaaaaacgactgtatcttgaaaatttggcaaaactacatagataagataaaaacgacaattttctgaagaaatagatgaacaaaacaaaacaatatatctatactagaaaaaagctacgtggcgagccacgtaaatataaattttatttaagttctagtagtttttgtttaaggattcggtaactaattgt

SEQ ID NO: 267741 - DNA, 640 bp, Cannabis indica
gcaaacccatcatttcaaaaaaaaattgaaaacttattaaaaaaaggtcctcgaccaaacctttttgatgaaagaggggtcgaactattataacttcttgaccaaacctttttgactgaagacgggtcaaattgttataacaccctgatcaaacctttctgacgagacagggatcaaacaactgtattttttggtttaaaatctttctgacaagaaaggaaaataaaaaaaaatatgattagtgcataaagctgaatactaactgctcgcgctaagggaaagtattaaacaagacgtcaaagtgtcttgaaaaaatacttaaacctaacacgtgggtagaagaactaaatactcatgtaagcaacgaaaatatatacaagatgacatgttcattagaaatatatttgagttcgcttaaaataagatcatttctgatgatcgcgaggtggaattgaagatggcttgcaggtcgagggttgggaagataagccgctcatgcataaagtaggaaattaactacttagcattagaggaaaatacgagcaatggaaacccctaataaaatttgtacgtatgtgattgtttaaattgtgaatgaaaagcaagcaaacatccacaaattgaagtttaaacttaaagg

SEQ ID NO: 267742 - DNA, 929 bp, Cannabis indica
ctcttagtttaaattatttttggatttcaagtactttttcaacaaatcaaaattaattattgaactgtgccaagactcgacctttatctcactctaagcacaacctagattggtttaaggtattcttttttggcttaaactttgcaatctattgttgattgatacataaccaaaactttctacttctgagcagtatggttttgtgtaatttttgcacattattatgtctgtttccttgtaagtcatgatttcttgtaatggaattggaatgttgttaaaggatagaaatttgattgtaatgatcttattttagtcattttgagaagtttttagatcaattgatttctatatttataattctttattttccaatcatttcagaaatcttgatagttataggggactcagctggtggaactataaaacaaggccgcaatattttcatgtgaaattaattcaagttgcagtgatttttttatttctatgtattttcacacaattatatattgtagtgtgttctatctgttcgtgcttaatttggaagcaaaaatatgattatgtaaattgaattactagatatgaggatgtttctagacaaggttaccgttaattatatttcaaatgtttttgaccttttcttttaatatcatataaattgggattatgtattaatgatatcagttttagaattgactttattatagaaataaatttggattatcatagaaattttgcaagatttggcattaaaagtttttgaatatgtcttttatagttgaattctatatcaagtaatgcacttatttgggtctttattatattttacacaaaaaaaaaatctgtttcaaactgcagttcacattggtcgattttaaggatgtttctggattggtcggtcggttttcggattgaaccaatccaaacaaaaa

SEQ ID NO: 267743 - DNA, 1173 bp, Cannabis indica
cttgactgactacacaagtcatatatctcgatgtcacatctgaaaaatccatctccttcgatcaatcttgcaggtaacattccaaattcaatgtatcttcaatggcttcaattcaagcagtttctaatgcattagcttataaataccatgactgagcaaatgcagggatatgtcatcaattgcaacacctctactgaaatttggaatgtttttgcctaactctttgccactcaatctcgagctccccttctccagattcgtggccttctgcgatcaaccaagaaaggatcaacatcgattgatgaatacaacttgaagatgatgcattatgttgatgccttagcttctgctggccaacctctcactaatgatgatctggtgttatatattcttggaggcttgggtcttgaatatgatgttgcgataaatctcacaaccagatatgattccttgactcttcaagaggttcagctcatgttacacagataagaaatgtaaatcaatcagcaagctagtgctactctaaaaaatgttcatgctaatttttatggtttgtctgtacaaggaggaaatcgtggaaatcagtccttctttgatcgtggatctcgtggaaacttttgaggtagtcgcaaaaattactcaggcagaggcagtggtcgtggaaacaatctagtatgtcatttgtgtaatcgtgttggtcatacagattagaaatgctatcaataatttgttaggctatttttagcctaagctccgggtcaatttcataagcgttttctcagttaatgttgccttttagaatggttttacgattggttttccttgttttaggttcctgatgcattatagttcaaattctatcgattggtgaaaagacaagacaatttggtgaaaaatttgctgaagttgccaattttgctctagtagtcgcgaccaggacacaccatagtcgcaaccattttcttaggtcgcgactatggtcgggactagggtatttggcagaacgggtgttttttcccatttgcctatggtcgcaactagccctttatgtagtcgcgaccaagtacgaaacacgggattttcgactagttttgaatattttccattcagaggcaacaaccctaattcctttataagggactcgactcaaatggcaaaaatcatcaaaaatca

SEQ ID NO: 267744 - DNA, 819 bp, Cannabis indica
agctacaaatacatagctaggagtatatcgatcttcttagttgtaataatttagaaaagaaaaaaaaaaaagctaattaaaacacagtggcatgcaaatggcaagtgccaaactgtaatgactaaattaattattatttagtaggataatgatatgtaattgagatctcaacgcaataaaaataatatataattaggacagtttttaaaatgaagacacagctctaaagctaaataagtaagtaagtagtacacatcgattcgtttcaacatgcatgacagtagctagtgacattgacagcagcacacacactattttcttttctcctaaataaaacaaaatgaaatgaaaaacataataataataataataggcaaaacacacacaaaagtagtttaagatagtgaaaaagaaaagagtgagttgtaattggtaattaccaattaagtaggtgattacgtcataggaataaaaaaggaggaggttttaattgattatttgggtgtgtgattttgtgtgtcagtttttgagaatcagtatctcacctgctactttaaattaaaacaaactctttctagctatatagctatagtagctagctagtggtacgtactctactcatgaatcatcatcaaataaacccaacacccatttttcatgtgacctcattctcttcctcattttcatataactccattacatttcattttttttttaatcaaaaaaaaattaaaaacaatcttttcttaaaaaaaaattaatattatgtaataaattaaacatacaaaatatattataatttgtatatttagagtaaat

SEQ ID NO: 267745 - DNA, 1127 bp, Cannabis indica
tagggtgatgaagataggttttaaacataggcaaagagtaagttttaggattttttttaataaaatcagattcagactgctcagagtatcattatgttttattttatataatatagattttaaattattatttaataaataaaaaaattaattagtaacttttgcaacacatatacaaaattcaaaataattaatattcatttttaaaaaatccaaaacaatatttatatttatgtatgaatattttattttatttttttgaaaagtgacaaattaacatataaaagcacatagggccgaccttgagttgaaataggtcataagtaaaaaaaaaaaaattagcacttaccataaatataaataatatttttaaaaattattaaaaaatatacatatttttaaaatgtattttttttatttggttccttaaaatgagtggaccttaagcacgaggctaacctacctattctttgggccggccctgggagcacataaatttattgattattggtatcaccataaaaaagttctaaatacaaataggataactcgatcatcaaacacttaactatttctaataaaacatacttagttaaaatatgagcaactagaacacaaagataattaaacaaaatacaatcaaactcaatatattttaaggctaatctcaaaaaaagaatcaatagcattgtgatttttcaacttgagaagattgtcgtttttcaaggttattgttgtttgatgtcgtttatcatcatttattgtcgttatgtatttttagtattcttgtcgtttttcaaggttgctaattggtttcatgtttttaattgtcgttttatatttgttatgtggtttactttttaatagtgtttttgtttatataatttattgtcgttttcatgtttcattgtaatttgatctcttttttcgagtttgagtagcatttgatggttatcttgtcgttctataaattgatgttgtttgctgtcgttttttaactttattgtcgttttcaaatgtattgtcgtttttcaaatatattgtcgttttttgtactttttgtcgtttaccttttctaatagcatttttttcgtcaataaattgtagttttctccaaaaaaaaaaaa

SEQ ID NO: 267746 - DNA, 1158 bp, Cannabis indica
atcggtgtggtaattttcaagtcctgactgatagtggcattcaatcccctcaaatatttctatttccaggtgaagtccgttggtactaggtcacaagtgaacttggataggcaatcaaactctagggtatactcagccactatcatcttcccttgagccaatttcacaaaatcttccatatgtgatgttctgatggcaatgttataaaattcttcctcaaacaggctcttgaattcgtcccaagacatgatgataacatctcgggtctgtcccacaatatcccaccagacgcgggcatgctcttgaaacatgaatgcagcataatcaactcgtccagttcatgtcacccccatattatccagtatacgagtaatagtgcccatccactgctctaccttaatgatatcagtacctcccaaaaatgttggaggttggagcttgacaaaatgctcaaaaactaagtctcgatgttgtagtacaaatcttgggttacccaccactggaataggagcttgtggtaacacttgttcaactggagttgcctgggccgattacctaaacaaacgtaactcatcttcttgacaaagtatgatgcttcacatttcgaggaacatttgctaccagtcagtatgtggattagcattgttaacccccgcattatctcatggattctacggaggctcatgctgtgcttgtggattggtttggtcattaccgggctctacgtgctcgccctatggtctagatgattgattagggtccatttttctcaaatagccctgaaataaacaacctcgacgagttaggcaccgaaactacacttacacacttattgccttaatcctaactcatacatataatttctcttttaaaataaacatttatcaatttaatcactaatcaggcttttcacacaacatttcattttctagatgctcatatgttgcctacaacaaaaaatggtaaacataaatcacaaaagcagtaaagcatttactctcaatactaactgcaccacaagtcgagcttgtctttgaagatgattgtacatattcagctgatctacaagaagtttaaaaatcttggcgctttgataccaaattgtaatgccctaacaataggaacgccatgaacggtgactaaacatatgttgatccc

SEQ ID NO: 267747 - DNA, 586 bp, Cannabis indica
taaaaaacatttaaaagtacggtggaccccccctgccgtacaacggattccaatccgtgttttgcacatatgggcacaaaatcggctgccatatagtatattagatttaagagcgattctttcatgattttgagatatacaatttatcatacactcttatattataattctaatatggtattagagaaattaaaagtgttatctttacctttagcttccatttagaacctttccgccattgtttatcagtttctactattcacaaatttttcgattgaactttgtgagttttttttttaaatatcacgctcaattctatggtctcagatttactatacactcactttatacaattctagcaacatagagcatctccattagaaatttaaattgttaatcaattgctaaaatataattcatcttgtaataatattgtaaaatgtgatttaaatttttcatatagtaaaatttgatctaatttagatcacaatatgacaatatgtaaaatttatatcaaaataaatgtagtacttttatatttatttttatactatttttttatattttattattaaatttaattatt

SEQ ID NO: 267748 - DNA, 797 bp, Cannabis indica
gtaaaaaataccgcctggcagtaattttgtaaaaaaataacaaaattagtataccatgtaaatttcccttattatttgggttattttatattgcaagaaagaaaataaaataaagagcttttaatagtgcattcctgaaaattaatgtataagaatttttgcttttaccctgtaattttttatttttttacgtgaattttttttcaaaaattttatttttctttcaaaaatactgtgtactgtgttaagttttcacgatttttttaattattccactgttgttttaattattctgttttattgttttacgtttattttataaaaagataatattttttacaaaaaattttatgtgacggtaaaattataaacttttacttaaaaatcaatacttttgtaaaacttcctttaatattttcaagtggtggtgatggttcaaaattaaagttgagggtatatattttttttgttgtgagtgataaaaagtaaattaaatattaaagataaaaatatatttttgttagaatttaaacccttaacttctataatataagtaaaataatttttcaatcatgtcaaaattaatattatagaaatatgttgacaactatcattttttattatacattaattaaatataattataaaataattttaattaatacttacctttttataattaaagtactaaatataaattcacataacttattaaaatttttaaggcacataattgagatataacctataaaattaggtataaattaaagaataataaaaaaatataaaaattttaa

SEQ ID NO: 267749 - DNA, 2141 bp, Cannabis indica
tattaccgctatttttcgaggtttgggatatatctgtatcaaactgaactttttgaggacttttaccgcaaatttccctattaaaaaagccctaaaatgtacatttattttttgttgacccaaatgctataataagtagctgcaaatatagaaatatctgtagcctacagtaaactcaaagaagacagagataaccaattgaaccatcccaagtaatccaatggcgaagcatttttgcccagccaatcaaagacaagtctgaccacctgtgagacagagaacactcaaaaaataggtgttcatgagttatcattccatcagcacacactgaacaatcaatggtgtccatcacaacctaaaatgttaacaagtttactcttgttaaaagttgatgattcacagcttgccataaaacaaattgatgcttgggtagcgtcaaagagttccaaacagctctatggtagggaacttgctgccgatgaagagagctattatatatagtcttcttgttttgagtttacctgcaaagattgcaatttcaacctccaaaaatttaagtctcaaacggcaatgcttgcgccaataccagctcgtgtcttatttcaattcataggaccaaaggagatgttcttcagataaatgttaataatctatttaactcaaagaatatatctctttgctgatatgtcccaaatatactttgcaaggttggcttgattccacttagctccatctttgaacccaagatctcctaagccttcgaaagacaaactttctcctaacatgctacatgaatttttttcttgttaccagttaggccccgaagaaaccctctgtataatttctctacctccttaatgatctttggggaagaacaaaaatgtttcatccaatagttgcaaagtccaagaagaatagagtgaatcaattggactcttcctgcaaaagagagatgtctagtagaccaggaatgcaacctctatcttatctttttgataataacatcatagtcttaagccttgcatttagttggtcttaaaggaactcccaaatatttgagagggaaggttccttcagacagtttaagaacctggaggatattgagcttctcattagtttccataccaccaaagtaaatttgagatttctatattaatatgaaatcttgatgaagagctgaaagcatcaagagcctttttaagaaccaatatcggctgcctagaccctttgctaaacaccattaaatcaccagcaaatcaaatattaatgatttttaagcttttacacatagggtggaacctgaataaggaattatgggcaacaatctagagagtacttgtcaagtaatccatgattagaacaaaaagcaaaggggataaggggttcccttgtctaagccttttttctcctttaaaactattttggattctaccattcaatataatcgagtaatgggaagatctaacacatgtcatcactaatttaacaaacctttgaggaagattgaaagcattcaacagagcttcaaggaagtcctaatttaccgtgtcataggctttgctaatatcaattttgatggcacactgacgagaaacattttttctattataattcttcaagagatcctgaagaatcatcacattataggctatgcatctttctgaattttctcatatagtagggtcaaattattcccaggatgcaggtacttcccaacctgttaatgaatctgtcatgcctagttcttctgatgtttttactacttataatgtctctcctcattattagattaggaagacaagtcactaaaccctcttatcttaatgaatatcattgttatatggccactaacaacactattgcttcttctcaggcctcttttgttactaaccatcccttgtctcaggttcttgggtaccacaggttgtctttagcctacagagctaatgttctagctatatcaagccattttaaaccaacaaccttcagtcaagcccaaggaatacctaaatgggacaaagctatggatactgaataaaagctttggagaaaaatcacacatggatagttgtctttttagcctgctgatcagcatgtcttttggctgtaaatgggtctataagatcaaaaatcaaatgttg

SEQ ID NO: 267750 - DNA, 1109 bp, Cannabis indica
cagaaaaaagagggaaatttcaagttctcaagttcttcataatcattgtattttcctatccaatcaataagtttaggcaccatggaaatgatattgtcttggtattttttatttatttattgcttatttttttagctagaagacaaattcatacaaaatgatggttttgaaattcacaaggaagcaaattcaatggctcaaaaagtgttcaaaaatctctcatatcatcatcacgtatgaatttggaatagttatacctttgattttttgcgaaatttttaaaatatgagacatttgctagcaaaatttgacaatacgagatatttccaaacaaaatttgaaacgtccaagtgttttatgcaatttctagaacataatggctattcactgcaaattttgaaagcccaaggtattttttgtgaattaaaaaatctgacacattttcttgcaacaattaaaatccaccataattttattgcatttaccattttaatagaagactaaatttgttgttcaaggctaaaaagatagaaattactgtagtaaatcactacaattacgatgatacgaggactatgttgacttaagaaaagaaaataataaacatctaaccaatcattaattttatttctattttttctaaaaaaagtaataaaaataaaaagtatagtatggactttaaagtgtcacaatgaagagaacctttagattcatgtaatcgcgacttaagatgtaccgcccatccttagagaatttcatatcagaaatggatgacaacaatctactgtgaaaaatgatttcgacccgcgtgaacctccatcttccaatctgtaaaaatcaacccacatgataagtttataacagcactaagtgtaacagtaagcatacaggaaagccctgcacagaaaaaagttgcaacacaaacaacaatttaatcatgaatcaaacaacactaacattatcgcactgtgatcacataaagctgattgacgcatgtcaactaggcgaataaatcctcttgagctgccgtatgcaagaaaattgcaatgaattggatggaactcagctattgttataacttctgtataaaacatagggaagaattagaa

SEQ ID NO: 267751 - DNA, 2292 bp, Cannabis indica
atccaaggtgtaagtataccaatatttttcatcttattttacttttagttttttttttctgtcaaataatttctaaattaaatagttgattatttgactcgatctctaaatatctcaattagattgtttgctgtaattttaatgatttctattaataaaattgcatgaattattggaaaagaaaaaatggaatgtgtttaagtgatgtataaatatggatatacaagaaagaagtcaagtcttccacggcggtctctacttaatttccttctttctttcactttttctaatttgtcaaatattcggataaagttcatatctaatgtagcatttctttttatattctacacaatacaaccacccaactaaatccggcggctgtaagctaatccgaatttgtggtgttatccttatcggttatcatataattgaaaattttaatgtttgaattcaaaaagaaaattaaagaaaaatgaagcacaaacaacccataataatattaataagcgaatgatacaatctttgtacaacgacaaacagcaataaccaaaacgacactgagttttaaagaaaagctaataataagctaaacacaaaaacgacaagtcctaatgccaaaacgactctaaaatcaccacattaacaaatagtagagtaggaacattacactacgccaaaccaaaccaaaacgacatagattgtagggtaaaacgacacacgttattcagttgagaaacatgtctgcggaagccgtgatgggctgaatggggtaggcgagctgccatggcttcatgagaggatcaggtatctcgggaatatcgacggagaggccactgacatcttcaacgatctggagaacagagttgagagagcggaggcgatcggtgagttccatggcttgagccctcaacacgttgttggcagactcaacctgagaataagcctgctctttcgcattgatgctctgctgaatctggttaatcgccatctgcaatcgacccgtttctccagttagatcctctaactgcttctgcttcctcatccgggaacgccgtgccgattcgcggttagaaagcatccgcttcctcttcttctcgtcgaccaccgtcgctgacccgtcggagccggagctcgcctggcgttgaatcgatgacatttggggtttttttgttctctttttgaattagagacttaagaattggattaggaaaattggggatcagaattgaaaattaagcagggaacgggaaaaaaaaggacagaaattaaaagaaacagattaactgaatacgaaatttaattatactgattatgacgatgaagattaattcatgaaaacacgtagaaccagtagagaaagacaactgagaacgagtgaagcaaacggatccgccgcatgagggaagagaatgtcatagaatatctaaattcattggcgtagtctacgaatccaccaaatatgaatcacaacccagaaaaacaattcaaattgtatagatctagagaaaggagtcaacaaaacccctaatttgaaaccctagattatgattttttccgatgaaagaccaaatatttatacaactttgaaaacaaaatctcaatcaaagaaagaaagaaaagctaaatcaaaagaaacgaaggaaacagctagagagaaagagaaacttagctgaagaaaagagggaatatgcgaattgagatgcgaagcgaaagaaggaaggttagggcagaagaagagaaggggttataaaggaaaaacaggcatgggatttggggtaatttcggaattataattgtaagtgtaaatattaaaagttattacgtgtcgtttttttattgggcgatgcctatattcacgggtttggtgttggcaaattgtctggtatcatggctggcgtaagaaatgacgtcatcaaccagctatacacacgttttaaggcattccctgtcttcattgcatttgcagtacggctacctccttccacgacctttctttttttcttctttaattattttttaactttaaaatgtaaaaggtgtcaacaaaaaaatatttaattataggttttctttaagaaaattaagtttgaaaaatctgtagaaattaaaaaacattacagacaggccacagcttattctattgaaataatgggtaacatcttttattagtagaaataagtaacttccttttaaaaaaaaaaagtaatgaatatctgtccaaaaaaaagaaaagagtaattaatttaaatctcaaaatttaaaagaatactagtatttctttttttttttttt

SEQ ID NO: 267752 - DNA, 768 bp, Cannabis indica
ttattaattttcccttcttccttccattcctttctttctctgtcttctgtttcgagcagcccagctccacgtcggacggagctactccagccacaccaggtcggataggacctccccacacaaacccatccgcaccagaaacccaaccccgagaccccttcccagccgcgatctctcttctccgtcgagcagccatggccaggcctgacgcttgccgttctcagtcgtccaagctcaaaaatctcaaacagacagttgcatcccaaaatcccaaaaacaccccaaaccctgactagcccatctcgctctgcctcctctcccggcgagacacaagaacagctccggctccgtctgcatctttccataaactcaggtttgtttttaatttttatttatttgcattaaattaagactacaaaaattgggattggaatggttcacatgtagttttatacatatgttctctactatactttgttcttgatttgattgttgtgttcaaaatagaatgtacttaatcttccctttgatgattatttttcatttttatttttatggtttgttacagtatgttttggttgaatagaatcatgaaatcttcttctttgttcatactatgtatgaatttagggtttcaaaaattgctaatgaatggcgatttgtggctgagaaagaaattaggtttagagtgagagattggtttataaatgagggtcaagttatgggtttgttctagggccggccctaggcagtaggcgggctaggccc

SEQ ID NO: 267753 - DNA, 660 bp, Cannabis indica
aaaatcaatgaatcactaattagtgacattataataaataaaaaatgttataatttattgtagactaaatttaacacaattttatatattgtgccaaatctgatacacattttaaacactattaaaataggttttttttttaatgtactaaaatatagcaatataaatgctctaaaaagacatttctgagaagacttcaacaatcggtgctgggacctcttcaaaccatcataactgtctagcctaagggcatgtttagccaaaccatgggccgcagtgttatctttgcgggacacatgagacaaaactgcccttggaaatttagacaataaggctatgacatcctctaacaacacgcccatctcatttgcgaacaccatcctgttattaatagccattactactgagagagattcaaatttaatcgcttctagggaaatcccacacgaatgagcccaatttagtccagtcagtatggcaaaagtttcaacttgaaaaacaatagtactacctgaaaagaaccaaacaacaaacaacagaacaacatttatacaagctggaaaacatactattcacaaaactagagaaaataagaagagactaacaaccaaatcaaaacccctccaacaccaaaactgaaattacaattaaaacaataaa

SEQ ID NO: 267754 - DNA, 1543 bp, Cannabis indica
ttattacttattgactgcgtatacttgcgtatataattttttcacaacagctagatattatcctaatggtagttttttatctaccacattaggacaaaatcctagctttatatgaagaagtatatttgaagctcaagatgtagtttggaaaggagctcaaaagacgattgggtctgggcacactgttagtatactaaatgacctgtggctgccagatttaaataacccgtatattgttacggtgcacccaagtcttgataatcaactttttgctttgctgatatgtgttgatgaccaatcgtgggatttagaggtgatcaatgatctatttgtggacagggatagagatttaattctctctatccaacttagtgatcatagttcagttgataagtggtcttagaatatggaaacatcaggtattttttctgttaaaagtgcgtataaacacttacaatctgctcatggcaattggtccattatggatgatgtttctagttggataaagctgtggaaattggaggttccccccaaggttctgcactttttgtggcgtgccatttcaggatgtttgccaactaaagtgcagttgcaaactaagtatgtaaatgtggatctacattgtcctttctgtcttaattcttatgagactatatcacatgtgcttatggagtgtcaatttgcaagatcttgctggaatttggctagctcgagtgtggttcacgggtttaaccatgattatagcagctggttttttaaggttcttgattctaattccgcaaaggtttctgctgatgctgctatggtaagttgggtatctagaatgctcgaaatgatgtattttggaagcaaaaaatgcgtactactgctggtgttgtttgctcagcctgatccactctgcagcaatggagtgttgctcattctcaaaagcttggcccgttgctggtttttggttcacatactggtttggagctatggaaaaaacctttgtcaaactccattaaagtgaatgtggatggtgctatctttgcaacggaacacaagtatggctttgtgttgtgtggcacatggagcttatgggaaattaattgaggtaatatcgggtagttggttgggagatgtggggcttgagattgccgaggttatcggggtgaaagaagcgttgagttggatcaaacgcatagggtggactgatgtggagattgagacggatgcgctagtggtggtgcaggttgttctaagctcaattcaaatgccgtctcaatttggtttcttggttcaagattgtcgttctttattttcttgtcttaatcatgtgtctttaaattttattaaatggtctgctaatagggctgctcattgtgttgcacgagcgtcttgtttccattcagatcgtatttttagcgagtgaaatgctcctcttgaacttatgtctattgttgatgctgaatgtttctgattgaataaattatcttttgcttaaaaaaaaaaatacagtggaataactaaaaaacaacagtagaacaacagtaaaaacttaaca

SEQ ID NO: 267755 - DNA, 1032 bp, Cannabis indica
gaagatattagaactttatgttctcatttcaatgttgtgagttttattatggttctagaattgtaaacgtagtcgctgcactagttgaatattatttagctaagtttgttttaaccgttactccgaacatagtgtggtggtctagttatctttcttgtattcgaaaccttattttggatgatgccatgttttaatgaattctcctaactctcggtcctttgagctcgttgcgcttggatggtattttctcgggctattttctaaaagaaattctagttgtaagaatatggataacttttccttgttagtataataatttcatagctcaaagaaaagtctaaattaaagagacaagatttgacgattacatcgatacatacaagaccacaaagtcagttaattcatgggacattcctaatagatacaagttgatcctcatatgaatattcccatatctttaaattaaattttctgtctcaaaagtctttttcggaaatctcggcgcaacccttcattgttcttataacctttcttttgtcctcttcaaaccggttcttaattcttattaattttatacaccaaccagagctgagataacctttgtctttctccaatgacttcatctctatataaccttgtatcaccctaacacaattttttcaaaagaaaaaaggaaaaaaagaaaaagaaacaataattaaaaatggctaccgtgaccaggtcactgagcgcagtgttcccaaccgttgagaaatgttcatcaaccggacgagaaaaacatactgtggtagctgacatggacgggacattactaagagggcgaagctctttcccttactttgctctaatcgctttcgaagtgggcggagttttgaggcttctcttcttgcttttggctgcgccattagctggatttctctactactttgtgtcggaatcggctggaatccaagtcctcatatttgtcacctttgctggaatgaaagtctccgatatcgagtcggtaggaagagctgtactgcctaagtttta

SEQ ID NO: 267756 - DNA, 1195 bp, Cannabis indica
aaataatatggaaattatctatgtgatttattaacttgtttctttgaaaattcttgagaaatcatacccatttatgtgttcttatatgtatgcacatatatagttgaatgttattactatttatggtcttaataaaaaaggttgataaactcatacacaaataataaaatataaatgagtgttattactatttcaatctaatactctttttttctcttttggtttgcagcaatttacacactcgaaaacttcagtgatgatttcatctaccatgtacagactaaaatcaaaagtaatctctacactcattacatgatactcagggaaccacttattattttgaatgattctcttcattcttttctgatttccaacgacaatttttttttcgctattgcagcgatatgtgttctgattttcgacttttggatcgaaaaagcagaaacaaagctaaacaatatcataaattgttcaaggtatcatattgctctctccacttttatgtttatatttcacaagttaacaagtttataattaggtttggaatataccaacccaacttgtttcctaactatgtttcaaatattacaacaaacttttcatgaatttgaagagtacttactgcttatttaattgttttctctattagaatttctattatcatttttaaggtatcaaatcattctataatgacagttttgttaattatattttcattatttttaataggtacaatgagcaatccaataaatcatctcaacaaatttttctattcgtgcggtgagaatttataattgataactaattgatatgatatgatattgagacatactttattattttgagatatattgtttattttaaagacttttttttttaattatgtcgatttgttttctagaatcaaataaaaatattaacaaactagtttaaatatttgtatgcataactatgtatgtgagtttgggattaagttgctggttgagtccattaacggatctcgtctatattgtggattgtagaatttacgtggtatatggttttttttaaaccttttatgataaatatggcatatttaactatggacccatttatatggcttttttaaactttggcaacagtttatgggatttcaaagcccatacggctagaacaattttgccaaaagcccatattgtgtgtattgtattttatt

SEQ ID NO: 267757 - DNA, 635 bp, Cannabis indica
cctcatagaacactagttggcaccgtaatatcattattctcacatgtctatcaatttccaattattttcatgagaattatgcaatgaaaatctatattcatgttcttcatttgtgaaagtgaaagtggaaatatagaaacctcaattttatacacatgactccgaagcttactaataaagagacaaaacagtccttcctctttctagctctatggcaagttaggagttaattacagtaacaaaagtcagcctttctgttatgtacaaccatagttattgtcacaagttcctctcatgtggttcaagccaaggaaatccaaggaactcaaaaacctctttctcttcgttaaatttcaaactcgcagtggctcttgttgcctgtcaaagaagcacgcatagccttaaatagatataaaacaaaaactgccatagtataggaagaagttccaacttccaaagtatttacccgtgtaccaggagatccatgtgtcgccggatacaatccagtgtcatcgagccgaaatccttttgagtcagctagcagtctcaacctgcagttattaagtttccacagtatttccctctaattataagggcaatttctgatttgcaaatcaggtagactacatttaaca

SEQ ID NO: 267758 - DNA, 1374 bp, Cannabis indica
ataggagtctggtctcgagtttctgagtgagagaaatctcactataacaatatcagttgaccgatgaggttcattagttttatttgtttttgggaaacggtgatgttgattaattaataaaagttatattttagtggattcctattacgtcttatgctacttgtcaatttttatttatttaaagtggagccaatctcctctcatatttctattattttttccttaaataaattaaaaaaaaaacactttcaattatttatacatctataaataagaacactcaatcaaaaacaagctagtacttacttagagtaagtactcaaattataggctactaaaaagacaaaataaaagcaaaaataataaagaggaaacaataaaattatagtagttcatttagggctcaatctattgttgtaaagattttagtttggtctatttgatttggatccctctttttatagaaaatagaaaataagtatcctttaaaattatataatcgattaattttcagaaccatttttacattaattaattgacaatattaatcaaagtaaatgcctaaagaataaataaagaacaattttatatgttcttgtatttagtgaatactacaacaaaacaatcttttagaggctgttttttctcacaagtttcataatagagaaagctaaaatgtgtaaaaaaatgctcacttattgaaaattgacatttagagacagttttttttttttaattaaaaaccataggtatagaattggattacaccattttaaagcggttggaaggaagacatgatgaatgctatttgaaaaagcctatcctgtcggttattaggaaataactgacggcatagggtgctcgcgaaatttgacacgtgtaccttatgccgtcggttatttcctaataatcaacggtataggggttatacaaaaaatcatattacgtggtcttctccacttcttcttcctcacgatcgaaaccaaaccagcagcagaaccagccaaaccctcaccacccttcgccaaccatcccttttccagcctatatctcttttatttttgcaccatttgagcatattttcttttttttttaaaaaaaaaaatcttctattttttatacctaaatctatacaccaaaaacgtttccattttttttttctctatttcagtgtcaaccgaagctattggaaaatagtagtgggtataactccagccaacgatatttgttgagaaaatgttgaatctcaatgtccattaaggtataaatatagtttttattcatttttataatgtacattgctttattttatgttttgtattttttttaaattttttcatattattaacattgttgtgttgtatgtgcatgttg

SEQ ID NO: 267759 - DNA, 1723 bp, Cannabis indica
agagagagagagaataggaaaattaaatttgaggggtattttgggtagaaatgagtaatagtggaattgttttgtacaaattaatggagggtataaattttaatatggggtatgttattagggtcaaatagtgaaatttcccatttactatctatttcaatgtctattccaacaacaaactaaacatgacaatcaatttctattacatttttattcaattacaaaactattactaccattataattaaacgtactaaaccaaacacaagttaaattgctcacaaaaattaaccacttgaagttgaactacctcttaagtggcaatagagacgagagtacgagttgcgtgtgagtggttgagattgtaaaatgtattgtacatacaggacacgctgatcaaagacatgcatttttgttgcaagatttttctctctagtgagagtgttggaatgtccaacttgactggtttatagtctgcttttggtctttttcgaatattctcctgcgttgtagtttctctcaagtatgggtggaatatctgaacaaagtgagcgagaagtcattatgatcaattcaacaactgaggactctggaggggtaggtggtaacattaactccattgatcctatgacaggggggtagttaataaagggggagtagctacagaggaagtaaatacaaaggtcaacgaaaaggggaaccaattggtatcaccagatgcaacaaagaatggacaaccgtcagaggatttggaggagcttcgacaggactttattcaggcgatgtccatggatctggaaccgaattttgaacttaatgaggagattaccagaactgacattctcgccagttttctggaaggagttggggtatcaagaaacagattgaaagatatcctgggcaagatttggaagctgaaaggaacttggaaaatgaaaaccctcaaaccagggctttggggaatattttttgatctggaggaggactgtggtgtggtgcttcgcaatagaccttggcttataaatggtaagcttctggtcattaaaagatggcctgaggatggtgcatgggacagggtcgacatgacgaaaactatgttctgggttcaaacgttggggttgcctacaccttatcttaatcgttccaatatcataacgattgctgctaaggctggaagatacattggaagcgacacgagggaccaacgaaccattacaagaaggggttacttcaagtttcaggtcgaaatagaaacaaaatgccaactttcgtatggtttcttcttggacattaaaaaaggcagaaaggaatggatacaattccgttactttaaacttcccaggatctgctacaactgcggtcacctgggacatgacaaatccaagtgtttcagaccgacggtttatgcgtatccacctgaaggagaagcggtcttggcttttgggccttggattaaagcggaaactgccatttttagttgttttaatacgttgaatcagcttgaatggttccgagagtcttcatcgacgacggcgatgccgccctctagggttcaggggataccagcggagattgcaaaccatggggatcagcagcgcgccaatcccaaagaaaaaccaagaaggatagcagtcagagttcaggaaaaagagacagataccgttaaaggaaagaatttgaaaatagtggagaaaccgaaccaagacataacggatgcaaaagg

SEQ ID NO: 267760 - DNA, 1816 bp, Cannabis indica
tgggaaagggatccaaaaattggagtacttagagaaaaaagaactctgcaattgttatttttcgcattcaagagtttgtttttaattttacaactctgattaataaacacacaaggggagtatgctattaccgacatctatggtcgaacctctttaaatttcaatgtcattacttacatttattgttcatttttttagtttaaatctcatttattacgactttgtattggttggctaaaaattcagtcaatatatattattaaaagtaggttggttataacattagaagtactaggaagaatagtacaaaaatagttgagtttttattactaaaccatgaatggtttaagatataatgtgtgcttataagcaatgttaattcaagggtgaagtgtgacacttccaacttaagataagcctgtaatggtttgacacaaaccaaaaagtcctattgaaaggataatctgacccatgagggatgagtccaagcccatccgatgcccaaaggacacacctccgagacaaagttgattcggatcgaggaatcatactttcctaagacgaagtaattggaaccttcttggaggaatgctcggatacatccatagagggtactctaagaggcacctcgaaagcttggtaatggatgacgtgaaaacccttgacacccgatcctacataatcggggctttaaaatttactattaatattgtattgttatgcaataatattaattttttaaaatatattaattttttgaggtttcgttgaatatgtgtgtaaatattgatattatatatatttaaaatgaataaattatattatattttaaaaagaaattaagttttgataatttattttaaagaaacttatgtagagtgtattgtaaaaattagttgtataataaaaataatgggaaggttttaatggtgtactttgaaagatagagtaaagaaattaatgggggagatagactttaagatatattgggccttaagtagcaacaatattattaggtcatttttgaattaaaaaatgtagcattttaaaaaattatttaaaaaatacatgtattttctaaataatttttctttggacctacggtaagcatcttaacacactcctacaaatgttgcaataatagtaaaataatacatgatttaactaagagcacttttatcggtttctctactctatcttttaaaatgcatcactaaaatctcattttttctattttacttcaattttttacattacattgtacatcacaaaaattctactttttttcaaattttaatatattttactcatttcaaacatataatattaatatttacatatatcctcatataaaaagtaaagttaaaactccaaacaattaataaaggggtttttacaaaaatattggattttgaataaaagtttacaattttactgttacgctgaattttttacaaaaatactatctttttataaaacaacaaaatagattaattgaaacaacagtgaaacaaccgaaaaacaaccatgaaaacttaacactgtacacattataaaatttacacattattttttgaaaaaaatacagtatttttgaaaaaattctatcccatagtaaaaaagtaaacaagttgaaaatttcagtatgtggtgtaaaatttttattaataaaacatgtttagagcaatgaataatattttataaatatagaacacaaatagtaaattttaaagaagctttaaaatagagaagagtttacatttgatgtaagtagttttagtttaattatttaaatattttaaaaaatcttcatttt

SEQ ID NO: 267761 - DNA, 2019 bp, Cannabis indica
aggtcgttgtggtacggtattacaagtagtatctcgactttgggtcatcattttttgtgacctctcttggctttcgaaagggtaacaagtcaagtgactcccacaaggttgtccccatcttgttgtactagggcgcctctcaacacgagctctacatcgtggtggtcttgcggtttcatgggcattatgcttctcttgccattctctattgagtctaagagtctcttttaagcattggtgtagcacctcgttctccacgaacacctcatggacattagcggtccgtcgtacaccatgggatgtcaacaacgaactctcaacatcttagacttgacctttgttgttgggcatgggtacttgcctggacgttgagaggtcccttccctagtgggctcatcaagttgaaattcttgttggtggtccatggtgttttcttcgttcaaggggacctcagtgtcctcttccttatagtttgttcaccttgtactcaccatggtctcaagtggtgattaactcttgtgttcattgttcttaatgaaagcaccaaattgttggcataattttttgtcaacgaacctaagaagatcgtaaacaagaaagatgaacttaagtaattatcgatcaaagcaaattaatttgtagaaaagaaaactaacaatgatgaacacaatatttgatattttgtgttcaccccctttcagcggtaatagactatccacttagagttttattgatctcaatgcttgaaaagaattctccaagagtttagttctcaagtgagtttgtagagtgaaagaagtgtaagtcagagagagagagagagcgtatgtgtcttttaatgccctttacaactgatttcataacctttatataggtttgcctcatagggcttagggtttcttaacccaatatatatctatttttaaaaaatttaagtttaaaatataaaaaaaagtattaaaataatattttaaaataaatatcttcaaacaatgataacttgttgtagatattttttggactagctctaatggcatgtgtctagcacgagattaccttccacatgagtgtatggtcttggcgagttttgaggatgggcccaatggggagcactgaaggttggcttggtgcgcgtggtggaacactttggacgcagcttcactttggtcatgagtggatctccactttcgtaaattagtatatatctatttatactaatttacacttaattgtggaattgaggtaagattagtataaatagatacatatgtgtatacatgtttagcgtgcatttttagatgccattagattagcatatcaatatattggtgaaatgtacatagatctgcactgaaatatcaatacatatatactggcaaaacagtagccatcagattagcataatagagtgtcggtgaagtgtacatagagctgcactgtggtaccaatagatatatgctaggctttttatcaagaacattcctaacctagttttagacctgtaagtaggtgtgtgggagcctggttacaggtcgattatatgtttatgttttatgcttttgttactgagtttgtcgactcactgttattatttgcatgtgcatgtaagagccaggactgaactggaatgagtttagagttgaatgaagattgtacatatagagacaattaagcatggagtgttagagtcaatcaaggtagtttaggctcactaattttgttagtcgctaagacgataacttttgtataaaatataatttcgaaaatacttgtaaacttttaacgggattactaggacttaatgtaaaattatgtttaattatttaagtttaagtttttaaaaaaatttcaattaattcatattttttcaataaatcctttaattatcaaaggagtgcacagtaattaaaaaaaatactgtagcgcgcctaaactagtatggcgttacaatttggcatcagagtcgccaggttgttctccaaagaccgtcaatatatgtacaataaccatcagagttaa

SEQ ID NO: 267762 - DNA, 499 bp, Cannabis indica
gagaaaatgataagctggcttgggattttggccatgtattgggagaagaagaggagaaagataaacaaacatgatactaacaagagaggttttgagtatgtgtagggtgcagccatggtgtcagcctggacagtctggaatgagtaagttctttctcttcttcttgttcttagtactatttgattaaggaagaaagacgaagaagaaacgtaatgtgatcatcacatgttgggggatatactagaagttgcactaagtaacaagttttgggccaatatttggcggtgtatttttttatcttctaattaaactttgaatattgaaaggagtattctttcctttgccagcttacatcttggtattgctgtcaatcccctgaagttagctaaagtatataactatatatttatatatttatatgtataaagttagtcatgatagactcgctagctcaagtgacaataggtgagtgtgtgttggaggtcctgagttcgagttt

SEQ ID NO: 267763 - DNA, 735 bp, Cannabis indica
aaaatgtactgattatactaacacgagcaaagagtcttccattgtggctgatagtataccaaccattccaacagtccaattcaatggaagaacgctgaaatcataacaattcattatttgacgttttgaaaagccacataaccctcttccttgtaaaacaatattaagtagtacattaattgtacacatatatgtatatataggttaccctgaatgaggtatacgcccaaaggttggtttaaaaccaaaaataccacaaagagctgcaggcattcgcacagatcctaatcaaacaaattaaactcattatgaaacaatcaatctctaagggttaaacacaattaataatataactacgaagaatataaatacataataataaatagttaaaaccacatttggttcgtaaagaatgatgtccgttggtctcacaaaatttgacacattaatcatacttcacagaaaatttaataaaaagaagttaaatttcaaatttttctgccaagaagacaaaaaatgtaaataaagattggtttgatcatatttgtagtactatacggggatgaggaatagaattcaggggaactggggtatatggacattgtaataaattgatgtgattgaaattttgaagttatacaatgattctttgttagaatgagagttagttatcttagttggtttttgttagtgtgtgagtcagttcgttcagttagatttgttattgcttaggtg

SEQ ID NO: 267764 - DNA, 1234 bp, Cannabis indica
ttccttgactaaatgaagaaaatgaaagaacatctaattgtttagaacttggtttgttatcattctatgacacaaacttttatggcatggatgacctgaatttatcatgattttgtgtgttggcgaattgtttgaaaaatataataatttggcattaaaaagtcaatagtgataattaatcataaggtctgctctttgaagctagtgtgaatttgcattggtttatgataatgatacactattgtgactagatagtaccttccctgaataaatgaagaagaaaacaacgtagaattgtttttacacttgtgataattattgtttcaaacttcatttgtaatcaatctattacatgtatgacctgaattattttaaatataattttgtcttaaaagccaaaggaatattgctacggggcaacaatggtttccaacagcacttgatgaaacatacgcagttggtgcaatctatcttatgttaaatctcacatattttaatttaaaatagaaggtgtgaccaatattacgtatgttgcatgaagtggttttgagtaccataacgatgctcagtaattaatcatgagggttgcttgctaaaactagtgtgaatttgcaatatagcctatagcatgttttaccatttgagttaatatgtggtacacatgttaaaaaatcaaatttaaacttaatcactagattttgtgtgagccaacacatgcttcaccaattgagttacccttttagcttattgcttaactttataatatttgagaattagataatagtagttattgtgtagatgcttaaagggaaatcgagtctatcatccttaagtcttaatcactaatttatgcaaatacagttactgaattttcggagagaatcaacaatcaagagcacttccaataatttcttactctatctcttaacataagtgccgtttgataacacttttgttttataattttttaatcacaaaatgaaagtaaaatttttgttttaaaaattttgttttcgaaaaacgaaaatgcattctgtaaccacttttgtttttaattttaaaaacagaaaacaaatgtgtgttctgtaaaattaattttcattttttgtattttatttaagttgggtctaggtcggggtcagattcgattttgggtcagcagccgggttcagcaccagggccgtgaggagatttgagttggggtctggtcggagtccaaaatattgattaagaa

SEQ ID NO: 267765 - DNA, 739 bp, Cannabis indica
tctctctctctctctcactaattataagtatcaatataaatatcaagaatgaaacgtttagtctatttttctatattagctgtcttagtactaatactactatcccaatctcttcccacttcttcagctgattaccaattacctaacaaaagatctgtatcatctgaagcactaaagcttcagatttacattcgaagaagaggtggcggcggagttagagctagcggtgttgtaggcgccggaagtactactactcgaagcagcagtaaatcgtcgtcttcgtcgtcaccggcaattggaaagagccaaacttttcttcttcatgccctcttgtctatgagtactcttttccttggtgttacattgttctagtttgatgcatgcatgtcgattttggtggccatgtgattatgtttcaattactattttagtcatgtaatgtgctacaagaaatatgaatgtaggtttgtgtggatcttaattcacattattattattttttatttcattaattaaatttttatacctttgcgtgggcaaatatgcaccaagtatttttggtttgtaagtttttgatcttgaattaataaaaagtgtgaatattttacttgtagttattttcaccagtattttttggtccttatacatatattataaaatgtatagaaacattattacatataaatttatacataaagtcaaatagggtttttttccaatgaaataataccaatgtctt

SEQ ID NO: 267766 - DNA, 631 bp, Cannabis indica
aaataattaattaaaaaaaataaataccataaaaatgttaaaaattaagtaaatacatattttgtaatttttatttttatttaggtaattatgaaaaaatcccaatgctatttaatttttttaaaaataaaataactatagaaatatgctgcttattttttttcttctctttttttttaattaacaatatattggagaatatgccacagctagcaaagcttgctggcaattcttaagaaatgaaagctttgattgattttcatgatcacacgcgtttaagctgtaaaaaatgaagaacaaaaaaggtatctcctctgtattggggacaatccaatttattaatttcttttcttttttgatatgataagcctagggaataggatattgaagatcttgcatttctttcacataacaattaacaaccacataataacatttgttttgttagtttaatggctctatagataataccattgatttattctgtatatagaaagagtgcacgaacgaggactctaacaataacagctatattggtatcaaaattttcaaaaatcatacagtggaacatattgagaaaatatttattaatggtacttgtcttgaaactagctgaaaaatgtgtcataat

SEQ ID NO: 267767 - DNA, 814 bp, Cannabis indica
acttttttttccttctctttatatttgtcactgagaacttacgacacaatcacttactataagcataaaatgaacaggcattgtcattgatggaagaatttggggtcaaaccagatgttataacatttagcaccatcatgaacgcatggagctccgtagggtgcatggacaaatgccaagcaatcttcaacgacatggttaaggccggcatagaacctgacatccatgcattcagcattcttgcaaaaggatatgtgcgtgctggtgagcctgggaaggccgagtcccttatgtctttgatgagcaaatctggcgtgcatccaaatgttgtaatcttcacgacaatgataagcggttggtgcaatgcaggcagaatggatcgtgccatgagagtttacgagaaaatgtgtgaaatggatatttctcccaatctgataacttttgagactctgatatggggatatggagaagcaaaacagccctggaaagcagaagaattgctccaagctatggaagaaaagggcgttcgcccaggaaagaacactgtccggcttgttgctgaggcttggcgctctattggtttacttgctgaagcccaaagaatgctaaatgaagcagaagaaggcagggaacttgtgccgaaaaatccaagtgaagatgtacctatggagagtatggaagcaatttataagaagcaacgtctgagggcttctggttctaatattttgcaggttcctggactggctattgaaaaaccaaatgctactaacagcagaacccaaatggtttcaaagggtttcgagttttcatctga

SEQ ID NO: 267768 - DNA, 698 bp, Cannabis indica
attagggccaaaatatgaaatttcccttatcatattgtactaaaagatgcacatataaagttgtttatatgatatttttggttatatacattgctaccgtgacagcaatttctattgcgcactaaaaatcgttactaccattttcttagcaatgtaaacatgttctatatggtgatattatgaggtggatggttggttgaggacttggttcattggctagccaatctcctcatccacattggcacttgtcaattttgtatgactctttatttggacaatttccgtttgaatgatgttgtcgattcaatttagagtatcgttatgtaattgtatggtttcactatagtaaaaatcactatttttgtcaattttactccagcatatcagtcaattgtatcggttaattggtagaattgatgtatattaatatagatagaaaggggaaagttgttgcgtctcttcccaaccaaagctattgaaaagtagtatcaatgcaaaactaacataaatgagtgtaaaaatcaaattttacacattttcatcagttttgcattgactcaacagaaacaaaaattaaaaaaaaagtcaaatttggccacccttgagcctagatctaatcatagataattgaaataaatcatagatcgataactaccattggtgcttgcaagaaaaaactaaatagcaaattttgaggt

SEQ ID NO: 267769 - DNA, 1290 bp, Cannabis indica
gatcaatccataacagaaaattacgaatgacacattttcggtataattttaaagaaacaaaagtgtggaaccttgtcacaacaacgaaaagtacaacatatatacaccatcacaactaatatctaaagttgtatatatagaatcatcaatgtgatctctcacacattagggattactcagtcaagaacaattgaatttacactcaacactatagagaacactacttaatgaactttgctcttgtattcttatgagaatgaatctgtacaaagctatatgttacaaaaaattaagacctgagcttatgtagacaataagccacgagatgtgaaagaaacataaaactcataatcaactaacagacttacatgattgatataatagcttcagacagtgacaaaacttggttgttggtagaactttggtgagcatgttatcatcagttggaattttagtgatgagctcactttttcttatgagaagacatgatctctaataaagtaaagtctcacatctatatgctttgtacactcatagattttcttgttattgttgagatggagctgactttgattattacaatacacgttaataatcttttgttcaagtctgagttaccttgtatgattttcttagtccacaatgcttctttaagtgcctctgtacaagcaatgtattaagccttagtggttgatagtgccacaatagtttggaaatttgttttctaacttattatgcgtccatttaactgaaaaatgattgagaccttctacaatctaaatctttcacctgcataatttgaatcaacaaagccaacaactccaactctctcagtgcataagccatatactaatcctaaatttattgtccttttttagatagctcataatccatttaattgccatcttttcaacaatatagagaacacttgatgaaatttgctcttgtattcttatgaataaattgttagtacaatgccaaaaactgtatagaactttctatagactaaataagtatcattcttgtaactttaacattcagtctctagagttagagaattcagattagtttttatacttctccaaaatcactgctccacccccaaagtaatcaccatctcatcaatagactttctagcactaacgcaagtctagaaacctaatttggtgtagtttaagagtattaaaacaccacccttatcaactaacatatagttccgctttttgatcttaatatttatttgattgtccaatgttctttttctggattaatttgatacctactcattac

SEQ ID NO: 267770 - DNA, 641 bp, Cannabis indica
taacttttgcaaaacataaggtcaaaaatagtatttaccataataataataataataataataataataataataataataataataataataataatgtagtatagtccctccaaatgaaaaggtctccaaaagtcatttctggaaaggtatctgtctctcgaaaagatgttctcggacagctttgttgctatccaagaagaagtctcgtggaatgatagttgttctcctagaaggttgttcccggatgactttcatgtccactccgggtatagtcttcacgaaagttagtcctcctccggaagtgagttataggtggctagatgttcttcctggaagatagtctcggatagtcgactccaactggttcgttcttatccgggatggtccttcagcgtgtgccttgatccgtgactccgagagccttcttactcgctcccagatgcactcctacttatgttgacgtggagatctcattcaaatgagagttggttaagttagttattgcctaactaacttaacaacctaagttcttacagccactgactttaggatcttgatcctaagcctataaataccaccaacacttatcatttttcaggatgatatcgatcaggttgagattatatatatatatatat

SEQ ID NO: 267771 - DNA, 957 bp, Cannabis indica
ttggaagtacacgtgtcattaatatgaaaacacatatatcatttacccccaagccttttgctaggtctatttttatgcatttttagagtttattttaatatttttatatattttttttatcgctttattgttcatattaatgcttggtatttgtttttgtgtatttttcaagtaaaatattgggagatctccattttttcttattttagtgttcttcaagcctttttatgatataaatggttaatgatgaggaaaaaagaaacttcgggatttgaataatgcttagttgggattttcattgcctaaaaaaggtcaaaattcatattttttgcttcaaaagttgtggtccaaagtcaagagttctcactttccaaaaataaaatgaaaaattgaaaatttagaaaattatctggaatgtcagagctcagaagggaatgtcgcgacattcacttggtcgttggaagaaaaaaagggaaactaagaattatcgaaaaaaaggaaaaaaaaaaaaagaatctcgcttggaatgtcgcgacattggagatttttgggaaacagtgttaaatacatatttaaaggggctaaggagctaagttttaagggcattcaaacatggagactaattttgagcatatgaggatgaccaggagcagaagacaccattggaggattccaaacagtgttctttctcatctatctttatcttttatgtttttaattgaatctttgttgttttagaataacttttatgagctgattttcttaaagaattattatgtgaaccacttaaatttattttattgattattattgttattcaatttcattttccttcgttatttaaatttcatgtaatctgatttaattttgtaagtaatgactaatcacctataattgttatgtatgaattcgaatcaaaattctaaaaaagtgagatttgaatatgctttgattgtt

SEQ ID NO: 267772 - DNA, 757 bp, Cannabis indica
cataaaacccaacagagagccctaccttcttatggaataaattatttctctaactccagattgaccaaataaaacaaaacaatagagccaaatcaaatttattataggcatctaaagcactggctaaaaacaagctaaaattactatccttatgattaatatagaaggtaaaaaaatttggaatgtttccaagcttttctagcatgattacacccaaggatagcatgttcaacagtctctgaatgcaactggcaaaccgggcaaagagggtttgtaataatgtgtctaaaaaacagagaagaggctacaggaagagagtgagaaagagtacgccaaatgaggtgtttaattttaggaggtgttgtggaggcccaaattttggtccaaaaagatttattagaagcaaaagaggaggaggtaggcatatcccgagactgaagagctagatggtaagcagtttttactgtaaaaagccctgacttatccgggccccagatcagagtatcattgcaatggtggccagaaatggggacctgcaagatgtcttccacaagagagtcatcaaaaaagtcaatcaactttcccctatcccaatccccagaaggggaaagaaaaaaagaaagagattgagtaggaggagcagaagtggaataggacttaaaacgacagccaggaaaccaatgatccccaattgtgcgaatacttaacccattacccaccttccaaataagaccctgtttaagcaggtcacatcccc

SEQ ID NO: 267773 - DNA, 1248 bp, Cannabis indica
ttaggattcgtttggaacgtcgtattaggtcgtattgtattgtattatattgaattagattatatatcatattttatataatactatattaaactttaatttatactaaaatattatatatttaggtgtccataaaagttaataccacatatagttttatataaaaatattgcataaaatacaattcaatataatacaatacaatacaatacgacgtaatacggcgttccaaaagagcccttactaactaactcactgcctatacttttaacactcttcctcaaaatagagtataaatgtcagtcccatcttgtctttgagaagtttgaactggagaaaggaatttagtcaatatgtttgctatctgattctttgtagaaacatgcacaattttcacaactactccttggatcattttcctaacaatgtgacagtctatctaaatatatttagttctttcgtgatagactgaattgcctgcaatgtgttgagcaactttattgtcacaatgcagcattgcaggccctttgtgatcgattttaagttcttttaggatagataaaagccacactacttcacatgaaatgttagacgttgaacggtattctactttagtagaagaccttgatatagtatgttgctttctgctcttccaagacaccatagaaataccaatgaatatgtaaaatccactagtggacctccttgtatcaacgcctgctgcccaatctgaattggcataggcttgaagtttgaattctaatgttggtgagagcatgattccttgtctaggagtacctttaatatattgtaaaatcagtagcagtcatatggctagccttaggtgtagcaagcaattgactcagtttgtttactgaaaaagatatgtctgccctagcgattgttgctagactttctttgttatcctgggataatttaaagtttgtctccatgggagtactaaccattttgtttcctaggaatctaagatcatcaaggaattgtaaggcatatcctctttgagacacaaaattcccttgtttagacactgttatctcaaagcgaagaaagtatttcagttcaacaaagtcttttgacttcaactttgtgtttaatcttactttcaaaccctccaactcctgtgtatgatttttggcatgaattacatcatccacataaagaagcagtaggatgaaattattaccaaaatgcttaatgaataaggaatgatcagttgcttaatgatga

SEQ ID NO: 267774 - DNA, 1394 bp, Cannabis indica
agcattgtagtctgagtcataattggagtcctcatgaagtgggtgccaacctgatggttcataatcttcatacttccaactggtagacatgcatcatattcagaataaataatctcacattctagtccattgtgctgaaagagataggaatcctgattgatttcttggtccatgtatggatcttgagaatcctcaaaaatgctcgtcttatggagtaggacccctacaatgtctgtttctttaaatagtgataaatttttcttttttgctttaggggattggacataattgtgactattttcagaaatttagaatttttctagagcctttgctatgcgtcgtgaataatctgagggaaacatttctcatagggcatcatcttctatttttggccaaatttctggtagaatagtctagtttttctcaaaaataaccttttggagatcccagtactctgaactttctctaaaaggtgcttcttgggagctgtatagttcaaaggtgggattacaaactattttcttgttcttgtccaattttgcattaagactgatgaggaagacagtgtagcaatccatcatgttggatacatgtggtcctgatggataaacaaagacgtgtctattgttgcgaacttttttccattcatcccaaagtattttttttccactcctttaaaggagcgtaccaagacaaaatgtccatttggatttggtaggctggtttacttttttcttgtttgaaaaaagactgtatagtagtgtgaagagccatagtttggacttcaatagtcatcatacagatgcatgttaggtactaaaaaagatgagctatggattttggagtgaaaagtgcagttcggaaggggaccagattggaaaaaggatactttggttagattagaaaataatgttgacaatagggtccaagtttagagagaatttggttgtgagtataaatagccctgtgggggccctttcttttgctaactttttggatttagaatggatgagcttttcatctcatggaaatgagcagggaaatgagcaattcttttatgatggtgatgatgatgtcattatatatatgtatggaatggtatgcggagagttgtggctaattaaggggatggttttgagtggatgtgacgagaccatatttatagatatagttttagataaaaggtcggccaaaatattttcttttctaggaaggtattttatttcaaagagtaatgatcaaaccatgttcccagtctcaaaagttgagcattggtgttgtcttatactttcgcaggtttatcattccttttgatgcattaaaattgatttctactaagaagtgatggtcgatgaggtggaactcaaattttgtgattcccatcttgattgcaa

SEQ ID NO: 267775 - DNA, 1420 bp, Cannabis indica
aatcaacaaatgtattctttatatctttagttatacacttataattatatgtaatatatttatctatgaaattgaatcttgttattgcatattttatgagtgataaaaaattctaacaagtggttgctagacgggaagagaatggaagtttatttcaaagtatttttaccaaaatgtgaaaaaatattctaaattggaaggtgaaacagattgatgaccaaagtgataagaatgtctttaagattaactttgaaaacagaaaagatgttaaatttgtactggacaaatagccatggatctttaatggtggagcactaattttagacatatggccaattatgggaaattggaaagatgctatgctagataagatgctttgttgggttcaaattcaggggttcccttagaagtccttcacgctgaaaaacattaagcgaattggcgctatggctggagaagttgcggaggttcgtagagcaatccacaataggttctgctgaatgggtacgtccgtgttcgtattgtatttcctttgaataaaagcttgattgcaggacacttcattccatcgggggagcgacaagcttggatacaactaaagtttgatcttttattgctattatgctactaccactgtggttttttggggccatgaacaattggactgtggggctgaagaagctatggaaaaggatgaaacagggagattagtgcccaagtatggaacctggctaaaggaagatgaacctattccaaacgggtttgtggctttccaacaatgtcaaactcgaatgagcgaggcaccaactatagttgagagaagggaacatgttgaaaagttacctcgtggtgggactgaaatcgctcaaactagggggctaacaagaaaaactgccagagtagaggaagtgggtgcaaaaattatggggacatctaagggtagtatagataataggggattgggagctaaggaaataactaggcctgttgtttttgggcaggcccgtgaagatattttgaggaaggaaatggaatgtggacttcctagggatgggccccacactaaatccaattctgagttggactcaagtaatgtattagagaaaaataatataggacgccctaggggaaattcgtgttctctttctattgctactaactgtacacaagatggaaataatggtgatattgagcagaaaaaaagaaaatgtcttgaggggggatatttgtggaatctagaaggaaacggagaggtggaaatggagtggaaagggacaaagggaaggcagtggcggtggaactctatcctcaaggtgtcaatagtgttttctgttgggttttgtgccttaaataaaatactatttcaatataatggtatgtattcatttattaataaagaaacaaatttatttcattactt

SEQ ID NO: 267776 - DNA, 1995 bp, Cannabis indica
ctaaaattggatatgagtaaagcttttgacagagtggaatggttttacatcctagaagtcatgcataagatggggttccatgatagatggattgcaatgatcatgagttgcctaagttccacaagcttctccttcatgctaaatggtgaagaggttggatatgtcaaacctacaagaggccttcggcaaggtgaccctttgtcaccatacttatttttaatctactctgaaggattatcaagactattacagcatgaagaatcggcccagaaccttaaaggcttacgcttaacacgtcatgctccatcagtttcttaccttctctttgcagatgatagtctccttttttgtgaagctactaacagtacagccgtggcaattaaaagggttttggacatctaccacaacgcttcaggccaattgatgaatacaacgaagtcagtaatgtctttctcgcctaacactacacaagctgctaaggattttttccaccacactctaggaatgccaattagtgaatgtcatgaatgttatcttggtcttcccgctttttcagagcgtgataaaaaagaaatgttcagtgatgtaaaagaacgaatatggaaaaaactacatgcttggaatgacaagctcttctcagttggagggaaagatgttctattgaaagcagtggttcaatcaatccctacatatgccatgagttattttcgtctgccttctactttttgtagccaattagaatccatgatggctaatttttggtggggttcaactaaggatggttcaaaaattcattggcgaagttggaaattgttatgcaaatcgaaatttgaaggtggaatgggttttctctcctttgtacattttaacaaggcactcctagctaagcaagcttggagaatctttgagatgcctaattccttactaagtcgattgctcaaacatagatacttttcaaataacaatttcttggaagctcggcttggtcactcaccttcactcacttggcaaggaatacattggggaagggaattgcttgttgaaggactgcgttataagattggtaatggtttcaatgttttggctggctttgacaaatggattccgggatatactgatttcaaaccagttagattcaatggggctgattctttgactgtttccaacttcataaccgaccaaagagaatggaacatccctctacttaatcaatatttccaatccattgatgtggacagaattgttaccattcctcttagcttctttccttccaatgatcgtttgatttggcaccatactacaacaggctgctacacagtgaattcgggtttccaccttgctgagaatttggcagaaaatcaagaaacaaatggatcaaactctcgcagcacttggtggaaaactttttggagcttaaatctaccatttaaggttaaaatttttgcatggagagtgatgcaaaatgctcttcctgtagctactggtctggtgcaaaggaaagtaattgattctgtaacttgctctttgtgtaataatgcatgggaatcgattggtcatgtcttgtttaattgtaccaaagcaaggaaggtttggagagaaacaaagttcaccattgatcacacacatactcataatatgtacaatggagattatttgatccatttatcatctctacattccaagcaagactttgaattaattgtttgcaccatgtgggctatatggcatgatagaaataaggtcattcaaggaggttagtcaaagcctagtcaagtcattgcatcttttgctagtgcacatctggagcaatactatcgggctaaaactaaaaaccagcagcagtatattaactgcaatgtccacaccagcaatgactctgcaccagtacactttcagcgacaaatatctgatgtaccttggtcccctccgagcatatctggacttaaaatgaatgttgatgttgttgtcgaccaagaaaggaaggtattgggggtt

SEQ ID NO: 267777 - DNA, 3238 bp, Cannabis indica
ggtgctaaataaaattgatttctaggtacagttacatggattaaagacaggcttcatgtctgaaatagtggtaaagcaattaggaaattacattggcacctttgttgaatccgatatgaataatttcatgggactttggagagattatctcagagttagagtcacaattcaagttgatcaaccgctgaaacgaaagaagaaattacaggtgaagaacgaaccagattgttatgcccattttaagtatgaagacctctccgcattctgtttcatttgttgtattttgggacattcagagaagttttgtgatgttatctttactactccaccacacctgatcacgaaaaattatagcttcgagatgaaagcagaaccccgaagacgtcgacaacattctattggagccaaatggctccgagaagggcgagcagtaggaagcagtagctccggcagccagtgtgaaagggacaaatcagtggtgaacaattataatggggagcaattaatggatgatttgatgagttatgtaaatcagttaagagataatgggatacgatctccactaatcattgatggaagtaaggccaatatgcataatgtggtaagtggaatggatttttctataaatggtaataacctgggtcaaaccgaaagtaatgaggagaatgaattgttggtgttggaaaataaaagaaggaaaatgctgtcaaaagatttggttgatgactcacacgatcaagtctcaatacaaaatgtaaatgtgggcccaaaaaacttatctggtgcgggtgttggttcccaagcccgcactcaattctgaatgtcttgagttggaattgtcatgggcttgggaaccaacagattgttcaattcctaaaagagatgatttctcaaaagaaacccaattttgtgttcttatatgaaactaaatgtggtaaaaatagagctaattttgtgggccgtctattgggctttgaaggaacatttgtggtcgaggcccaaggatatagtggagggcttgttctgttttggaaaaaggctgaagagggtcgggtagtgggatactcacgaaaccatatcgatttctcgattgaagttgaagaaggaaagcattagagactcatcggaatctatggtgagccgaatagaaatctcaggcgtaatacatgggaacttttgcagtcacttgtggatgcttctcctgaaccatggtgcgttataggagatttgaataatattttacatcaaagtgaccagcgaggaggccgtggttaccctcaatggctgctggacgatttcaggcaaatggtggagaggtgcgggttgacagatatggagctattgggccactgatatacatgggagaggggacgaggtacacagatatgggtggagataaggttggacagagctttagtttcagcaaactagtatcctacttttcctcaaacttgtttaatcaacttagaatcttcaccttcagaccatagtccaatttttctggaaatggagtgtcctcctgtttttgttcaaaattacattttcaagtttgagaatgcttggttgaaagatcctttgtgctatgaaattgtaaagagctgttggaatgatgacaataacaatgacatttttgcaaagattaattcttgtgcaattgctttggcggcttgggggaaagaaatcactggtaacttcaataaaagaattaaaaagtgtcgggcagagttgaagttgctgaagaataagagagatgaattgtcagtttccaagtacagtgatgtgaagaagaatttgtttacgattcttgatcagaaagaagccttttggaagcagagatctatgcaattttggcttaaaggaggtgatcaaaatagtaagtattttcatagagcagcgagtaatagaagaattcataatcgtatcacaaaattgaggaacaataatggggattgggtggaatggggtcacgggttggaggaagtcattgtgcaatactataattctcttttttttggcttctggagcagactttgatgaggtgatagaatgtatacagacaagggtgtcagaccatatgaatgaagaatcgaaccaacaagtgtctgaggaggaggtaaagaaagccatttttgatatgcatccggataaaagtcctgaccctgatgggattacgccagctttttatcaaaaatgttggggaattggtagcaaggaagttgtccatctggtccaacagttctttaccatgggggagtttgcatcgggttgttgtgaagcgaatatggttctgattccaaagaaaaagaggcctgaaagtatggttgatcttcgaccaattgcgctttgtaatgtgctttacaagataatcacgaaggtaatggctaaccgtatgaaaccgttgacgaacaacatagtagcggaaactcagagtgcttttattccgggtcatctcatctcggataacattatggtgtcttttgaagtcttgaattacttgaagcggaagcgaaaaggaagggatggtttcatggctctcaagcttgatatgagtaaagcgtatgaccgtattgagtggaacttcttgaaggcagtactttcaaagcttgggtttggaaccaaccggatgaatttaatgcttaagtgtgtctcgtctgctagttacaaggtggttcatgggggtcgagaaatggggcctatagtaccaagccaaggaattcgccaaggggattcgttaactccttatatctttatcctttgtgtagaaggtctatcaactttgcttcagaagtatgaatcgaaagggaggatccatggttgcaaggtggaaaatagagcaccgagaatctcgcatatgctcttcgctaatgatagctatctgtattgtaaagcaactaagaagccatgagagtttgagagctgctccaaagatttgaagttgcttcgggtcaaaaggtcaatctcaacaagtcctccatcttttacagtaccaatacccaagcagctatgaaacaacaaatcaacactctcttaaagatgagacaagcagatgagaatagtttgtatttagggctgtcgagtacgtagggaaggaacaagtcaaccgttttgggatatctcaagggttaggaagaagcttcaagggtgggatgcaaaaatcctttctcgtgctgggaaagaggtcctagttaaaacagtggctcaatcattaccaaactttgccatgagtgtttttcttctg

SEQ ID NO: 267778 - DNA, 1139 bp, Cannabis indica
aaataaaatttaataataattcgatgttgtgataaactatttacattttctgtatctgttcgtgttagaaattttcttaaagttgattatattaaacaataaaattgttgaaaattgagctcaggttatatttttactatttaacaaaatgaaagatctattttatcatttaacaaatagagggtctagtaaaaattactatctacttgtaaaacaacacaattttaatgaaaaaaaaatgagtgaaagaaagaaaatttatcaaggaagatataaatataaatgcatgcctggggcaatggaatagcggctgcaagatcaataagaaaatcagacttcaaatagcgcatggcgatctgtcttgcgtccataacaagctcaccgcggccgaaaactctagagctgggagcgacgaaggcggtgcggaacttcatgagcatgtggaggaagaaaaagaggtcgaagacggagcggaagtaggtgatggtgatccccaaatcaacgtctgtggacaagcaagctgggcctcctatgtaagggaggaagaaatagagagggtctatgaacagagccaccaaactggtgaagagaaagaggtggttccaaaggccaacaatgtcgctgtccggtgctaagatttggtacctccatagaatgtgtgttgggtgctcgtccacactagtcgctttctccgtcccgggtttatttcccagctgacgccgaaaatggcggaatttggacgccggggttgagattattctattcatctgattccattgcggattccgggcttctcggattccgcaaataccatagattacacaagtaataatgtgtatcaatggaacctagctacctccattaattagtttgttgttgtttttgttataattaatgagataattataattatgattagaaggaagaagaagaagaagaagatgggaatggtgatggtaattaattgttttggtgatgaatgagagttacagacagagaaatgtgaaaaagttagttatttgacagttagagattttttaggggaaacttaagaaagtgcacgaacctcggaatagcttctcaatttgaaacatgtttggctcccgacattttttgttcatttttaattataaatgagt

SEQ ID NO: 267779 - DNA, 976 bp, Cannabis indica
aaaaattgagatgccttgacgaatctaaaaggattatttactggacattccatggatcaggattcaggacactaataaataattttataaatatatatatatatatatatatatttatacgtataggacaatatagagattcataactattgaacgtccgtagatataaattccattaatattaatttcaatccgttaataccatgataactggggtaccaatttggcttacatacccaactagtctcttttatcaattaattaatcagtcgatattctttattaatattaccacatcaccgttggtcctatcacccacttttgtcctaattatataacaatccgacttataggtaatgtctatgcttaattagttaagatgaaaaataagccaaatcatgaatattgttttggcttatttttcataccataacatttatataaatatggcccaaactatagtcttatttgctgaacttattatagaagagaaaataatattataatataaattaaaatcagcaaaatgtgtatatatataattaactcaatggaaaataactaagctatcattgtagtcatgagctatgattatctttatttctaggcatctccgtctcaaaaaatctttatatacagattctctctcaaaactcattactattattattatgaaattcagccatttgtatatataggcgaatctatctaaaatttcttattaataattctagctatagctagctaatgatcatgggagcttctctctgtggttttcaggagtttatcaaatagaccatatccaataccaagatgatcatgatcatcatggcaaaatcttcagcaatcttggacttgatcaaacgggccaggagggtgcttaaaatcatcagatgagaaggctgctaataaaaagagggacattgcactcatcacccatcactctcctaacaaactttactcatgatgatgataa

SEQ ID NO: 267780 - DNA, 503 bp, Cannabis indica
tataacttttaaaaataaaaaaaaaaataaaaaaaaaaagaccaaaatgaagggtttaaaaaagcaatctatttatagatagatggtatcattttcgtacgtaggtacgtataactctataagtagatgtatatatacatatatggtgcatggtgatgatgatgtatgatgatgagtagactagtcatgagtgatgaccataccaactcaattactcaaccccacaccacactaataattttcgaaacttggaaagcctccaatatttttgtgttggtttccaatataagttttttaataaattaataatatggggcaaaacaagcatgggctaccaactacgtacgtacgtacgtacacctatatattacaataattcaaataattctcctttcatttccacaatattcacacacacacattacattatataacataagatgaagttggaaaccctacccttatacatattatataatcaaattgttgaataaaatccactt

SEQ ID NO: 267781 - DNA, 1072 bp, Cannabis indica
tttatcacccgatttaatctagttaagacttcaaaatttaattaaatttaattcaattactaatcttaacataaaaatatgaaaagaaaaatacatataaattaaatatcacccttcatttaagttttatatttaaaaaatatatcatcctttttttttgaaaagataactttgttattatatattaatgaggaaagttatttacaataacaaagtaaatcgaaggaataaaattctctaaccaagaacaagtctcatccaaccctaagacatctcttgccaaattatcagtgactacattagcagtccgtttaccatgagttacaaatatgttaggaaaaaaggaaaggagactaaagatgtccatgattaaatctttgaaagaagaagtggccacgatatttgaatttaaggcatttgagaccgtaagagcatccgtttccacaagtgtgatagtagctgcatttgaagaactcaattaaggctgtgaaacatggttttggcctccatttcatgtgatgaaaaataacaaacaataggcattgagaaggcagcaatagcatgtcctgatgaattcctgactacagcacccacgcttatgatattttgagattcatcaatagcggcatctacattcagtttcaagtatctttgaggtggcggctgtcatagtgcaggggtagcagctgaagcaggtggcaaagaggaggtcgcaataggttgcccatatttcagttgagctgttcgaaaattattcaagtaattggtggaaaaggcagcaagagagaccgtagatctttctgattttccatgaacgacttggtttcctctgtccaaatgcaccaaagagtacaaaggatgtgctccatttcagcctttgagtatgtagaagatagatgcttcaaataatttcccttgtacattgcagcaaatttaattcaactaaaaaatttgaaataaagtaaaaaaaaataatactattaaataataaaatacaacaaaacatcataaacacaaatatacacaaaacaagaccaagtattacaaattacataaaaaaaaaataactgtg

SEQ ID NO: 267782 - DNA, 797 bp, Cannabis indica
tttggtattttgatgatgagagtgtttagcatctgtaactaataaaatttgaataggtataacttatccaattatcttcacttggagaagatcaagatgggttcaactgaggccaatttcgaggattttttttttgtggagaagaaacaggttaggaacccttttgttcccgttggtaaagtctcgaatcacccattattaccttcccccatttttatattttattgttttaatattaaagtttagcattttcttttgacggagtcaagtttcaattggattttagggctaaatgtttggatttataattagcattttttttttgaataagcaatagagtagaatagatatgggattctgaaaatttattgtcaatatatgaattaactgctcggagaattattcagagtagtatacttttttctttggtatataatgcctctgatgagtatggtctatttcaactttgatgaccatgctcgaattgtactttttgtcactaaatattttactaatagatctatgacatactcagttatgcattgaattgtatactttgaattttcttgaggtgattgttaacgtactgtggcatatatagtgatatggtaaagttgttcctgttggaggagtttcttttgacccattgatggagttgactcacattctcccaacattttgcactaaggcttgatatagttttttttataaaaattttggttgaacatgcttttggtatgctttttcataaaaatgaccttaagatataaatatccattttgtagccacatattttt

SEQ ID NO: 267783 - DNA, 1962 bp, Cannabis indica
cagaggaaaatatccctagcagcttgcacatgactaatcagcatctgtaatagtcggctatccgagcagggttgtagggaagatattcgacaagatgcaaacatgtttatgccgagcgacgtacaagagatggcaacttcaaaaactaatctcgcgaagagactccctataatcggtggagttgagtcagaggaaaatggcaacttcgtcctagttttcctattttcatatattataattatagaatcattgtaatttcctatttgtgcattgtaagcaaaagggaaccatccctcatgtattaagtccttataaatagtggcctagcctcactatgaaagggatcgagagaagactctagagagagaaaagagagatttaagagagaaaactacttagagatcaattgtaagagcttttaagaggaagaacactctgttccttctctcaagttaatacaatacaaggggagtaggctattaccctattcacgagaccgaacctctttaaaatctagtggtcattttactttactattcttgcgttcttttaattacattacttaatcgctttattatttgattcactatcgttggctagaagcgaggtcaacattttggtgatttcattgagagaaaaaacacaagtctttcgtcttaagttttgacaggtaaacaaaatggttgtacaaacccgtcgaggaggcctcgctgatcagggcgacccaatggtgacagatgccaacgtgcaaactcctagaaacacgagaggaccaccagggacgaaccccgagcaagtcactacacaacctcctacatgtaggccacagagtgacttgccctctggctgggatcacaccaggcctacaagaagctagaaacaccagttcgacaactgatcattccactcccagcactgaggttccgtccacaactaatactcaaagaccagttggggacgacaccaaactctaaaatttgtgagaggcactagggctcatgcaaggtcataataacactttgcatcatgatcaggaagaccttcgagcagccataaatctcgcgtttgccgaacagaggcgccaattcataaaatggaggaaccgagaaatagagattatgaagtcttagcaggcagccaatgatgatcgtactaggcaggcaattgtactgacaagaaaggcctaccaagtcaccaatcaacaactggctattgcatccagtattcccttggacagatcagaagggtatgcaactgggcatatcgcacaaactcacatcggtcagttgtccaatccaaggccataggtccaaactgtgggccaaatggtagacggccagatcctgcgagactgtcctttgggaggaattatacataccaacaactttactaatactaaagtttcaggccaacctattggccaaacaagtcagacaccaatgccacctagtacctcagactttgataggttacgtgtcgcacttgacctcaagaccgacctaaatcgcagaaggggcctggacgaacaatacgttccaccaactatccaaccaggtattcgcacccaagatccagttctaagagatcccaatgtgacacaggccgaacaagttcatacacttgtgcaagcataaatcgatcaacttacaaacatagtacaaggcttgaccagcccaaaactcattgatctcaaacttgactgggcacgaggatcacctttctccactgaaattaaagttcttaagctacccccgaaattcaaaatgccaatctgaatggtgtatacaagaaaagaagatcatttatcacacctaaagtattttgagatgcagatggacttgcaatgggtacgaggtgatgtaaagtgcaaaattttcctgccatactcacaaaattcgcccaacaatggtacttcaaactgcctccaggaaggtttaactcatggaatgccttctcatcaga

SEQ ID NO: 267784 - DNA, 1028 bp, Cannabis indica
atcactatctatggattaagatacgcttccattatttgagttattctctttgaatcaataaatatattatttagatttatgtttatatgcttataataatattgaatatgtttatttatagaattgaatcttgttattgcatattttatgagtgaaagaattctaacaagtgatttcaaaaccacatttaattgattatttgatggtttaagatttatattcaaaatatttgggaatttttttaatcagtaaaattttggggtgtgattctttgatacatatttatttagattttgattataaattcactaaagattattttggttcttcactattgagttcattatatatattttcatacttgtcttttgattgattctttgattttaccattataatatacgtatttgttgtgaatatttgattcaacactatttgataatttttacagaagatttattcactaaagtaattgagtttcgttattaataaagttaatcactttctcatttaaatcgtttcctaatagtctcatacccacaaattaaaatcacttggttaataagggattatgaaattccaaaattaacaaatgaaattgagaattggggtatttgttgaagaagcaagaaatgagagaaggtgatgaggagtggttgtaattcttggaaggaatgctattaaaatgggtaatccaaacaaagtagacaacatcctttccaacaacacctattgaaaaacactcagcaacacctgctaaaccaacgtttgttcaacaaacaagagctggcggaactctaacaaaacatgcataattataagactacacttgtcatattcaaactaaggccccaaatacctcttaccccattgccaattacctatcttacaacaagttatctctaaaattttgagcagtcatccttgcaactcaactaatagaaccaaaatcctatgcttaagtgtaaagaccacttagctttaatttaaaaagctttaatttaaaaattaacagataattagagttt

SEQ ID NO: 267785 - DNA, 1741 bp, Cannabis indica
aaaaacatagttcaaatgtattaatttaacttaaataattaataattattatagtgtatacacgtaagttttagatgtaaccaaaatatctcacattacataatataaaaagtgagatttttttatgaaaaagttacaaattggtttcttatcaacaacataagtaaccgaaagattacttttgaaaaaattaaaaaaaaaaaaattgggattagttttaatttcaggcatattattttaaaattaagatattttttaatgatgtggaaatatattattataattgagatttgttaagtaatttttgtaattatttaatattttatatatgtttttgaaaaaatcccattaatacacgtattttagctaatagctcaactattaaatttagtttttttttttgttgaaaattaagtttggttatttgatttatatttataaagaactcattaggtgagagcatcactttttttctcacttataagagttatttttttttttttttttttgatttttaattgattaaataatgtttgtgcatgcaattaaaatgggttagtatacatacaaatatatgcaatgttagttatattagtatttttaaaattgaatttttgtttttttaatcaaaactagggaaatcttttggaagtgtgtggtaaaaaaaattttaaaaaaacaagtatgtttggtaactaaatcttgttttttatttatttttttttaatttgaaatcaaaattttaaaaatataattttttctctcgtctttttcgtacgtctataattttatgttgtggttgttaatttcaacctcagatattggtagcaaaggttcattgtctttgattacggaatataaatctaagcaaataccacatgtgaaattatttagcaaatcattatatttttcattcaaaaccagcttataagctatattgtaacaaatcatgattctcatgagagaactaaagtttatccccatggagttgtggatgtttgtaataagcaattcagaaagaaatttaaagtgaatgagcaacgtctaaagtattatttgggtggtgaggtcgatcgagaaaagacttcactcactttagaggatgcatgaagcgaaaggcggttgggtatcttgtgcttggaatgtcaattactttttgaagcaacagaatgttagaagaagaacaagttttgtaaatatttttattaaagaaaaaattaataaaatattaagttaaaattatgtataataaaattatttttccttatgtttatgtttatgtttattttatttgttttatttttagtttttgggtttctttggagcataatttggagttttcggatgtaatttagaagtttgaagtttttgttagattttttattgaattttgctgcagcaaaactgggcatgaacaaaaggcttttgtcgttgatttggagaagctcgcctactgtagcaattttctagcaagattttagcaaaagtgttacaagttaaatgagcaatcaataatatttttactggatttttgcacaaatattgtgatagcatgcgtaagttgggaatcgttgagagttgtgaaggaattttcagaaaaaaacaaataaaaaaccaaaaccataacataatttctcaaataatatcctaaccaaaacaatctcaaataccctgaactactttttctcagaaaatcttattttcccgtcttcttcctattctgtcctaaccaccatagcca

SEQ ID NO: 267786 - DNA, 983 bp, Cannabis indica
gcaaatttatactctaaaaaatgtaaatgtatagaataaacatatatcaaaatttcaaatacgtatttttttttttaacttttaccttaaaaaataaataaataataaattttccgtttgggtgtgaacgtgggttggaattactttgttgccaagaagtcatttgcacgtgctcactgattgtgttagttttcccagttatttttttttttcatgttttattagagtgttctccttataaatagttatctaatattgcataagagattggtaaatattattttaaactatctattttgtaaaaattattaattaaatttttagttttgttaaaagataaaatagacgctgtattttttaaaatagtataaatagaattctaaactaattttttgtcaaaataaaatttaataataatttgatctaaaagtatttatattttctgtatttgttcatgttagaaattgtattcaagttagttatttgaaaaaaaaattgtcaaaaattaagttcagagtcttatttttactattttggaaaatacatgattaattttgtcatttaacaaaataaaacctttaatacattatttttaccaaacacaaaattcaaaataatatttacctattttatatgtatagtcgtttattaataatatctattattttacttttgtcagaaaatatatatatgatttttttaaatttcaaaatatatataaactatagcatttacattttaataagttgtcagtttatatgctaataaagtaattaattccaccatatatcataatataacttttgtacaaatagttattttttttttatatgaggtaatttagatattaaacaaaattatatatttgataatagtttttttatacaatgggaggtttttattagagtacgtaattatgtataattaactaagatagtaattacatgtaattattaggatatataatataattacagagcata

SEQ ID NO: 267787 - DNA, 1602 bp, Cannabis indica
actccatacatccgatactagtatacttttccaatgttttggaaagaacataacacttatccaaggttaagtaagctttatcgttgactatcacatcagtgtaaatgcagtgcactgatgaatcataggacattatcttttgaagcatataatcacaattaccttccactgtgttgatatcactgtaattgtaaataattatatgttctggacttaacagaaattgtatacataaaccacaaacatgaaaattacatgtaaacataaatgtattctaatcttctattgataacatatcagattatattgaaatgggttttatttagggcataaaatcccaacacccctcctaggtcgactgacatgactcgagtctactcaactccgtaatatcatctttcttgtcacgtgtcaaacattgatgtccacgtcatcaagaaaagtttttgggttaacatttaacccccaagttaactttacacttgtgtggagttgacttgatgacgtgaatcgagcccgtttttctcaaaactaccagatgggtatcaagtttgacaatcttaagcaattgtttctgttcttcaactattcccaatataattaagactttaagttccctcattcttgtgtaggaaaatttcaaaaattaagtagtcaaagaaaaagaggaaaaatgtatcattttttcacttatcttttatctttttctttgaaaacttgaaattttcatgtatttcttattgcactaggattaattggatttgaatcctaatcctatatagaagttccattagaaaattagagcaaaaagaagaagagaaaagatctttgatcttttgcttatcatatatctttttcttttgaaactctagatttttctttcatcttaatagcattaggaatagatgttaccttttaaattcacaaatcatattcttatttctataggaatttcaaattatatgccaaaggagaagagaaaagatatatattttttttttatctttttcttatcatttatttttttctttaaggctttaaacttaaaagactctcaattgctctaggcttaggagattgaactcatctataaataagagagctttcaataaaattactcacacttcccatttaagctctccacgcccaagcctttagaaaagcctttggaatatttcttcatcagttcttcaagcgctcttcatcctacaaggtagaaaatatttttttttcttaatcgacgccatttatttatttgaaattttttcttcttctcctcctttgaaattgctttaagtttataaaaataaaaaatcaataagaattttcttgagttgtaagcaattgaaattttggagtcaccatggctaaggatgaagagaaataaaagattgcctcatgaatatgatccccatgtagctcagttcattagaactaagttgatcgtgcccaagtctaagaacttaaacaaggcgcgtggcgggaaggtaatgacaactaaactccttaaagtttccattgaaatcgataacccgagagaccatgctttcaagctaagacctcttgtgtttagcactcttactgattaccaagcacaattaa

SEQ ID NO: 267788 - DNA, 889 bp, Cannabis indica
tcctcctcgattcccagtgaatcctcctctctgattattgaatccaggtggtggttgaaaaccaggacttgagttaccaaaacgagtttgagttgctctaggttggcctgagttgtatggggaaaaatatgatcctaatttattgatattctgaatgttagaaccattgtaaggagattgaggtccattgaaccttaaataaggagttctaaaatttcgattagtattggtgtaatttgcctcagtaaactcatgatccatataggccatgttgacattaaggtttatttctttatcatttttctcaattcttgatttagatgcaagaagtagagccttaatctcagcaacagagtacctttcaattcgtgtattggtagagatgacaaaggtttcatactcactgggaagacctttgaaaatggttgcaacatgatcacaagtgctaggaacttctccagctgaagcaagtaaatcaaaagtttgtttgactcaaagcaagtaatcattcaaactgagagatcctttcttcagattttgaagcttagttcaaaattcaaggatcttagcagaaacatggagagtgaaatacttctgcagagtactctcgatttgttacaaccaaccattcgtgttagatgactctcagacatcgaagacagtaaccaagaaactaatagttgatcttaaacttcccaagtggaataggcaggattgacattctgagcttcacaatcaacatcagtcaagaactgaggtggatcagagttttcttcaatgtaagtcatcaatcgattccctcgaatggcaacaaggacttgttgtctccatagtaagtaattgtgatcattcaatttgatagacagagtatgattgaagaacacaggac

SEQ ID NO: 267789 - DNA, 725 bp, Cannabis indica
aaaaaacctgaatacacttggaaaattgctaaatataaaataaacttaaagagcactaaaacaattgaaaaaatacataaaaacaactgataaaaataaaaacccataaaaataaaaaacataaacttacaaacgatttacaaaaaagaacaaaaaaatacataagaaacacaaaactttcctttcctcacaaatgaaaacaaaaacacaaaaagccctcaaaatacttttaaaacttgaaaacaactaataaaaaaaaataaaaataataaacagtaataatgaattgatttagttcaatatgagaaaaacaagccagtataataaatagaacaaaaaatctaaaaaaacaacataaaaataacttacagtaaaataactaaacaaatacacacaaaaatttaaaaatacttaacaacatgaatacaaacagataatacatcaaatgaaaaaaccaaacagaggatcaaaaattgcaacttaaaaagagcaaaaataggaaaaaatatacaaaccttgggtttcattttaggattcgaatccaaattaagaactttatcctcgaagtcagaatcggacagaacctaaactgatttcgaagacttggttctctttgccttacgagcttcaaccttatggaagaggtcttttttttagaatcagaagcctctagaatatcaaggacattacacattccttttcttgcaatgcctttcaaatccatt

SEQ ID NO: 267790 - DNA, 1410 bp, Cannabis indica
taatataataataaagtttatactttttagtgtaattttaatgttgtggttaaaattgaaaaaaaaaaatagggttcttagaaaaatattggattttggacaaagatttataattttactgtcacacggaattttttacaaaaatactgtctttttataaaataaccgtaaaacaataaaacaaaataattaaaacaatagtagaataacttaaaaataattgtagaacaaccgtcaaaatttaatacagtacatagtataaaacttacacagtagtttttttttaaaaaaaaaaaataccctacagtaaaaatataaaaaaaaattgaaaatttcatgtggtgtaaaaattcaaaaaaaaaaattagtgctaaaataatatcttttagttgtaaatttaacatcaaatttgatttgggtttcaacattaacaatagagatgtcctaatgtgagtaatcttggatagatcctacttgttcttcctcatttttattattattatttttttctaaaccaaaaaaaaaggtcagaaaagtcatagtataattttcttttctttttcctttttaaatgacttcttacaaagaataagagataaaaaggaaaaacaatagaagacaaattctaccttcggtttgatgatgatgatgactcattttcaatgaagagataatagtaaaaagacaaaaaagtccacctcccacgtgacttcataaggggccatctcacgttttctcattctactactttcaatacaaacaacccctattctaatttttatttttatttttatttttatttttgagaaaaatggtggtctattttcatattacacaatccacagtagtactctctgtaacagtaatcctttggtttggctataaaacattcttatttaaagtaaaatgcatacaacaaaaataaagacaaaacgctttcatttgcactctgattattccttcctctgaccaaaaaaaaaaaaaaaacttaccccataagccaatacattatacatatatatatgtataggaatagtacctctttacagtgtgaaatttcaacttcaatgaaaaaaagtgaaaataaaactactattgatttacatccacataaataaatgagagccttttcagatttacagacagaaagggtagtaaataaagaaagaaaggaaattatagtaataatggaagtccttgatgaattaaatttcactgtaattaattaatgaaagtaattttgctgttttgccagctatgacccaatcaacaccatccaccttattcatcattatggtcaatattctatgtctcaatctcaaaactaaacatacatacttggtggtctctttcttattattattattatttattattattattattattattattattatggtaaatact

SEQ ID NO: 267791 - DNA, 2815 bp, Cannabis indica
gatttcaatttatttttaaaaatatacatccaatctaatgttgatttacctactctccaattataataaatatacacatcaaaattatttagtttcaacacacactttttattggagaattttgtcccccatggattaatagtgaaagtattgagccatatataaaacatggactactccactcattgccaattggtttgagatggaaccccataattctcaacacttttaatgttattttctagcatggtcttataatgttattatcatctctaagctcttcttctaaaatattacaaaaaggaaatcaaattcaaaacaaacaaaaattgcaattagttttctaatttattggaattaactaatgagttttttttttttttaaaaaaaattgtaaattgattcaacataaaaaattacgaaggaaatgactcatcaaatcgaagaacttgacaaacaaggggtgaaaccccaaccacataatattagttttggataacaaaatttgattggcaagccacatgattgacttctctaaaaataaaaaataaaccagaaatactagtgtgccgaagtaaacttttaatttgttgcagcagtccgtcaagattgcgacaacttttatccgtctctgaaagcaattgaatcgccctcctacaatctgtttcaactatgaacgattgtgcacctcgctgaattccaaccttcaagtcatcctgaatagcagttaactcacccatcaatggagtcatttgctaccttagaacagtggcagcaacaaatagcacttccccatcaactcctcaagtaatataactcaaacttatagtagttatcccatctttcccacacaaccctgcatcaacatacattttccaaactacttaaaaatgagattatatcagttgtacgatagttttagttgtctgtagattttatatagttttttcccatgaagacctaattcatatgataaagatgaacaatggcagatcaatctaaatcttgagtaatcatgaactcttgttcatgttattagtttctttgactcactcgttaaggttttttttaaagaaaattaatgattcttacaacttctattttggaaatctaatagtgtgtatggcagggaacatgatctacaattatagaattctcactaacctaacagatcgaatgttagttccctctatgtattaattttagaactggaatgtagcgcacaaattttaatgggatctaaattatacttccactaataaattaatagtactaaaggataaagaaataattagaagggtaaaacgataatttgacaaaaactaattacgaaccgatacaaagagggctaatcactgaaattgattatatcaatggacactgcagtaaaacccagtaaacataattctataatgactaagagttcaattccatatttatagtaaagtaatcttaaaattaataaataaagattatttggttgatgagactcaataaaaaatctagtttattagagcttagaattataggtccatggtccctgaatcgccaccttgaaacactatcaagggtagggataaataatgctgttcagaataatttattttaaatcgacaaaatactaattatttatttttgtaataaataaataatctttcaaataaattaaatagtgaaaaagacaaaagttgttaaataaaaatttgtcaaggtaaaagttgtcaggacaaaagacaccattcttgttttaattgagacagggtagttacctatcctatagtagggtgtacctattagttttatctttttggattaattaattcaattagataaatctttgaatttaaaaagtgattaaagatattttaagttggttgaaatattccctgaaagtagttgagatattctctcaagtggttaagaaattctctcatcagaaatatcagtaatagaattcgattatagatatttatttgaataattaagtgtgatttaattagttgagaattaactattagaagtgtaatttgagaaattagatgattcacttattttcaaaatactagagagaaaagaaaaactaattttctctttcaaactgtttttgctcatgtgttgagaatttcaacaaggacaatttattctattgtatgctcttgctcactcctataatgttgtatttattttactattttgttggtgtagtgttttgttgttggtgttgattcagtctagagttgggtacttgcatgtccttctgttgtgtccttttcttctacatttgatgcatttattttgtgtttttgtctcccaaattggtcttgttcttttctttttcagtcttctcgctttcaccctttcaagtggtggcaatatttcaatatctttgatttcttgcggaatattccaattgcgttgatttcctactagtatacggttgcttcataggttttgtaacgccctaaataattaggcacgctacccaaaatacttatggaaccctgatcccctaatcgggattactaatcaaaatagcgaataatttaaacttttaaattaaacagaatgaaaataaaacttgtaatacatttaaacttttaaacggttgggaccccaaaaatgtttataaattttattacaagtcatttttctttctagccgacctaggcggcaaaacagaattcaaaagttcaacactgatagacccttaacccggttggtctgatatggcttgaacatgaacattcttcgccctgctcctgaaactcatgtctgatcagctaattccttaccctttcctgcacagtagagcacc

SEQ ID NO: 267792 - DNA, 1202 bp, Cannabis indica
tgtttcttttcatttcattacctccaactaaacgtgtaactagcatacttgcagttgcaagaataatactatggtatcatgtaccttatttatgttgactaataaggtagccatgtcacggcgtaggcgtagccttgtaagttgtaagagcccaaattttattttaaatagtgttgaagttgaattaatttttttaaaacaaatgaaggactagcaaagaagactcgagattaacacatcacactttctctctcttctcttacctgatttcctcttccacttttcatgaccttcttcccccatttccttcattcttattcaaatttaaagtcagccaccaccaccattattatagatcattttggcgacccatactcttatcgtcgtccttggaaatctattggagcttcatcatcacctcaggcaacatccttcacgactattaacttttccttaatatttgtttgaacaattttttatattacttaattgagatctccataaataagaggtgtctaattttgacccttagctccagatatactctttactcaaagagtgccacaaaattgttgttgaaaatgggtagatcaagtttgtaagtttgtaactttgaactatttttcactaatctaggctttagtgacattagcaaagttggcgagtttctgaagagcaaaacattagtgggtttagttcacaccacgactcgtcgaaaacaaccactatcgttgttgtccgtacacccatgtgagttataagttgttttgattatataaattgataataagcataattgtagagttgttttaatcatttataaattgaaatgaatattgattgaagagcggtatttgtagtaactaatggggattgttattcgtgtttttgaaaaggttacacgtggcccctcgcggtcgacgctcactaagctaccatgcccatccaccagcccaagtaaacaaacaagatggcccatctttcaattggacatagattcacataacatgtccgggtaagttcctggatgtatagtttaacttgaggaaattacactctataccctttttatattgtcctctttcatttttatcctcttttttaaagtctatcatttttacctctttttttaaacattgtaccaattttgctcctgtcacttcatgatactctccatgtgactctcttatgtcagggtattt

SEQ ID NO: 267793 - DNA, 1805 bp, Cannabis indica
ggaaggagtctttaattccactgcagccaatgtatggttttttgaactttatgtgtttaaattccattattttagaaattcatatttaggatgttaaaccacatacatggtagtaaatctagatcctggtaaaataatccccaacacttttctgctcaaagtgtccgccactacattgggtttcctggggtgatacagaatcccacaatcataatccttgactgattccagccaccgcctctgcctcgtatttaaatccttctgagtgaagaaaaacttgaggctcttgtggtctgtgtaaatctcacatttttctccatacaggtaatgtcaccatatttttagagcgaatacaatggtagcaagttctaagtcacgtgttggttaacactattcatattccttcagctgacgggaggcataggctataaccctatcagcttcatcagaacacatcctagaccctgtctggatgcatcacaataaacaataaactttttcttgatctgatggcaaagctaacactggtgctgtgattagttgctgctttaattcttaaaaactcgtttcacacttggcgaaccatacaaattgttggttctttttagtcaattctgccagtgacgttgaaatcttagaaaaaccttcgacaaaacgtagataatatcctgccaaacctaagaaaacttcatacctcagtaattattcttagcctcagccaacttttaacttacccaatctttctcggatcaaccataatttcatcttttttgacaatatgccctaaaaaggacacttctgacaaccataattcacattttttaaacttgcatacgattgtgatccctgagtcgtgtaaaaccatttggagaagttactcatcctcctcttccatctaagaatacacaaggatgtcgtcgataaatactataactcagttatcgagaaaatccttgaatactctgttcataagatccataaaaggtcgctggatcatttgtcaacccgaacgatatcaccaagaactcataatgaccatacctagtccgaaatgcgatctttggaatagcttcctcacagattctcagctgatgataactggatcataagtcaatctttgagaatacagtctttccctagagctaatcgaaaaaataattcaatcctgggtaatggatacttgttcttgattgtcagcttgtttgattcctggtaatcaatgcacaatcaaagggatccatccttctttctcacaaacaaaactggagctctccagggcgatacactgggttagataaacccaaaatctagcatcccctaaagttgtatttttagctccttaagttctgttggagccattttgcatggtgccttcaaaacaagttctgccctaggtgccaaatcaattacaaagtctatctatcgctgtggtggaaatctcggtaactccttagattatacatcaagaaattctcttacaactctaataacattaggcctaaatgtttcaggtttgctggagttaattacaactgctaaaaaatcctacacatccactatgtaataaatctttagcctttaaaactgaaataatcgggattcgagaatcttgaacaaattcaacataaaaaatggatatttgccctgggactgaaaagttaccatcttacatttgaagtcaatgctggccgaatacttggacagaaaatccattccaagtataatatcaaattctattagttccaattctactaggtcaacactcaactccatactttcattcctaactggcatagacctaatcc

SEQ ID NO: 267794 - DNA, 663 bp, Cannabis indica
aaaaaaaaagtaaaaaaatttacctccattgccatgactaaggccaagcttagagtaatacaaaaaagcaagacaccaaagggagagaaccaaagacaaagaaagctcataaaaactcttccttttgttgttgttgttgttgttattgttattgttgttgttgttaatgttgttgttgttgttgtagatgttctgacatttgacttgtaaagaagatgaaccatttctaggcttcttcatctctcatccgtacacacacacacacaaacacagaaatttgcaacaagtgatgatttttggtttttgggttggtgttttgtttcatctagaagaagaatagagcccaagaaaagtggaaatgagaataaagttttgtcctttatttttgtgtatatatatgtatatatttgtgtggagaacaaatagtttatgttagtgagtaaagaagtctccaagtctttcggagaagaagtagttagttagtggtgtttaatgaaatgcataacaacaagcaaggagaatcaaagatcaaaacaaagaccaagcttcactccataccatatttttatgtcttgtcttgtttttctttgatttgatttcattacttaatgtttttactttttttcttactaaatgtaccaaataaataactactattttttt

SEQ ID NO: 267795 - DNA, 1163 bp, Cannabis indica
ttttttttttttttgagatggatgtatgtaccagtacaattgggcgcatacaagataatcaaatgcagttacatgggaatgcttgcattcattctgtttacatatattttgtattgttcaaatcacttcttccctttaacaccttttggaagtttattataatttgatctacctttagatcaaattttactaatccgagaatttagacagtttctgcttcttaattactttttctcatttcttctttcaggaaaaagttaatgttaacggcggggctgtagcgttgggacatcctctaggttgcagcggagctcgtatcttggtcacacttttgggggtaaagaatcctctccgttttactatttttcccagttacacaactctctctaacacacaccatcccatttcaaatctagttaagttgaatcatttcttctaatattcattttcggattctaaaagttcagttgtatacatttacaggtattgaagcagaaaaatggtaaatatggtgttggtggcgtttgcaacggcggaggtggtgcttctgcacttgttgtagaactactttaattgagctcataccatgttggcaagtaaaagtcagatccctttagtaattcaggttcccaagctagagacccttcccagagttaaattttgtgtaaccacagcccattagttcttgtgcaacatcagttccatttctctgtctctgtctctctttttattaaattattttgggctgtgaggcactttcaataaacatttcactgtatctatttcagaagaaatatatttgcaacattgctcggcacatatcttttttgtcatcgttttttgtacttgcataattgcattgtggtacagggccggtcctaaggtatgtggagcctaagtcaaaattaaattttggggcccttatatatataatttaactattataaaaatgatagttctagtgcttagtgtaatggtaaaatttttaaaaagtcttaagaagtcaaaggttcaatccctcttaactacacattaaatattttttaaaaaaaataaaagtagaggttggaattgatcacatgatctcttactgtaaagtaagaccttttaccactacactaaacaattttgttataatttttcttatttaacactttatctat

SEQ ID NO: 267796 - DNA, 750 bp, Cannabis indica
aaatcttaaatccaacaatcacaatagtttagggagcatttttaacgaccttaaaagtttagggggcatgatttggtatatgtcaaaattaaaaggacaaaaatcctaattagcctatcacattaatgctatatcatcaacaacaacaacaacaatgaaattttgcaacaacataaaaagttaagttcatataattggcaaacaaatcctacttattcattccttcacaaaaaaaaaatacgtatttattctattttgatttcaatttcttattgctgaattttattctactttcaattgcttcactggccaccctctcgttctcttttcgctggtattgttgttcatttcttctctctctctctctctgggtaagtcgaagtctctctttctcagagttcattgctcaactcaagctattcttctttttctctctctgtgtctgaagtgaaggctacagtaacggaagaacgaactacgaaggcaaaggtgatggaaatggaggataaggaaacaaggagagagaaggtcgtacaagctcaagtccttcacaaggttggagaagtaatctctgctattaatgacgccaagcatgtcgaccaagtcatttgcgctcttcactccttcgccatccttctatttcctctcgattcttcgcttctctcaggtaaacttcactcgacttaattcattttctgaaatttatatacggtgaatttggttactaagaatcgataggaaagagaataa

SEQ ID NO: 267797 - DNA, 1163 bp, Cannabis indica
attgggctgttaaggcctaattcgcaatctagcatgcaatccacgtgtaaggttgtgtaccaaattcctgctaggccaagtttttgccagccaagcacctgcaagatccaggttggccggccttgtgctatccaaaagctggtctgccatagggtcggccaagggtggtcgccagccccttaaggtggttggtctgtcattcgtcgtcctgtttgagtgtcaggacctcctgttggctagggtactaagtagatgacttgaccttcttcttggtgagttgtattgccacgtgacactgatattgtccacgtaagcataccacgtcaagtgaaaaaaaatcgggataacaaacactaaagaaaaaaacatatatgtacattttaagtgtcggttgtaaaacgactctaaaactcaatagtgtcggtttaaaactaacaccaaaactctaaccttttatcactgtagaataagtgtcagttctatgaactgatactataggtataagcatggccggccaaagaatggagtagccggggcctaggctccaggccccacaattttggaggtccccaaatattataattaataatatatataaataaaaatataatatatatatatatatatgcattttagttcaataattttcataaaaaaacttacaacacaattggtaatggagggcttatatggatgtgtggatgttaggttgaattcttacctcgctcattttggttattttaaaattttaagggatatatatagaacacccatatatatatatttagtttttgtaagaattttatatattggttataaatttgtaaaggttacgtagggtttatttattaattttatttatttgataagaatataatattttaaaatatattcaatgcattaactaaaagaaatataacataatattttagggatagatctacatagaagtgttggtttttttttttttttttttttaaaggtactattatctaaaaaaaaatcaatattatgttataatattttggtaaggagcaaaaattatgtttagtaaatatttttaaaaaaaattactttaggtgtaattaaacggataaaaaatctattataataataataaataaatcaaatatttaaaaaaaaataactaacaagaatattat

SEQ ID NO: 267798 - DNA, 1314 bp, Cannabis indica
ttattatttctttagctcttaaatatttaagtttccaaaaatcttagtaaacaatattgtgtgatcttaattctcttgtacaaccttacaagatcacaccatctctttatgaatataatttttttagatatttatcaattatacttctataattagcgcattcatttatcttataattgtattttatatattttataatatattatctattaaatacttgtttttagggtacaaactctaacagcgccgccgttgtgtattgtagtgttagaataatggccgtaggacaaaagggatgttccttttggcacgtgcactctcaaggtctgacatgagggataatcccttgatttgttgggatttagtgtcagaagattgccccatcagccttagcctgacttccagggtaccctttagatgtatcctaaatactcattcggaaggcctttgctgcctctttttatttagatgaggggccctttcagatctggagacatccaacttcggttgtagatattctgcccttggatgggcttaaggctcatctctccatcccattattttgtaaggcttttgagcaggcataaatccattaaattttaatgttaattgtatccctttcgaaaacatgaataacaattttaattatttattgcctgtatgaaaacgagctttatattctgagacctaatgaactccttgcatttaataatgaactctttaacattactaaacttagaaaccataaaaattaaaagatttataatgattatataacatatctatgacatctacgtcttgattatatttgctaggggtgtgcataaatcatccaatctaataaaaattgaccgatccaattacaaccgaccgccaaacattggatatccaattgtgatcggatcagattagatgtcatttttgaatatctaattggatcagatcagatgttgtatggggtgtccaaaagtctaaggcatccaacatccaatcaaactaattagtattttcatttagtttggatgagtaattaaattttatattgttatacgtaaaatatatatgtatatataaaaattaacattaaaatttcactctttttttcttggattggatggatccaatccaatccaatatatactggacctaaaatattggatggatccgatccaatccaaaaaatactaggtctaaaatattgaataaacccaaattaaatcaatacatatatatgaaatacatccaacagatagaatctatttggatattggatcgattggatgattgaaattaattggatcagatcggatggta

SEQ ID NO: 267799 - DNA, 687 bp, Cannabis indica
gtataaaataaaaaaagtcatgtgtgcaacagactctttaaatcctgttttcaacgtataattttttttccttccgaatttcttaaaattttatcagatgtcttaaataactacaatatacaccaccataaaataaattagactaaatatttttttaaatggcgaaacataaaagtgtattaatacacctattttaaagaagtatattatagaatttttcaacaatattaatctaacacatttttattatgtgacacggcaagatattactttatttcaaaagtgaaatgattcaaaattatagaggcaaagagaatttttgatacattatttcattcttatttttctcactcacaattcctcttggctttattgtttgtctatttatagtaaaaaaaaaaaactcttcatcccttcatatatttgacttgattttcatccaattaaacaaactcgtaccttatactgaattatcgttaatgaatatttaggaaggtactttatacataaaataaaaaataaatagcattgcccctttaattattactacattcaaattttaccattttttttttctgaaaacataaattatccctaagggtgcgtttggtaacacttttttaatcagttttttgtttttaaaagtagaaaagtgaaaatatttttaaaatcatgttctataaaact

SEQ ID NO: 267800 - DNA, 719 bp, Cannabis indica
aataaaacttaatgtaagcccaaataaaaagtctaacactcacgaccaccaatcagagaactgaaggaagcgattccacaagagatcatcatattcaattagcttgtcatcttcaaataccttgccaagagcaaataatcttagttgggcatcaatgaaagccatcttctcgaagttttgattacttgttttactctcactaatcttacctggtcatcgattagtaatcttaaggtggagagtaagaaattaagaggaagaataagatgaattatttaacataatttatattttttaaacatataatatgatcactaatcaatgttcgggtgagattggtgatctctaaacatgaattacttttgtaatttatattttttattattaaataaatataatatgatataaaataataatcagagtaattattaaatggggtactttaggaaatattaaacttttatatgtatttagggtactaaagtggtagtttttgcaaacaaagagtactaattaatcattatccaaaatagagagggtactaagtaagtattttaataaaacacaaggtaccaaatcagtatttttcctcaaagaaaccaattattataaatatataataaaaacacttaattcaaaaaaaaaaattaaacgcacttaataaattactaagaagtaatttaaatttataagaacaaaataaaataattatatatata

SEQ ID NO: 267801 - DNA, 507 bp, Cannabis indica
agcagcaaaagctagaaatcatgatgacatcatccaattgactgctttacaggttgagataactgcaagaggaaaattatgggatgacatacaaggttgtcccgtaaggataataaacgagttcaatgatagagcattgatatatgttcagaaaggagaggttcgttcagagctcaaaatactaaagggttgctcaaaaaacaaacctatctcaagtaatgtagaagtttgtgttgcaacaacaaatgtaaatttgagcaaggggaatgagccctaaggaaaaaggaaagatgaatccaaaggttcaacaaaggtaaaaagaaatagaaaaagcatgaaaaatatgtactaatatactctgtttatacagagttgaatgaaactcgagaaactatatttcttgcacatgaaaatagggtcgccttctgaaagcccgaacccatgaagaacgtgaggagtaaacgtgataaaaaaatattgccagttccacaaagacattggccatat

SEQ ID NO: 267802 - DNA, 817 bp, Cannabis indica
aagaataaatttattttaataggctgactttccacttttctcataaataataattactatttcacaagacagtaataatttttatttaaagaaccaataacagattcaaactaattaacagaaattatatggacaagttttatatttttactggtaggtgggaaattcgtaacaggttatttttgcaaaattagttacaaagcttttagaatattaaataaatattacattgcaaaattaaggaataaataattaatcagaaaaggcaattataatatataataataactaaaaaaggctccaatttatgctgctatggtgcacctcatgcatgcagtgtaccctcacatcatattacccaaacttccctctaaagtgtaccatttttgtatttgattaatatcattttttattctgttttttttcttcaaaatattattgattacacttttattttattaaattacaaaataaatattgtaatttttaaaatagtacacataatatttgagtttaattttttattttttaatataattaacttctacattatttcaaccgccaacaaaaattaaaaatttaaatgtaatcagttttgttataagacatttaagttgcgttattattaagttttattttaataaaaaaattattttagagtactattagtactattttaaaaaaatacataatctaatttgttatttaataaaaataaagatctaatcagtaaattttctatatcaatgaaattaattgatttttcaaaaaaaattaagtaaatgttgagtcaaatttgaatgaggggggtaatgtg

SEQ ID NO: 267803 - DNA, 3036 bp, Cannabis indica
ccatcgcaggttatgtaggtgatacattgagaacctgtggtattgagtatatgcgagactaccgggttagatcggtacgtgctagcgagttcagttgctatcccccagtgcgacttacaagtgaaacatctgagggggccagtggtgagatcagtacaagtggctcgactgggataggcacttggagcctcgagaacataagggctggagcaataatcccactacgagattatttcaaggacttccttaaccatctcgggcttgcctcgttttaattgaatcccatttcatacaaaatccttgcaagattgagggttctgtacaaaatcttgaattaggagtgccccactcccgtggaaatagagtatctctactccgtcaaggctatcccagcgaggaagaacgctggaggggttttctacaatcttgggattcacactggtgatcgcaaaattatcgtggatttgcccaacaagacttcctttaaggatgatttcttttggatgaccaacctctccccaattttcacaaccactttccgtataattcgtatgtaaatatttgcgcaaggacatgtaggttagacagtggtcaacatattcccacgaccacatacttatagattcaaacaacttacaacacatttattaaaagtgtaacttaaacaattttctaatagataaaagtttaaggaaccatgagttgagctcatctctggccttgactgtacatatcttaattgttttccgtcaacaacccagtggctctaatacaaaagttgtaacgcccatacttgaaaactaatttgttacttagacttaaacacatataactatttataaccatatataaatagactaataaagttttataagccgggatcccaggttttaaaaactgtttatcgaaaatataccatatatacataacattattttttttacaagtcatgtggcaacaacaaaagataactcaaaatacagtaagaccgaaaccctccaagttgcaccatcgcaatacatacaatcttggtcaagccttcaactcactgttcctccgccttagcctttcccttacctacacaatatagaaaaatgatgagtcaacacactcaataagatacgcataaaatatatacatacaatgcactatcgccttataccgaggtcctcctgagcctaagtacaaagcttaccaaatggttaagaacattttcaacagaagtacgatcactgtactacatggactgaagtatgtactagtgttagtagggccaaattgtacttcaaggtgctactgggtgttgtaccacatgcacttcgtacacacttgtacttatgttggaacaccgtaacttacccttaaacatcatacactgtacaaacacactcagtactacaactattccaatgttagtagtgtaaacaatataaacatgcattcatacacacatatacatactttatgctaatcttaccatgtttccaagttcaggtgtgttggtcaacttgtgtggaacagcaactcgacgctttacagggtcctatataataatattcctaaatctgaagagacatgctaacacacttttgggggacttaaaattaaaactagagatttccctatcgatggatagcatggtaatactctaaatatcacaaaattgggaaaaactagggtttgcaaaactgccccaaccggtagaccggttcccaaaccggaggaccagttttgtggggtttcctggagaccaaccggaattctgattcctataggtcttactgaatcggtcaaccagttcagtgcaggaaataccaaacacactcccaacaccacaatttgatcccaaaccgcacaatagcttccagatcacctgtttataccacaataaactcaattcaagcaacaaccttccataaatagctcaaaaaccaaaaacagcactagagaataaagtttgacctcttaaactcaaactttgcacaaacaccataataaacaacaaactcagcttagaacagttcaaaccagctgaacacaacatcagaacactaaattaaacaaactataccaccacagaacccaactcacaatattcattcaataacctaacatagaacttaataaaacaaggatagaggtgctaggggattataccttggattggaacactcaaaatctgctcgagtctcacaattgaaggtgaaacatccctaacctcctgctggttcttagtggttcgagagagagaaaattggtgagaaagagggagagttttctaggttttacactataaatattaatattaattaatctattatcaaacttagtttatcaaaattagatcactaaagtccacaaaagggcaaaaaagattcctaaacaaaatgatcattttgtcccttaacacaaaccaaaagcatatttaacacttattggtaatttggttatttttaaaatctcgactattcccgacacttccaatgcctaaccatgttgccctgctactaataaaattctataccatatgaaaacgtgactctttaatggccctacgtcgcattccactattaccaggcacaaatacaaaaaataagaaatttcatgcatatcataaatagcacaatccgaattcaactaaatctccataaatgcataaatcatggttaataactaatttcataattaaaccttaataatctgataatccatcatattaaagttatgtagtctttacaataagaattataccatacttacaaaattatatatcacctttacatataataaaataaaaactaaacatgattaatctaaaataaaatgatacactatacaataaaacatatatatcacataataaaaaaatatataccttacaatagaaagaatatataataacaccaaataaatataaaaatatatagcatattaataaaattatatatcacatcaacaaaagtacaaaagaaagtaaaacttaaatattatttaaaaaaataatatatggcaaaacaaaatatacatatactattc

SEQ ID NO: 267804 - DNA, 773 bp, Cannabis indica
ttgtgtgatgaagtatgtatttttatatattatcatcccaattgatcatatttacgtactcatattcattaataagttacatcaaaaatcttcgacacgatttaaaaaaataattaatttaaatcagtgtcaaaaatacaatttcaaattgtagcccaaaaaaatacagaaggctttgatctaattagaacaaacacttcatggtcgtaccgtccttaaacaaggcaatgtggatccttctttagccgaagcaatgggtgtgagagaagctcttagttggttaaagaccctctcttggcatcatgttgtcttgaaatctgacagcctagtagtagttcaagctactcgcagttccattgatatgatttctttatttggtttagttattaaagattgtaagaaaatgcttgctgctatgagaaatgtttctattttttttcgttaaacggtcagcgaacttagttgctcatgcttttgtaagagcttctagttcttatcgtgattgtgttttcagtttgggagatgtcacaactgagttgcttcctaatgtagttactgaagttcaagtttaataaagatgaatttcattcaaaaaaaaattagaacaaacacttaattcatctccattaataaatgcaatggttcatttcaaaaataaataaataaataaatacaatggttgggggatgtggatagaaccatgtttggagaactcatcatgtgtaagaagggttacaatacaaataatacataacatatatatataaatatat

SEQ ID NO: 267805 - DNA, 733 bp, Cannabis indica
aaaaaaaaaatacaccctttatcataaactaaaaattctattatataaccacaatttatataaaaaaaataagatatatatatatatatactcttctactttttaattatatataatatatatatatatatgggacctaaagggtcctatatgggaaatataaaaaagtaaaaatgcattggaatgtccatttataagtaaagttatgacaaagtacgtactcctttagttttacataaatctttaaccatcttttagttagctttaaaataaatatatatttatatagatatgaagccaggattctcttctaaaaatccttttcagtcactacttatgtctttaattaaatgctttctaagatgtgtcaaagtataataagatgttatcgataaataaatgttcgatgaatagtcttactcatataattaagaccatcctaaatataaaaactgtactatatgcaggaattttacacatcatcaacctacaaacacaactcgcaccacattaaacacaatagtcattattggtacctttgccttagttaaaacaaatgacagccttggatctaaacgatctgtcgtatggaacaaaacaaaacatgaaaagaaaattcgagaaatctaatgcaaatttgtatatataaaacacaacaataatatataagatttagttatacatacttcattgatcaataataatgaccgcaatttaatagtgaaatactatc

SEQ ID NO: 267806 - DNA, 1048 bp, Cannabis indica
aaagagtttttattagggcagtaaacctaacatcttattgcatggttcactttagcttttcttgcacaaattaatattaatttcattcgcttactgttatcacttgttttaggtcttttgtgtacctcaatcaacgttcaataccagtacagaagaaaattaatgctttttcaacagacaacagaaattgcttttttagattagtggttctctttttgggatcccttctttctaactgtgtgatggaaacttttggaatgaatgcaaagtcataaattgattacattcattgtgcatgcgtgcacacttcattttaatttatgtgtgatgtttaaagtaaaaagttagtaagaggctgatgaattactttgaaacagtgttattgctcaagttgatttttatctattcatttattcttttttcccttttttctggggttcgtggtacaacaagcaagatgaaagggagatgcaccacagtattatttgttgattcttgtagttaagcataacagttctttataagaaaatatcattgcacctgcctagatttgcttcatgattttatttagatgatgaaattatttgccaaaactttctgtttgcatttctaggaaataaccaaaatttgtttctctgaattgtcttacattgtattgtcattggttcagttatttcacttcatgttagtattcttacatgtatataactataatcaattatctaacatgaaaatattatctgttatttatgcagtgaagaatatgaagggtctgcaggagaggcatttccatgggtgagacacacaagagacttctcgcagggcgacactgtaaactggagaacttcgagcttaggcaggaatcccaagattttcgaaaatggttgtgattcatggtatactccagatcatcaatataatagcaagtataatgacaaagaaaaacagggtctatcaaacaaggtaattaggtattatggtttcaaagtgaagaactgttgtaatagtgtgttgacaattaatatctttcgatttttttttttttttt

SEQ ID NO: 267807 - DNA, 614 bp, Cannabis indica
aattataactatcaaaatattattgaatactattttatttgataaaattatcattccataatttacttaatcatatactacactaaacacacaccatattaatatatataatttagttcaatccaacccaatgtctaacgaaactctgagtatttaacactctcttacctctttttttctgaaaagaacactcttacttgttggtgactttgaagacaacaaaaagttgtctctttattcaaagacaataaagctaaaataattggttgttaattataggttattaggatgcttaattattatttcaagtagtacaattacaatttacagctaatatttcgatcgttcctattgacacgtatcttttttcggatcaagaccatttctttcgaagaaaaaacaaaaataattaagtccagtcaattattaacccctcctactcctacttattaatcctactcttaatcctatattttctccatttaacagtttttattcattcaatcatccatttctaatggcaaattttattttattttagatggtttgtattatatatatatatatatatttttttttgccttgattttagtatttaaagtgagagatgacct

SEQ ID NO: 267808 - DNA, 578 bp, Cannabis indica
attttaatcatgtaatcactatgcattacaattaataaagatgatgaattttttcaaaaaaaaaaaaatccactgtaaagaagaaaaatacgtaatctctttgacttggtagagtcgtcatttactttttcttatgatcctctcttggttagggcatgttaaccaataattcattttattattggttttagttgagttaggttttttgttagttgttttcgtcaagattagttagttttctttcttgctaatcttttgtactaagaactaactctataaataagaccaaaattctagctaagtgatttcattgcaacttactttgttctacattcttttcctagtttttatcatttttgatttttacctttgttcttcttctacatagtatcagattcttgctaatggacttgtctatacacacctccactttcgatcctatcggtcttaatggccaaaattctattgtgtcttagagttctgatctagttcctttaatctggaattcgttttcaagctctcttacctcctttatcactctcaaactcgatcaccgaatttttttagcttgaaaatca

SEQ ID NO: 267809 - DNA, 1587 bp, Cannabis indica
aaataggacaagaagtgtcttcaattgtcatatgttgcccaaaaatcttacgaataggaagcacattagacagaatgatccaccacatgatcttgtggcgctccaaaattttactattccataacctgctccacagagaaggagccacatcacactgaggacctctacccaaggcttggatcaagtaagcagatttagaaaagaattggcccatagcttctctagttcaaacccagtaatccttgccccttccatctggtttaccctttccatgaatgtttacaacagtctcctgatcaaataggagggtcaatttctaaatatatcagtccctatttttcatcaagaggttcgctactttttggttcgctggtattattgctaaagaagatggatgtttcgagtttgttaacttgttgaccaaattaagcatagaatctgtctaaacactgccagtaccccttagcttcctcgatataagccattcctaccatttcattgaaagaaacaaatgtagcaaattcaaaaaacaagtactttctgctaccttggctagtttagtctaccatgtttggaatactaggaatgacaagttatggaattcaaagactgaagatatggatagagtgatttgtacaataaaagaaatggtaaaacaaagaattcataatgtatggcctaggaaagttggtaaaagattctaaatggtttgggtctttgtaattttttcacttttgggagtactgtgtaacatatagtaaaagaatatatttgaggtcccattaattggggtgctcttaggttgtaaattagtttattggagtaatgaaacaatagctaattcataaaaaaaaggtcatccgcaaagaacatgtgggataaggctgtcctcctcggctaagagtaatccctttaatctccttctggctaatggagttcttaagaagtctcgaaagaatctccgtagcccagataagtttgtaaggagatagagggtatccctaacagatgccacaagaaggcaaaatcctccccacttggcccccattaaggcaaatgttaagagacgttgtggagatacattgggacacccagttacgaaattaagcaagggttccaaaattaccgatcacctcgtcgaggaactgccaactaaaattatcagacactttgacaagatcaattttgatagcaaaccaaccttctttaccctttgtcattttaaaggagtggataatcttgtgaacaaggacgttgttatcttgaatgttttttcctggcacaaacgccgcttgggtagggcagatgatccgtggaaggaacgacttaatcctattggcaatgatcttggatataaccttataagttaaattgcaaagggagatcagtctgaattgcgtcaccttcttcgggttatggactttaggatgagcactacgttagtgtataatgagcgcatgttagattatgtattagttaaggcaattagcattagattattggcgtcttataataatacataattttataatttattgtgggtcccatttttacgaaataggaattagggttattaatttctcaatt

SEQ ID NO: 267810 - DNA, 1393 bp, Cannabis indica
aaagttagaaataaggttatttactaacatttctctaaaataaatcctatcaccctttcatcaaaaaataaaataaatccatccaatcaaattttgtgattcttttttatgaaattattctctctcattcatttaatcctcaactgactctacttagttttataattatgggttctctttaaattaatattaatatataatataagaaaatagagtaaattaaaaaaactgaaatttgcctattttagtattaacttgattagaaaagaaaacaaagggtcttgtgatagcccttaaaactcgtcgaggcaaacatgcatgaccgaccgtcaactgtctcaaccgaaaaaattaaccaacctccaaactcagccatgcatgcatgcacgtacaacacctacgtacttaattacctttgaccactcaaattaactttataaagtcccataattttcatctccaacatcttcattcttaatttcttccatctaatctatctgcagtactgttaatttctctttcatattattttttaaagagaaaaactactgcaataaataaataaaaaaaaattaagaatccctctatctctatattattattaataatattacctttttttttaatttattttgttcatcttctaaaaaaataataaaattaatataatggcacgccaagtttttattaccctagctcttgtcgtcgtggcggtagccggagttgtagccgaaaacaaggcaccggccaccagtcccaccgcctcgccctctccaaaatcatctccctcaccttctccgccggccgcttcaccaaaacctagctccggtaacagtacccaagctccaaaatcctcaccaacaaccccaaccaccgctccggctaaggctccatcctcttcatcttcgccctcggctccttctccaaagtcctccgagactccagcatcctcccctgactcctcctcctcctccgagactccggcttcctcccccgaatcctctgatgcttcttctcctccctctcccggaagcgatgactcagccgtgtcaccggccccagcggaggaaaacactggtatctccgatggaccctcccccgccgaagctccagctgcagatggtggaagcaacggcgccgccgctctcggtgcctcatcaggtgtcgtggcggtcggtgttgctgccgtggttgggttctttgctttttaatttaattaattaattattaaaaaaaataaattagcagttgcatgtgtgtttaacattttaatacttaattagggaggaaataatgatcttaattaacctctataatatatattatatattagaggtaataattaatgtctttgatgatgatatgagtacgtaattaatttgattctcttgtt

SEQ ID NO: 267811 - DNA, 864 bp, Cannabis indica
ataaaaaaatagtttaaccaaaaaaccgtcaaaaccgccaaaaaccgccaaaaaccgccaaaaaccgccaaaaaccgccaaaaaccgccaaaaaccgcctaaaaccgccaaaccgaaaaccgccaaaaaccgtacggtcggttttatacggttataatttctaaacggtcggttacggttttcgtaaaataaaaaccgtaaccgaccggtcggttataaaattttaaaaaccgaccataaccgaccgattttcacccctacactacactagttgttcaatatgtaaaaaattgttgttttacattttaaacaaaaaattatctcatctcatacattaagagagataggaaataataagacaacaagaattatgttgattttgatcaatcaagtggagcattgatgtaactcccaactagctaaagtatgttatagtattttcttaattagtgtactaacttttgctaatcaaagagttttaagataaaaatgagtttaataaaatttacgtaataattaaaactttactaaacataaaatatttatgaaaaatagttacaatttgggatcccaaaatctattaataaaacatacacattatatacaatctcaaaagttttagctgacataattaaaaaggtgtcgacggtgtctcaaatattacaaccttccaggtttagacgactagatatgtacaattttcaccatgctctactctcactgcagttcaatcttggatttgcctttacctacacatagaagcatatttttcagtcgacagactcagtaagaaaagcataaaaataacactatatatatttgacttgtaattgagtgcctacagactcaattaccataagttta

SEQ ID NO: 267812 - DNA, 850 bp, Cannabis indica
aaaaaaattgaaaaaaatattctattatgtaatttaaagcataaagattaactaaaaaaattgtaattagcattcctcaaaatattttatttttaaaaaccacttagaaacttattgttctagttatattgatattgaaataataaattttccttttctctatatttttttcctatttactctgtttaggcatgtattcttgcattttaataattttaatataaaataatatttaaatttttaatgtaatttttatgaaaaaaaagcatatttaaatacaatttaataattaaaatatttcattgaatttgaatgatatttttggtcaccaaataagttatgtttattgtaaattagctaactaatgcgaagtctgactagatctaatttcgtttatggttgtcacgtgcagagtgataataaatatgaaggacacaagaatttatagaagttcgacccatttgatcaggtaataatctactctctttttgttgtattcactcttgagataataccatacagattacaggctaaaatcttgtactttctagctataactgtcttcagtattacaataatgagaatgagtatgagaagacttgtgaaatgatgagaagatgagagaatgcaagaactctaaacacttaggtggtgtttggttgaaggtaatgaaatggaattgaataaatgaaacaattttcatttcattcttttgtttggttgtatttaaaacaattggaatgccatttcgatggaatggtctttccatcattttggtggaatgactattccattttaaaatggaaggaaagaccattccaatgcaaaatttgaaaaaatttaataattt

SEQ ID NO: 267813 - DNA, 734 bp, Cannabis indica
cgtaactattagattagtatctttgtctaacctcaaaatgtcgttaaggaggttaagaagttttgtcgtggttctctttggggcacaatggcagcaatagtaatgttcatatagtttcgtggacgaagatttgtctccctagatactatggtgggttggggttgagggaaggctcgaattggaacaaagcaatccttgcaaaaatatgtttaaactatactgaaaaaacatgatttactttgggtcaactaagttaatgcaatctatttaaagtgctctgatttttgggattacactatctatcaagactctagttggtattggtgtaaattttgtcatcttaggaagacttttagtaagaaaagtgttcttacagttggatgtggtggaagatcttagagtaagaaagctttacaatagttttctacatcaacaacaagtgtcttatacacatgcaatttggtgtcggttaagccttcctaagcataaatttatgcattgacaggctattaactctcacttactgactagagatttgttatctagattcaactttctcattgatttctttgattatcctgtttgtgatttgaatacgaaagtcactctcatcttttctttgactgctctttttctttaacttttattagttcaggtgataggtatacaaccgattctaaaactgtctaatgttagaccattttcaatgagagatgtaaaagttgagctatatt

SEQ ID NO: 267814 - DNA, 725 bp, Cannabis indica
attttgtgtctggctcttttatattattgttacagaacttggtcatcacgggctaatatgtttattgtttagttagcttttattttgtttgacgttctatactaccatctatattgtactatgattttttggtcaaattaatttcattcagtaaaagcactttctttttcaaggctttttatgttatttgatcccaattgaatgaaaactctttgccaaattgaatactcgaactaaatgtattaaggagtctaatttagctactaaagatgaatattattatacccatacttcgagcaataaataaatagatctagttacatgacacgtgtataattaaattaacaattcaactcgcttaatgaagaatttagggcataagcacctatctcgaaatacaacggttggacgatgtaatggcacattagaagtgacttcgatatctcctcggaggaaactactgtggtctatacaagacgaggagaaacaaaccacgctccttatgaacgcctcagaagactcatgacctagactaaaggagctaagcttgtaaatgcatctagcaacattcctggtgttgatattgttatagttgagaggcttaacttgcttaagtttgctcctagttgtcatctcgagagattcgtgagtcaaataaagatagtctttcaacatgagtaagacaagacagaaaaaattccttgcaacagtggactaagaagacc

SEQ ID NO: 267815 - DNA, 639 bp, Cannabis indica
atggattaaattatttataagtcgtggttactccgtgttttttttttttgaatgaaaacactttattaagcaagaacaaacttacaactggtcaggcttttctgcttttaaaatagcagcagcacaagagggtaaatcctctgaccaaaaagaattacaattgtgtgtaatagcccatttggctaaagaatgagcaaccatattgcactccctattaacaaatcttatctctacacagccatccaacagattagaagagaagatgtctatgagaggagccccccaatcggctctaggagcttgccgagactgtaaattgttaactgcagtaaggttgtctgaatttataatataaggtttggtttgcatcctctgaatcagccgcaccccaagcctgatagccatacattcaaacaacagaaccgaaccatatccatgttgaaaaccagcttcagcagccactaaacacccagcactatcacggatgacagcagccattgcacaacctggtttttcattacaaaatgcagcatcacaattcaacataaaagtacctttaggaggagccagccatctatgagttgcaccagtcagcctctttctgctgttactttcgtttctgcataaccgaatcaatgt

SEQ ID NO: 267816 - DNA, 719 bp, Cannabis indica
gtagctctacttaaggtcttcttaatttataatacaaaatataggacaattctgaccaagtctatattatgatatttagttttttttattgtcaaattgtcatttgatagttgatatttatgatatttttctaaattggtttggttttagatctaatttggtaaatttaatgaggtttgttataattctaaaaacttggaaacgacatgaatcttaagaaacgacaacaataatattttgttagtgaaaatggaagaggaaaacgacaatgttacgtaaaaacgacaatcgtataaagtctgaatccgaattcggaaacgactgaaaaatcagttacgcaaaagaaaaatcatcgaacgacatgaatctctggaaacgacagaaaaccaattttgctctaaaaacgacaacaatttttttcttgacaataaaaacgacaacaaattttacaaccacaatttcacgaagaaaagagggtcagctattatgcgctaatagaaaatacaaaaacgacaacaaaaattggcaagtaaaaagtacataaagctgctcattccagaaaaacgacatagaaagattggtgttctaagtacaaaaacgacattggaacatgttgaaaaagaagagccaaaatacccaattttttaatcttgttttcaaagttcattttatattgtaactcatacattgacttaacatgcctttaggtaaacaatcga

SEQ ID NO: 267817 - DNA, 2083 bp, Cannabis indica
aaccctgtataaatgatatttcagctaagtgaaatgagtactccaccatttattttcgtttggttaagctcgaaggaaatcatcctttactttctattcgccagatagaagctatagattccatatttatgttagcgctcccactcaattgcactaccgtgttcccaaaatgtacgtatcaccctgacccaaaagtaggcttaactaacaaatcaaagaacacgaataacactcttgagattgaacctaatcatatcaggattaagatcatttgatctaggatcaacaggtgatattgaattgaatagatattacggtaaattctaatatatctaatcaaagttcaatatcggtcccttccgatgtatactccatacatccgatactggtaaactttgccaatgtcctggaaaggacataacacttttccaaggtgtaagaatacctatcgctgattataccatgtcagtctaaatccagtgttctgacaaatcagggaataaactttcgaacatataattaagattatattccactgtgctgacaacactataatcattaacaaattcatatgttctggacttaaatagaattcatacattatatatataatcatgaaataaatcatgtgaaccatgcaacataaaatgttatttctgatctttattaataagtaaatctgattatattgaaatgggtttatttagggcacaaaacccaacaatctcgccctggtcctccatctctaagacttcaacgtccccatcagtatcttcctcttcagtagtaggtcgggactgctcagcatttggcaaagtagcaagacgggcaatttgtgggtcgaacaataaagatttccacacagtttacttggttcgtgccatcatcctaggcctggatggaactttgttggtctgcctagtaatagtcacaacaaatgtggtaatgggtgtacctccagcagcaggacttggacagcctacgagcaaggtatcattcatattttgacgaacaatataggtccagttggacggaagatagcatttccactcctttctaagctcccaaatgaaggattcatagccttaaccttcaatctggccaggataaaagtggtgttgcacctcgggttctaggaaaggagtatgctcaatacttatttcccaatcttcgaatctagaattggaaagattgtcactagatgaggacagactagcacaaaggcaaggatgatcctcatataagagttgaagtagatccctaccaatatggtgttcgcctccccaaaactcacaagcgttcatctacaaaaggtaggagacaagatgagaatttggtcggggtaatgaacgaaaacatgttggtattaccgacaaggttcgatgaagggtgttgacctcacttttagccaacgacagtgagtctaattttgtaagcgataaatagtttaatactattgacctataataaagcaaataaagacacaagaattttatagaggttcagcctcgagcagttcggtaatagcctaatcctcgttatttgtattgacttaagaacaagaaggataattccttttcttagagctcttacaacagtatctccgaatatgaattcttagaccaaatatttagaccctttgcccagtgaacatgagtcactatttatagggccatgagcttgggagggaagtatttcccttctggttacaatcgatataagtagaaagattgcataataaatacagaatacaccaattatgggatttggacagctttccatatctctgtaatctgatcccaaagttagggggatttctctgattactcacgatgcaaaagctgaatttgctaagcgttgttgtcctgcgcggattgctcacgactttgtctgagcaagtgtgtgatgtgccctgtttggcctgggttttgcgagtaggtactcagaatcgattacatgtgtcaccatcgtgttctgccatgtcagagtgcaaaatttgggataacatttgccccccaagtctgtacgggacttctaaagttgtgtgtagccttcatctgaactgtctttgcatttggatggg

SEQ ID NO: 267818 - DNA, 649 bp, Cannabis indica
atgtatatattatatatattaaggagtaaatcaataatattaaacaatgttatatataaataaaaatcactatgtttaataaatgcacagtaaatttttatttataattgaagtttgaataaataaaataatatggaaaaaaataaaataaattgaattagatgaatatttattaaaatataacatttattcttatttttggctaaatttgactatttttttttcttcatctatggtgctaaactatagcattatcacaaagatttagcaaattgaattggtatgaagttaaagtctcacctatcatatataaattaatctatcaaaaaattagatgaggattttatgtatttatctaaaagaatcatctaccacaagaagacatggtgttgaagcttgaatctgcctcatgaacatttcttttcatttcgatttcgctaaacattctcgaggcaccccgaaatccttatcattattagtatgaacattttgcctccaaggatcattgtgtaacttgtagtgcaaaatctgcaatagcaaaacaggtttcaacatttttaaggtttgagttcagtctatgctggtctgaatctttgtcctaaaacaataacatttaaacaagttttatacattcatagtaatattaaca

SEQ ID NO: 267819 - DNA, 569 bp, Cannabis indica
gtcagtcagtatttggagaactatctttggcccaatttcgatcccgagaccgcgacttttgagcatgtgatgtcgatgataatcatgattaatgaaaaggtttgttggttttttttttttttaatctttgaatgttttagtattgtattacatttcgacaattacaagctaagattgtatcttggagaacttcacttatattttggctttgagaactttttcagtagaagtcataggcttataattcaatttttttggggctatggggttggtgagttatgaatggtaagctcacatttgctaattgaagtacttttatgtgagtttgtgttgtagaattttgttcttatgaggtcatatagactctaactagtaggagtgttatgagttagtctatttggtaataggaagagaggagaggaagtaaggaagtatattgttcttgtaatgtttggtatgaatggaagataatgccaaatttgtttgttggaaaggtgaagtggaagaaatgaggatattttagctgtagatgaaattggataactttattgaacagctcacacctaaaa

SEQ ID NO: 267820 - DNA, 1134 bp, Cannabis indica
agcagttgcaagatgatatcctggtcctccattatcgatcctgcaaatgctatagcatatgctagtgtcttcactttatcgacaaagtcagaaattaatagagaaccctttcaaatatgagagaactgacctttaagttcgagtaatcaagctccagattgactcgagaatctctattcaaaggctctccaaacggagtatgaggttgtgaagttagcaacgacagcaagaacgccttctgtcatagacgattgatgccaggagagaagtaactgatcaagtttcttccattgatgatattcaagatttggagtgcctgtaactaagagctgaggaggaggaacaccagtaaatagaatatcatcaagatcgcgttcgatgacagtggggacgacttgagatttctaagcaagaatattggtacgatcgagcttaacagtcagagaagcagtgagggaatgggagaatagattctaagctggcgtagccatggccgtcggtcttggagtggcagcgaagttagtggcgatgagaggatcaatatgaacactggagttggagttttgatcagtcgaggccattagtaaccgaggtcaatggcgattgataccatgtgaaactagagcaaaggcaaaacaaagaaggtacaaactagaggtaagaactaggaagaaaacaaaaacaaagaattgccaaaaaagcctaacatcatagttgacctactctgttatttatatatgagtttatgtgtacaaagaagttacagaaaaaataacagaattagtaaactaactaaccaatacatttgaactaactaactgatttaactatatgtgtaacatttagagcgtgataaactttctccttcacgggtttttaagatggtggaagatattttgaagccttaacatttctcccaacgttaaaatgtttgcttagtaaattttaaatacctggattccttccaagtttaatttgaacaagcatggtatgcttactgatgggttttgtcctttgcacgatgtcgggatgaatccactcatcatgcttcgtggaaatgctctactttttcaatatcgaaagctttgtgagtttaatcttggaaactctctggttaattgtattgattttatt

SEQ ID NO: 267821 - DNA, 1455 bp, Cannabis indica
gaatgccacatcatccttgagcttccagtctaatggtagcacgtccagcttgtaaaccggaacaatacactttatatataattactatattttgttgcattctttttaccatgtttttgtaaacaatattaattttttttccatatttttatacattcctcctgttgtaatagaagttctataggcccatatcttgacactcccatggcttctctacaaattaactctctaaatcatgtttttctttatttaatttcataatacaactattcccaaatttaggggtgttcacggtgcgggtggtgcagtttttgactattttttcaaaccaacccgcacatgcagtttttttaatttctcaaaccgcacccacactgcgaaactaaaaaactgcaaaaactgcaccgcaaaaaatggtgcggtgcggtgcagtttatgcagtttggactatcactaaataattaaactatcacaaatacaacaaaacttgagcaacacttgtcaaaaataccataaggcttgaaaatagatatgaaaaaaaagtttcaagttttaacaatacaataattagtgggcttaggttgggctttcacatattggacctaaataaatataaaaattagtatttttataatatgtggtgcggtgcggattgaaccgcatattaacaattcaaaatcgcaaatcgcaccacatcgcacagtttaggaaaaattcaaaccgcgaccgcaccgcaaagaatttcgaaccacatttttttttgcggtgtggtgtggtgtggtgcgggcggtttgagcggtttgatgaacacccctacccaaatgatttatggaataacgttggaattttttaagaaaagaaaaagaaaaatgaaaattttcattaatagacaataattcattaattgatgatatatcactcaaagaacataatcaacaagatcggcaaaccatgccttttacaaaaattggaataaatttttttatagctccttcaactaacataccaataagccgccagtgttgaagtatcaaagaagcgcgaagaatgctagatatttgattcatataaaaatgtgacaaatcacacctattaataactattagccaaaaatcttccaataaaaattaggtaacaatcctattattcaagctagaataaaagaaaatactcaaacgagtaaccatggtgataacaatcgcaccataaaccatagggccaataaaaatctaaaaaatctcccaaatctgaacatgtacaaaaataattaagattctcccaatataccaacaagaaacaagactaaaatcccatgccataaatgaataaaaccctactactaccataacaatagcaagatggtatagcaacattgaaaataaaataaacattaaaaacaaaatataacaaataaaaataacaccactaaaaagattaacaccagtaaaaatccaa

SEQ ID NO: 267822 - DNA, 834 bp, Cannabis indica
tgttcaccaaggcagtgactcaagttaaatttaaacactgccttgatctacttcatataacaggatgttactaactctcctaatcaagctacctagtgtttctcaactcttttttgatttacatgttggcatgaaatagatcaaggaggattcgttgtacagtgatccatcacatgccaaatttggataaaagctgttagaattagttgacagttatttctgctaactatcctgggtacaagttagttttctgtttttgtctgtaattcgaattttataaatagttagagttcaattctttgtaatacatagccttgtacagtttcttatctctctctctctctctctcacaatgtaattccaccacattaataaaacaactcaaattattcaaattgttcttgctggttttggtcatcagattattgaaattattcttgctggttttggtcaatagattattcaaattattcttacaggttttggtcattgtttttgctggttcattgctgcaacattactgttgctgtttatgttcttgtacacttctcttttaaagcatctaatcttgattgttaagtgtgatggtcaatcacaacaattatcatactaatgtgaatgtgaagatacatagtccccatatatatatatatatatttataggctgacgatttagtcacgcaaatattaatttgcgtgtccagtcactcactaaaatagctcatatatataatattaattgaacaatattttgacatgttattttgtattgataaacgttttgtatagccggttttattaacctggtgggttggcgccaagtcttttaataat

SEQ ID NO: 267823 - DNA, 2065 bp, Cannabis indica
aaaaagtttgactaaaaaattatttcgaatactaaaacagatagaaatgtatgggtgtatctcttttaaggggatgcattatagaattttcctatacacatatattattctacaaattttttagaactttatttgtaactaaataatgagcaaaatatacgtgcacggattaaattataaaaaataaataatttcacacaattttttccccaaaaaattaaaagaattaattatatataagtgaagaaaatatattagtaccttcgagcctcatgtagaagaggcaatggccctatttcatagcctatctttatgcctttggtttgggtttaagaatgttacaacctttttcgattgttatcataattcaatagtaaatatattagttataatgagtttggtattctacttaataaaatttttaatatttagaaatcttttcgaagtatatatctttgtctcattgatgtaggtctaagaatattattagatcctgtgtttggtggctagggcttcttatgaattttgttgtttaataatcttttgagcttcgttttgtattttgagactttttaagttttgtgcctcttaataaaatatatctgttttcttttaaaaaaaaattaattagtatatcaagtatgggttttctaaaaaaaaataattttaatatatacatttttttttttttgagagatgtaacaagctgcagaaaaacactactaagcacaagcagcaacaacaaaggaattagaataatccctcatggccttcttcacgcaaccttataataacatccttggcaagagaatgggcagctgtgttgaactggcgaggtaagtacttcaaggaggcatcagggaagttggagaagaacagcctgatctgagaaacaagacgagaaagagcggagtggtcttgccaatcaccattaacttttgaaactaaatttaaacagtcggagaagatgaattatggcttcaactgagagtcaatacaccaagatatcccctgcaacaaagactgaccctctgcaaaaataggagtggatgcaccaggcaagagacgattttccgaagcaataatctgatgatgaccaatcttgaaaatgaaaccaatccccgttaagccatgcttatggtctaaaactgcgtcaacaaaaagagccgaggagtcctcatgaaagtcgtctactggaaacaattgggaatagtgtgtgagctgattagaggctggaaccgaatgaccaacacgattgttttgttgggcctcattgtaatcctgtaaataattataaacaaactcttccacattgttaggagcaatagatttattaaataatattgagtttctagtattctaaatgtgtcaaatgaaagcaacaaaaagagggaaatcatgctttgagatgagttgcattgcttggagataaaattcctggatgtctgttcttcggtgatcacggtaaaaaattttgaatcttgaaagcttccaaatgtttcttgctctggggcaatccacaagggcatgtgtgacaaattccatattactaccacaaactgaacaagatggctgcgggataatttttttatgaaacaaatttaaggcacaaggtaaaatatggttgaaagctttccaagtgaaatgcttgattttagggggaacgggaagcgtccagagaactttccaccactgctgaaaagggttcggattagaggagggaggtgagtcattggaggcagaagaagaggctagatgatatgcagatttgacagtaataagaccagaaggatgaaaaccccatatcagagagtcaaccatagtaggatctaaagggatttgaagaatatgatcaacttgatatgaaggaaaataatgtttgagtttagggacattccaagtaatatcagggttgataaagaaagaaacaaaagcatgaaggggatcaatgggttgcataagggtgggatgagagataccagggatccagtttgaggcagacaaaggaatattattaccagcacctatcttccacacaagaccttttttgagcagttgacgcccc

SEQ ID NO: 267824 - DNA, 1222 bp, Cannabis indica
agggtaaaggttcaaatcccactaactacactttatattttctttttaattttatttaccccccctcactttaaattctgggtccgccactgtatatatatatattaatataccagaaatagaaatgaatatatattttcgtgtcaaaaaaacttgagtgaaagatttttcaaaaaagaatgatatttaggttggtcttctttaaattttaaaaaatatatattataatgtagtttttatgaaaaattctttttaatgcatggtacgtagctagctgttaaattaatatattgcattttttttatcaaaaaattaaaaaattaataattgcatgcgttcttataattagagaaaaaaaaaatactaatgcatgtgtaattttcatgcacctatataggctgccatatgacccatatctatatattaatatatatatattaatatatataattagtaactcttaattacaatatataatatacagaagaaaaatcgcaacaacaaacttgcaggttgaaatatacttgatgatgaatatttgtctgaattcagggtttgctacatgcaaatctcaattttcttaaatcaactaccggcgacatagcagttacatttttctatgtaaatatataatatataccaacatgctatatatttatatttatacatatcttctcttaataataaataaatgtatattctcaatgaaaagattcggtttggacgcgcgcaattaataatattaattagttgatgaatgtatatctatccctttttctggccggccatattgttccagttgcagtactttaatataaatttataaaatatgctttgaatttatataaatatatattaattaaatcttagagtaataattgtggttctttcaaatgattcttttgttaggagcattagcatttaaattgacttgagtactagtactgtcccagtttgctccccacgccactcttacaaaacccacacactatatatataccaacgtacgtaattagttagtgagaacaaaaataccttggtcactctctactagatctacatatatgtatataaatagttttgttatttggcgcgcgcactgtaccaattagttagtaagcggtgttagggtttataaaacacttaaaatatatatataaatcacagatctaaacatattcataaagtgaagccattgttggagattgcagagaaggttttg

SEQ ID NO: 267825 - DNA, 890 bp, Cannabis indica
ttgcaggctcaagctcggcgctttctatgagctgaatttgccgatctaattggagagcttgggagcgatgagtagagcggtccaattttcgaccggagcgaatggcacgggcccttgaccatcgcttcagctgaggactgcccttgaacttgggggcctgattatctgagtcagagtcgggttcgtgagcagtctcgagttgggtatggagagagagggttcgggggtttggagattcggggatgatcgaattcgaagcagcgagagtggtacgtagattggggttggagaggttgaagctggaagaagcaaacatacttattttatatttaattaattttaattactgcaaattcttaaaaggctttaaggcaccaatataacacaagaaagaaatgaggaccttcgttacagccgaagcgacgaatacataggccttgttgatcagggcccatttaaggaaggatgcagtaattttaagcccaacggcttaagccttgaaagcctcaaaccaacaaggaacttgtttgcttgtctaagattccaaaaaatcaaaacaaaaatattaaaacataggagttttaatgtaatggcatgtttaaattttaattactttaaatatgaacgttaatatttttttttggacgcagtcaacagagtcacacatgattaacaatgcagagtcacatatgattaataatgcagcaaactacaatcagcggtggaatctcctcgaaccaggatagctcatcgtctaaccgaaaggcatattttgtcaaaccatgagctgcagaataaatattgcgagcaacatggaacaaaactgtccccataaatttagacaataaagctataacgtcttcaaacaactcttcgttacattgaaaaat

SEQ ID NO: 267826 - DNA, 1618 bp, Cannabis indica
aatcgcaactcgagtacaactgagtgttgaatcacacacactctgtactcgtcctatactagtgttggtaatgttttgtcataccccttaacatcatatattgtaccaatgcactccgtaccgcaaccgcactagtggttatagtatataaatcacacaatacaacatgcacataacatacatacatatacacatatacatatcttatattaatcttaccttatttcctaattcaagtgcgtcgatcaacctgaatggaaattttcttgttgaacggaggccctaagtcacaaccacacaaaatgtgtaaacaaattgctaaaaccttttttaggacctaaattcaaaactagaagttcccctatctataaatagcatggcaatacccgaaatatcgaggaaacacaaaaacgagacttcaaaaaactacttgaaaaattgcaagccatttttgtaaaaacgatcgatcatttctttgggtccttgctagtaaaaatggtagaccgtttctaaaaatggtcttcaattttttgtagcagaaacacaccatatttcatttcaaattaaaattgaccaaaaacctcaagatactctccagaatacctaattagggtccaataaatataattcaagcaacaaaaccaagtataatacaaaaacacaaaagccaccattgtttaatcaagttttagtccttgaactcaaacttgctgaacaccacaataatctatctcaaataaacttaaaacaacttcaattaacttcagaaaacatccccaaacactaaaggttcgaacatagccaattcttcaaaattgcatggtcaaaccaaagaaaaaaactacaaaactcaaagagaataaattctagggttgtaccttggattagctatcccaaaacttcttcaattcttgttgaatcccacaaaaattgacaaagaatggcatggttccttggttttttcttagagccgaagtataggagagagagagagagaagaggtgggtttttgtcttgaattttctaaagtcatccataataatattttacttatcttaataatcagctcataaatgacaaaggaattctctactactaccactacaaggcaaaccaataatcataagtaaaattccaattttacccctttacttcatgcttaagttaccttaaggcttaagggtaaaaaggtccaacaccacaaccctgcctaacttcgatattctaaatatcaaataaataaacctcgctaaatcaaaggttctaaactaacttgtgtgactctaatggccaaactatcgtatttctatcgttactgagtaaaaataacaaaaatataaattttcacatataacataaaagatacacttagtgtaataaaatctccagaattgagaaagtataaccctaatttttatttcttgaaaatagagcccacaatatataataatcacatttaatcatataataaaattagttaatgctacttgccttactaatccatatcctaagtatgtagtcattacaattatccccccgttagaaggatttcatcctcaatatctaacctagaccattctaaatattgagtcctcacgtcaaactctaactcttagtt

SEQ ID NO: 267827 - DNA, 1262 bp, Cannabis indica
tttttaattttgtttgtaatatgtaaatgagtctgtttgttgttgtttggatgctaatttgtgtagcactcttgattaataaattttctctaagtgaatcattgtaattgtttcatttattattatgtagcaaaattgaggaagattatgactacaagattacagcttctctgttttgtaactttcttcttaatccaccaaatgatccatccctatatacccctgtaaataaaagctttgtatgttacgcagttggtatgctaagttgagaaaataggtactcatttcagtcttcagaaatacgcgtacagcaataattgcaagtttgcaacaatgaacatgcattatattctttttttaatatgcctatgcccactttcccaccactataagaaagaaaccacaatagaaataaacaagtgacaaaccttgctggagttagtggaatctgtcatttggggaccaaaagtccaaacttacttctcaagccaaaaaaaaaaaatgtgatagaaacgacttctataaacatatcaataactaaaattatatcccaaatcagagtggttctggttgaataagaaaaaaactgagctattacttcattcctttttacttgattttatacttagtttgaaacaatgtttctaaaatattagtacttttctttctcaacaactatgtcattttggcttcagatcctgaccctgtccaagacttctgcatacctaacatgcaggctacaaccattgccaaccaatgcaagaactcgtccaccgcaacggttgaagatttcgtcttctcgggcattaagtcttctggaaaatttggcccaacagggcttgctgctacttcagttaactctaacatctttgcagggcttaacacacttggaatgtcatttgtaagagctgactttgaggttggaggtgttaatgtgcctcatttccatccaagggctactgagatagcatttgtgcttgaagggaaggtttattctggatttattgacacaaacaataagatttttgctaaagtgattgagaaaggagaggtgatggtgtttcctaagggcatggtgcactttcagatgaatgtgggagatactcctgccactatacttgggagttttgatagtcaaaatcctgggttgatgaggattccaacagctatatttggatctgggattaaagatcagcttttggagaaagcttttgggttgaattctaaggagctttccaagttgaagaagaggtttgctcctc

SEQ ID NO: 267828 - DNA, 660 bp, Cannabis indica
tccctcaccatgccatcaattctcgtagaaagttttttggatagcttcgtagtctgcatagtatacacaggcaaagccagccccacagatttaataagcgtggcccgaccttctttggacagcagcttcatcttccaaccatgcaactttgagacaaggttttcaataatgaaattgaagttagcatccttattcttggatctaaagagtgggagacccaagtaattgatgtttgtagtcgtcaagttaagacccagttcctgtaagataccccttttcatcccttcactggtgttactactaaagaagatagaagtttttagcttattcacagattgccccgaccaccggtaaaatttctcaagacggttccaataacctttggcttccttgatagtcgctctgcccatgagaataagatcatcagcgaagaataggtgagataacctagggtcgtttctgttgggttttgtgccctaaataaaactcgtttcaatatataatcagatttaattaataaagatcagaaataaaattttatgttgcatggttcacatgatttatttcatgattgtttaatgtataaattatattaagtccaaaacatgtgtatctatttatgattatagtgttgtcagcacagtggaatataatcatgat

SEQ ID NO: 267829 - DNA, 898 bp, Cannabis indica
cgagtttccatcaaaaagaccacatcaggctgctgctctttcaccatcagggagagacgtctgaatgcgcgcgtactccccaacccgcgcgcattccagcttagaaggctcatttttctgggcgggtgtgcatagcatcacccgcctgttcatcttgtgtagaatcaacaggagcctcattctcccttgcaccagatcgagctcgtttaagttgagaccgcacagagcttccaacaacagcaaagtgaggctggaaggagggcctcttaacaccagaagcagaagctaggccttttccacggacatcaggatcagggtgatcccgatgaaggttggggtccatattagcattgtcagcagtgccttgaggcatagcagttacagagctaacagtactaataacctctgaggaagaaaggccaacagatagagcagcagcaggggcaggttggctagcagccacaataacagagtcagtagagtatgaagtgaaagctgaaggtcgcaaagagatattaaaagtggaactattgcaaggctgagcaagattggagaggttaggatttaaaggtgtaggcatcataacaaccgcattagatgctggggggacaaaaggcccagaaaagctatcattaaggttcaagaaagaggggaagttgataccttgaccaggaaggttttgggggggtaaattgagattaacaggttggtaattcatcatagttatagtagggggatgaggatattggaacggctgtgacttatcagtgattttttccttaccacggaggagaatggaataagggcataggggttcagtgtaaagctcatcacatttctgaaggaaagccacacagtattttttggtatgatcaagcttcccacagaaaaaacaaaa

SEQ ID NO: 267830 - DNA, 622 bp, Cannabis indica
aatggtcaatttttggtgctcgttccgttcactaagaagccctctaacgtgattcggcaatctgatcaatctaaatcctcagtaaacactgcaaatgcaaattcaatctcaaaatttgccgatcaagcatggagcgaaatgatgcaagatttttcgtctttgcatgaccatgcaaaaactgataaccatagtggacaggctgatagctctaatgttaacgagagagaagaaaaaatggcagggaatgcttgtcccagattttctgaggtgaaacgcagaaggggtaataattgtggaaatggagaaaaggaggaaaagaaaagttgtgcaggttcgaattcaagttctcattcaggcctaaagagatgtcatgtaggtcgtcattgtcaatatggcaagttagtactttttttttgtctcattaagatagggatattttcaatgtagttgtggttaaagaatagaaaataaaaagtgatacaggtattgtattagctaaataagttgcaattcacattctgttattgttgttctttcaatctcattctcaatttatcctgctggattaatactagttttccatggattttttttaattgttttttggtatactggaagacct

SEQ ID NO: 267831 - DNA, 1737 bp, Cannabis indica
ttctactgtctgatgatgaaactaacactttcaagagaatactttgatgcattgcaggcaacagttaaccggtcaaaaggaaatcgaactgagctatccagagctgaacttattcagaaaagctcttattgtcgtgtctcaggtattccaaaactcacttgaaatcttgaatggattaatccagcagattggtcaactgcagactctttaattggtttgaacaaattacaggccgcgacatggatcttctcgagctttctgcctatggcaacgttcggcattcaaaagagtctgggggatgtagaattcaatagccacaagcattgtctttgctctatccatcattcaatcctccaatattgttttcttgggtaaattggattattattattgtaacaaacgtagccaatgtccttaactacctttgtaatcaaattattcatttgttacagaaatctttatgcactcacaaatcacaatataattgcactgttctctgatgtttagactagactttattttgtggcacacttcatatatgtgtaattgctgatttttacattctttaccttaaaatacattttaaaatgactgataaatcttattatgaccgttttgtattgggttttttgcagattccattgaactttttgtaccaatttctcttaacacattactaatgagtgaatgtacttgtggaaatgagattgaaagttctagtaattctgaaagttaagtaatttatgtaggtatgaatttagatgaattaaagctagaaagataaatcaatgaacactacgtttacaagtttcctctgcattggaaatacattctaactgagtagtgtttgggtcctcaagaaccgagtaaagtaacatccactataaaattatttcaattacatttaccagttctaatttacaaatcaaacaacataatatgaaatgattttacacaagatttacttaactcttgaatacaattaagaacacgaatctaaactcacttagatccaagaagacaagctccacttgcttccaccaacctcaaatcccttcagcaaatcagtctgaactctcttcacacattgtagatccacattccttcgacttctgaagatttaatgaattacgatttgcaagacacaatcaaagaaacacaaaaaattattttgtcctaacagaacaagaatcactaaacgattttatcaaaaatttagagttagaaaaagcaatatcaacttaatatatattatattttggtaaatcgactcagctaattaactccacagctcaaactatagtaaagatggcacttacaaagttgataagggttttactctaataaataactcttcaagttcattaatatttggaacttatttgtttactaccagccgccttaaagattggtgttagttcgtttttggctctaattgaaaaatcattttttttcttttagccttttgatcttcctatttttttcctcgtagaccattgttctaattctttccatcacgttaacgaatatgctatagcaattccggagtccagattgaaataataacttgctatagtagactaagtttaaccgcattttatgtttttaaatttattcaccaagctttgagaggcgtttacatgctcagtttcgaacttactgttctattgctataatatgtctaataaaaatagttaaactttacaaaacttctctcaaatgaaacttaaaaacttg

SEQ ID NO: 267832 - DNA, 852 bp, Cannabis indica
atatagcacttcttgcccaattattattattcatattttataccaatttataattatttaaaaataaaaagagtaatttaaaaaacccaatataatttaaacttgataataataaaataaaaatagcctaagatttattggaatcttacatgactacgacccatataaaatggatacatatgaatctctcaccaataaaatgctaaaatagattttgtatttattacaacaaaaatatctaaactaaaaacaatgaaaaatgtttaaaaaaaaaaatccaagaaagtgggattatttgtaatttcaagaaatataaaggacacattgcaaaatataaagcttcttctttcttggtgcaaggtctcttccactatttataagctttctctctctttctgtaaattttcattcttcaaaaaaacactttctctctctaaaaattcacgcttccaggctccaaaaaggtaacaatggtaatcaatcaatcgttgatttcatttcgaaaaacttcaattctgtgtattaatttgttcaattttatgtgaaattaaacctctttcattcaatcaatttgtttcggttgatcgagaactgttgtctgtgtttgtgtatgtatgtatgtatgtatatatatatacacgcatatttgtattcacattggatctgcgttttgatttggttaggaattattatcgggcgtatgattttaagtacgaaatggtgttgattttgtgcattggtatgtgttgaaatgcacaatgatataacgcgtcgaatgtttgaggtattccgtgggattgaaatttgaaatcgttcttttgtgatctgtattgatttggtacacggaacttg

SEQ ID NO: 267833 - DNA, 1195 bp, Cannabis indica
aagtaacattttgatgtttttttgttatatagttttttaaaaattgagtttttaaaaaactatttttaaaaagtttggccaaatagtccctattaatttttaaaagttgttttctgttttttccatttttagttacgaagccaaacaaccccttgatctctcctaatagagccaggtctcccaaaatataaataagtgtagaaaatatagactacaaggtcaccactagtagcataattacatcaaataatagcatcaagatattcatgtatgcaagagctcaatcaaagcgaaattcctgaagatttggtacaattctgaccgtactcaatactatccaagaacaaacaccaaagatagaaattaagagagaaaaattgaagctagtgcatagcttcaagatagttctattgatgaaatggttagaatgtcattaccaatgatattacaattagacttcttatttctctagtaataggtcttaattggtggtataacaccaagggaccttttcagctgggaaatgtggaaaacagggtgaattgaagaggtggaaggcagatctaacttgtaagtgacaactcccactcgagacaatactttgaatgtgccataatagcaagcttccagctcctcaaaccttctcttggctaaggattgctgacggtatggtcttagcttgaggtacaccaagacaccttccttgaactctttgtgatgcctatgttggttggcttgattattcatctgtagctgggtgtgcaagagatgcatgcttaggttgtcactaagatagcatttcgatcagccaataaagtatctactgccgagacatgtgatgaaaaagtgaaataccggaccaagggtggtggatcccttccatagagggttgaaaatagggtgcatttgatagcgcgatgagtagaagtattgtacccaatatttttcccatgctaaccacttggcccattgttttggtttctcatttgcgaaatattgaaggtaagtttctagagttgtttgactacttctgtttgcccatccgtttgggtggtatgtcgtgcttctcttcaatctagtgccttgccatttgtggagctcatttcaaaaatgtcttttcatgccccttctttcatgccatttgtgattccggtggcttttaccacatcctagtgtttcttctagtattaacatg

SEQ ID NO: 267834 - DNA, 704 bp, Cannabis indica
tagattttgaagtagttatgaggttacttcccctttctcatcagttgtctcaactgtgatgaattcttgcggacaaactttttgaccattaagatggccttccaatctgtgaccacaaatgatagtaaacaccatagacttccatagatggcttagagtgttactgaaaggagtctccgaggtaggtgtaacaacattatggtcagcttgagaggtctaactctgtcgagtcgacattggcgaggacctgaatgctctagctaataccaaattaaattttgagagaaatatactgtgaataaaactcattgatatcaccattatcatcaataggaattaatctattttctttactttaatttcccatgaacacggttgtgtatttttcgcaatgaatcatgtttacggtgggataattgaaaacaaaacatatacaaatattatatattgtaagttaaatgaaacagttcattttgtttataaaagttcatacgatgattcaactcaaaatgaaagtttggaagatacatatacaatgatcaaaacattgtagtagttgatttatgtatcatcaatctataaagtagagaggttatttaatttattcattttataaaattacaattgttatttattagtgtagtttctttcttatgagaaagagtttcacctagaaaccagataagacctagcaatacgaccat

SEQ ID NO: 267835 - DNA, 856 bp, Cannabis indica
ccttaaaatttcattcacaccaagcttctattatttgttacatgtcgtatgtggagagcaaaaatgttagctttaaaaaaagtttaataaacaatgaattttcaaaaatcataaaattaggtgaacaaaataggtgtaagcaaattggaatttttcacattttaaatattaaacaaatataacataaggtgtccataaatataacaacaacaattcattcttcttcaaagtcaatctctttctttacccaaactcaaaacaccatcaatggcgtccacccttactcaaatctctctcttcttcctactttcaacccttttctcacaaccccatttctcatcatccctcagactcctcagactaaactccgacgaccctcaattcactcccacccaatcaatctcagacgtccacgaccttctccccaaattcggtctcccaaagggtcttcttcccaacaatgtcaaatcttactctctttcagaagacggtagcttcaaggtcgagctccaaagcccttgctatgtctatttcgatcgacttgtgtattacgataggaagattactgggaaattgagttatgggtctgtctctgatgtgactggaattcaagccaagaagctctttttttgggtttctgttactaagattcatactgataagggttctgatagtattagtttttatgttggggctttgtctgaggatcttcctgcttcgaaatttgaagaaattcctggatgtaggagtaatggttgtaaattgactaatccacaatccatttgagcctttcaggtatattcattcacttattattttatgattatttgaagattgtttgtctagaaagttttgt

SEQ ID NO: 267836 - DNA, 536 bp, Cannabis indica
ttcacaattctcttcaaacccaacaaaatacctcaaatttcagagagaaaaaatcctctaagaaaaattaatcgtgtcgtctttcttaatcaaacccttcgtattgaattttcaactctctagctagggtttccgatcaaagaaattcccctcttgttattcaaagaagattttaaggttcgttgttgttttgatcgtaatttacttaatttttagggttaattgttgtttatatattttgctattgttgtttaatttctcttattattattggggtgtttggttgcagagaaaaagcgtgaatgttgtaatggaaacgaaaggtgggaaaaagaagtctagcagtagtagtactagtaagaacaacgctcaacaatacgaagctcctctcggttacagcattgaagatattcgtccaaacggtggaattgaaaagttcagatctgctgcatactcaaacgtaatcatattattcaaaccctattccattgatttcttctttattcctattcatgtttatttattatatatttttt

SEQ ID NO: 267837 - DNA, 515 bp, Cannabis indica
tcgatattaatgaatgtgaaacgaaagcggatatcccaaattgcccctttaaccactctctctgaagcactacttgatgctatccggagagctgctatgttggatgcttatctcgtttagacgagacacctgttcatcattcggatgacttgactttgctaatggaactggtccattattttaattaggtcttcatataggtttgttgtaaactaaaccgaatcatcttgaaattacacgtgtcctctaattagaaacacagataacaattactacaatccaatataaagtatttaatatattgtgttttcaaataaattattcatacttacatgctatatctttcgagcttgtcgtgcttaagcttgtattttttgtgcttggtcgtcctcgtgtttctaaaacttatgctagttttgtgtcgtatcaaaaacaacctgtatttacactactactaagaatacattaatatattatattaatatctttttcttatttttttcttcaaattttgc

SEQ ID NO: 267838 - DNA, 1220 bp, Cannabis indica
ttcatgttcaaccattgtattcatcccatctgtcatcaaattggagcgtgttaattttatatgaaattcccaataaaaataaaaaattgaagattccctttatgaccataaagaagaagagaaggaataaagtacaatctgggtaaaacatcgcagaaagaaaggttgtatttcgtgtaaagaaataatggaacaacaacaacaaaaagaaagaaaaaggcagagattggtactcttccctctaccagcacaagggcatataaacccaatgcttgagttggccactattttacactccaaaggattctctatcacaatcatccacatcaacttcaactcccccaacccctctaatcatcctcacttcactttccactccatcccccatggattaccagacaacatgctcaagcccaccaccggaagtggcaccaaagatgtcatttctattattacccatctcaacatcaccactgttgaaccctttagggagtgtttgatctccaatgctttggatgatgatgagcccgttgcttgcttgatctctgatgccatgttccacttcactcgagctgtggctgacagccttaagctgcccaggctcgttataagaacaacaagtgccacttctttcaacgtttttcctgcgtttccacttttgcttcaaaagggttatctcccagtacaaggtgcttcatctactacactttttttacaagttttgttgttgctgttgttgtaaattaaataattaggataacaaattttttcggtattaattatatatagagtaatctagaggaataaaacttttctttttttgtcacagttctaaatttcattacaaatttttgtttcaaataggtcatctcacaaggtcccttttgttttacggatgtttggtatgaggactagatttagtgggaatacgaatatcaaatgcaacccatataatatggtataacttaaattttaggttaattaggatttttatcctctaaactttaacatgtaccaaatcatgttcttagaactttctggccataaaaaattcctcctgaactattgagattgttagatttaaggacttttgtctaatttcattcaattttactatttcagtgattgtttatgtactaaaacatgcttactagactttaatatttaccaaaccatgtccttgaacattttatatgcactaaattatgtcctctgaactt

SEQ ID NO: 267839 - DNA, 705 bp, Cannabis indica
atataatttttttatatataaaatatattttatgggaaaaataatgaaattttttttacaaaaaatggaaaacacaatttaggataatcagtttcctaataaaatattttattgaaaaaaaagcatattcttgcaaaattttgtaataaaagcaataaaaatgaaaatttctcttttctttttagcaaaaatgtagaatatatatacgtagtactgttaagtatacactaatatggggataagttgaagaatacttattttttgtatccatgaattaaaaatactctcatattatattttattaaatactctctacttaaatctagcatataatttacattaattaacgggtataatgaaaatattgggtatatattaaaaaatataaaaattacagtaaaaattaaaatatataatataaaataaatatacaatataatttcttcattaatatcctaaaaaaagtatccgtcaatataaccactttatacaattcaattcttcattaatggttcataattaaagttgataaagtatggttttactagtaaataattattttataatttttttgtcatgaattaatttataattttaattaaaacaatttgtggtataaatatataagtttaactttcagttgtaaataaatacctaagtttaatttttggcggcaataatacctaagttataattttagaactt

SEQ ID NO: 267840 - DNA, 934 bp, Cannabis indica
aatttgcacatgaaactcatagcaatatatatcgaagctttaattttatgacagcaaataattaatgttgatttcccgttgtagtttaattttgattatatagaaaagctttaatattttaattatttgactcgtatatatactgcaacatttatattgatcaatatattttgatttcttttttatattaattatgtgatacaatgttaaaaaacactgaagacatcatctaagttattatacataattaaggattcagtcttcaaataatttaatgtaataattttataaaatatcactaataaaaataaatagtatttttaaaaactattaaaaagttatatatatatttttaaaatattttttatttgagccgctaaaataagtataccctaagcgcaaatctagctcatattagtctagggtcaactctgtgcgtcacttgatagtagtgctttaactatataaactttatgaaaataaaaacaagtcaaaattaagtatatatgttaatgatatatcccttatattaatgatatatcccttatattaatcatcataactatacgaaaattaattaataataagaagtaattagggataattatatataaagtattatttatttttgtaatttttttttgtaatttttatttaatagatatatattttttttctatttttataatgttttataaaataacaagcaatggcagactaagattgaattttaaggtgagcttagtcagtgacggactcaggatttttactttgtgggggcttatttatcataaaaaaatatttatagctacattataatcactcttactaaatttatctaatttagtaggggcttttctactattttgacctataattattaaattaaaaaatttacatttaattttttaaaagacaatatttttgttcgtgg

SEQ ID NO: 267841 - DNA, 1285 bp, Cannabis indica
tatctagtaaccactagaggaagtgataggagctggaccccataagtcagagtgaatgagctgtaatggttcattgtactctgtagtggaaataggaaaaggtagtttagtgatgtttgcctaaacagcaagcggcacacaaatctgaaaaatttgcatctagttttattgcttatattgatattacaagaagacaaggcactttgtacaatttttgctgtaggatgacctaacctattgtgccaaagagagaattgagcattaacaacaggtacagtggaattattacacacaatcgacttaggaaacttagaattatcagtagatacagtaggaggagatttgcttatggcaaggctgctgagttgaagggtgtcaaatttgtaaggaccttgatcaagcctcccaaccagcaaggtcttcaaggtgacctgatccttgacacaataatgaaaggggtgaaactcaaagaaaacattattgtgttaagcaaactgagacacactaagaagattcttggtgataagaggaacatgtaagagtttattcaagacaagagtttgagtatgaaagggagagagaacaaagcgtttaccaatattttgaatgttcaatccagaaccatcacccatatggatctgttgatcacctgcataatcagtagagtaagacaagttttgagcatgaggagtaatgtgatgggtagcacctgaatcgggataccaactggtatcagtgacaacttctggtgtggcatagagattaggcagctctgcaatgttagcactgggaaagttctgaaaggttttaggtccagtaaaggacttgtcaaacctatagaagcacttctgcactgtatggccaagtttatgacaaagttggcattgaaccttttgtccccaggcagaataatgaccacggccttgagtatttcctcctctagtagccggtgtttgccctcttcctgatgagactcctcttgattgtccttgctgaaattgtggattaaaaccaagtgggggatgggatgcagcataggatcctggtatagtatatatgggagatgtacctttggacaaggtatggttagatgtagatggattagaggagtaataaggggaggaaaaggtacctctgccacctgtaaagggcttgttggggccaaattagcttcagcttttgctatatctagctctgagttgtctttttccaatcgtacttcctgtgccatgaggagagcctcgatttctgctacagtataggcttcgagtcttgtgttgactga

SEQ ID NO: 267842 - DNA, 1652 bp, Cannabis indica
agctttgatacatgtgtcagcttcttattgctgccttaaatataagtataatagtagggttacacgttatggcgttaagtgtattgcttctaaggccaagtctccttctactccagtagcttctcctaagaagagtactagctattttaatgtggtaggtatttaaatatttcttttaaatggtttttcttttgtatttgtttgtttgtgttataatttttgtggaaccaatttttttcttttatatttcttattctaatttgttgtttaactaactttgtttataaccgatttttttcaaatggcttacctaaagattaaagcccagcatcgatttctaagttaattgcaaatttaaaactatcctaaagatattcaagaactcaatgctaacttgacagactcccaaattattttatttcaaacggcatcatttttcactttcttgaagatggcgggtattgaaaggattaatgatctccctacattgctctagtgagagaggtccatcaagaaagggatgagtttgaaaagtggtttcttatcagagaccgtattgttcgatttggtttagaggagtttgtgttggttaccgttttgagcccgaaaggttctactattttacctaagaagagttcgttgaagtttaagatgttccgttatgtaagcattaaggtggaacaaaaagatgtaatgcaaagatttttggaatgtagttttgaggatgatgttgatgctgttaaaataggaatagtttatttgttgagaaattatttgtatggttatgagtttggtaagaagtggacaattttgtgttttcttttattgattgtgaattaactgactttaaaaacattatttttgggaagttgtgggatagaacattccgctttatgaatttagcttttagggagaatgataaatttttttacaagattgagaaggctaaggaggataaagataaaattcatgcattcaaataaaaaaaaggtttcccatttgcttgtcttgtttgcctttatgaaattctcccaagtttgagtccaaaatgttgcaaaaggattgacaaatcatattctcgtatgttgaattgggagagttcacacaagaaaatgattggtttatatgctgactttatttctgaaattttcaacaatcttaaggtatattttctgtttttaaataaccagttttatttgtttttaaattaatttataattgttatacctatattttgggcagcaataagaagctaacacatgtatcaaagctgaaagatgaaccagctttaaccactcattattaaatgcacttaaatgactcgcctcataaaatataattaatagaaatactctaactcgctgccatatagacaatagtaagaggtgaataataactattaattgatgagatcatgagatcagtgaggtaaacaggttcatcttgggataaacagaatacacaatggaactgtttggaacgagtagataatgagtttggagctcattgatccacatacttgtatgtatgagcttgcagctcattgatccacatactcatgagtatattcgaagaatgataacaacttcaacctttactcacctcgctttaaatgcattggagtaaccacctcgctaatacctctctcaacg

SEQ ID NO: 267843 - DNA, 1078 bp, Cannabis indica
gttttattttcattccgtttaatacaaaagtttaaattctgcacctttttgattagcaatcccgtttaggggattagggttacgtaagtaacttgggtagcgtgcctaattatttagggcgttacacccaaatttcttaatgtcccactaatgtaaattgttagctcaacgatccaaacacattataagagaaattaaaggatcgtcctcattatcaaactgtcaactagaagaaataatctcagtgcattcaacctcttttaaccaaatctgttcaaaacaaaatcttgatctcctattgaacctgaattgtgaaattaacatcaactaaaatggttctatgatctgaaccatagtagtctaaatgtgtaactgtaggtgacttaagttgatccacccacatattattaacaaaacactaatcaagtctctcctttaatgttgttgttttcttttttattttttgcccaagtaaaatcatcccctatataaggtaattcattccaaaaacaatcgtccaaagtggagcgaaataaattcatatgaatgtcatgacgtaaaggaccaccatttttatgatcatgggaaaataattcattaagatcacccaccaacaaccaagggtcttggggcaatacatcaactagtttttaatgagtgcccaggtatgctttttattttcaatttcagaaaagccataaacagtataaaagtgccaacgatgtccatcatcaaacaacaagtagcaaccaaagtgatttgtattcatagaaaggagattgttattaagtatataaaaatgcattagttctaaatattcttaaacataatctcttaatttataattccattgctattaattcaatatagtagaatttaagttgagggagtcgtacttttttttataagggagagggtattttttttttctttacaatatgatataaattaatacaaaaatttatatttttataatattaaacatagtttataataaaaagatgttgggttttatgccttaaataaaactcatttcaatataatcagatttgcttattaatatagatcagaaataaca

SEQ ID NO: 267844 - DNA, 1032 bp, Cannabis indica
ttattattttactatattattatttttattttattaaataaaataaaaaatcaccatgaatttctcataaattaaaaatttcagttatataggcacactttatatagaatagatattttttttaatgaaatcaatggtaactaaaatagattgcatagatccaatacaatccaatagaaaaccagttaatgcatctaatggttggaacgatccaatccaatacattcattggatcggatcggaccggatgacttaattcgattagattggatcagatgacaaaattcaacatccaataaatatttaaattaaatcagttgggtcgaaatccatggaatatgatccattgaacacctctttcatatattgatattgatatatataattgaatatctacacgtgcttttaatttttattttgaggttactacttttaataactacatagcacaaaaagacaaatagtgtacatcctgggagtgggaaggagggttattttgtcactccgtttgtttttttttctttgtagtgttccaaatgccttaggaatctctttttaattagttattaatggcatttataatggcaacgatatcaaagctaatagaagcattttttaaaagaaaagtttcatctggtttctttcatggcttccttctcatctcttatcacacccatttcccaaaacccaaaaatactcttaacaaactccaatcattcgaactgttctaaggcgattccgcatggtttcccctctttgggatttgggtttggggtttctcaacatgggaggtcgtttaaacagatgaggaggattgttacaagttccattaatcaaaatgaagctttggttggtaagaaataattttggttcttcatacttctgcttctagctcaagctcattcattttttttcttgtttggttcattataattttgttgaaaatccaattcaaaaatgaaaacataacaaggtattattttgttttattttcattgttatatatcacaaaaagacaactgttgtggcagg

SEQ ID NO: 267845 - DNA, 970 bp, Cannabis indica
tacaaaaaccaagaccttggcaggtacatcttattttgtcatgcatgatcttattgttgatttggctagaattgtttctgggaaatactcttgtttattagagcacaacgaagacattgttaagttggagaagaaaacacgccactttggatgtgtcacaaaactcttgtatctagataacaagatgtctaacagttttgaagctacacgcttgcgaacatttttaactttaggttcacggtatcctaaaattagtatttctaaggaactagtgcataatttgttactgaagctaaaatgtttgagagttttatctttctgttattcatgtttgattgagttgccaaattcaatcagtgagcttaaacatcttcgctttttagatctttctggcactgagattgtgaagttgccggtatctctaactatgttatacaatttacagactttaaagttagaatattgtcgtcaacttgaaactttgcctaaaaatatgcatcacctcattaatttgagacatcttattatcagtgaagctaacctagtagagatgccaagccaaataagtaaattgacaaatctccaaacattgacaatgttcgtcgtgggaaaggatagtggtgctgaaataaaagagttggcccaactttcaagtctacatggagaagtttccattaagaagttagaaaatgtggtcaatgttgcaacaccatcaaatctaatcaatgtattggataagaagaaacttgagaaattgagtttggaatggagttatttaaatagatcaattgatccaaagcatggaaagaatgtgcttgaaatgcttacacttaacacaatgttgaaggagctcaagattcttcattacccgggcaaaaagtttccatatggttggaaatgaatcgtttagtcaacattgttaaagtaaagtcttacaacaagtagtgtacaaagatacataagctaaaag

SEQ ID NO: 267846 - DNA, 1670 bp, Cannabis indica
ctctctctctcgatctcactcacaactcactccttcgatctctctctctctctctctctctctcgatctcactcactcgggtctctctctctcacggcgacacacctccgccaccaccagcgacgcacctccgctgcccctccactaccgagaaccactccgccgccctctctctcttagcttggtaataattttatttcttctctttgatgtactagttaattaaatctacacccttttggagtttagaatagcccatgtattgtatgtaaacttagatatctttaagcatttgtgttttcaaagattaaaacttttttctcttctaggtagacggcagttcgatttggctaacagtgaagcgttgggtgaatcgtctgagtggagggcgagatatgaggaagtagtgaagactgcccaacgtttgagtgaactcaaccaggtattttggatgtgtttatttaattcacaataattctgaacatcaattgtataacctcacatttatgtattatattatgaaatggagctgcgaattttcctttaccagatttgtttattaaatttaatttaccacttctataagataatataaccaaatgcaggaatcaaaagggacttgttccatttgaataaaagtgatgtgataatgagtttttgcgagttattatgttaggaattaatagcaaactcgggagcataaatttgtgggaactgccattgctgctaatttgatacaatgaagacagcgttctgaattttctttgtaagctctcaacaacccttttttaagctgaaggttactgattaagattcactaattgtttttcatagcaagtatcaagagcaatctttatactacattaaaggtaagttgcacaatttatgtaattatgcctaataatgattcaagtttgatctctctagtttgatatgttattcagattttacaggcaaatccagatcttatcccgtctatactaactttggcacttaacgatgcaataacatatgacagggttagatgttgattatataatttgtaaagaaattaaccaaatgcacaaaggagaaacatgctcacttgtagagtgttgctcatatataaccctcagattttgctttggacgtatggacttactatccaccacataatatagatagctatccctacagtctttttgcatctgtaatgatttaaagattatttttcatgtttttttccctactagttatactttttattgtcatatttaagtctgaatcaataactagtgttgtattgtcatttgttggctattttatattcaattccccttctttttaaatctgaatgagaatttagaggaaataatttatgaacaagctatgtgtctaattcaagtgtggtcttagtgcattgcatagggtttggttgatgattgcttaattaaaatgttacacaatttaaagagactttttatgctccagtcttggcatgattctagaaggttgcatgaaaagggtaaagaggcatcttaaaattgttttcattgaaacagagttagtaaaattgacatcatagtgattaacctcattttttttgagctatctttgtttagtaatttcctattacctttcattttaactattccctcacttatatttttttattgtcaattgtatttata

SEQ ID NO: 267847 - DNA, 653 bp, Cannabis indica
acgtgttaggttaacattaaataattcttatcttccctgctttgtaagaggaaaggtattttgataactgctattttgttagaaagaaaaaagaagctgaatttttagtaaaaaaacatgttattataaattaagaagagatcatttcaaataacagagtagctagagaggtgtgaaggggtattctctaactaaaaacaatctcatccatctctaatataaacttaaccaaattgtgagcagtcttggttgtaagtttaacatgagaaacagttacattaaaaaaaaaaataataaataaaagactaaaaacaattacattaggatcaaataatatgagaatattttaagatagttttaacataatagtggaatatattatagaagtcatctattcccagtcttcactttaatttttattagaaatgttaaatatgtactagaatcttgcaactttgacaactctaatttttttttttagcaaaagtacttatatgattaaactattcaaagtaacatcacactttcaccttttaagggagtggtgatggactgtcaacaacttctatctattttaaacaatatttctttgtttttcattaaatgatctactaatataactgcgaacagctttgttagagcgtcatattctt

SEQ ID NO: 267848 - DNA, 665 bp, Cannabis indica
ttgagctagccccaagtggttatagagacattatatttggcattttataagaaaattataatctaatttaattaaatgacggtttacattgtagttatagtagataatttgccaatttttaaaatttttgaaataatttataaatatgttaaaaataaagtttaaaatattgtcatttatgctcttctaaaaagaattataagcatatatgcaatcaaaaagatttaaatcttgttaattttttgtactgtaattaaattattcacaaaactagtagttgtctataatgtataccgtcatttatttatttgttataaaattataatttctgtaagtgtcaaaaataaaaaatactcttactataaaatttttattaggaggttattggtgtaaaaaattaaaatgctctagcaatactttttatgaacatgtatttcctgatttcaccatattaaatatgaaattacacatattttaatttaataatattaaaaaaaaaattaactaactatttgaggaaccttgtggtagtgggttgtacataaaattttgtaaactactcaaactgaataacctgtccaaaccaaaccgacataactcaacgaagaatgtaaaccgaataacccaacgaataatgtaaactgaacaacccaacgaaaatataa

SEQ ID NO: 267849 - DNA, 714 bp, Cannabis indica
tgcccctgaaggccttgtgcatttgcaagtgtgatcactaggcctaagtaagtattctgtaggtttttattataaatggttaatagtatcaagtttagtctttttctgatgtcatgacatatttacttatttggagtgaaaacaaaatttctgataatgatttctaaacaaaaacaatgaaaaaacagtagagaaattgttgattgagaaaaaacagtagtaaattaggaaagaaaataaaaatatatgaaatattgaatctcttacttgtcttttttcatgttgcttgttataattaaaaggaatggaaattaacctctgtaaagttatgagtgcacataagtgtaattttatttttggtccattaaaataactcattgtcgtcaatgaattattttatatcatatacagtacaactataaatatgggtagaatttttgtctaaacacgacacaaaacataaaaagaatatgagcttgagccaagcactacacaatattgcaacagagaacaatcagtgtgtccttggctggattaaataatgcaaagaaattaaagctagttcaagagtggtatgatttttgcaattaatagttaggaaaatccaaaggggtgtacattgttagaggatttcatattgttaatgaaatattagagcatgtttggtattgtttttttgttttttgttttcaaaaaattgtttttagaaatgag

SEQ ID NO: 267850 - DNA, 1444 bp, Cannabis indica
cattcatcatcataatcatcatcatcaagataagcgttgattcactcttcttcagtaagagttattgtgcctttcatttgctaatgagaagattcatgattcaggtgaaaagaactagcaatttttgaattgaagggagtagttaatgggaagtttttaggcgattttgacaaatagaggaaataaccattaaaggactataactgcctcagagcacataacgatagatgctctttattcaatttaaatttaatgtacctttttgtgggttattatttgggttgtttgtatataaattttttgttacaatatatttcttttttgtttatatgatatatattattattcttatatgatatttatgtatttatttattttatgtataatgtggaaattttttataagcataatatatacattttaatgtaggtatataattttattcgcatgctacatatattttattgtagtataatatttattataactatagaatatatcattatagataatatttttctaatttttattatatacaataattatatataattttattaccctgatatatatatattttaattgtagtatataatttaattagtatcgtatatatatatattggcgtaatttttagtcaactgatgttaaatgattataaaattatagcgattcgactcagactattcgattataaaaaataaaccagtttaaataaaaaataatattagagacttgatttttatagttgttcacctctttttatgtggcgataatagacttctccacttatgattttattaaccattctagaaattgaattgagattttaattattaggacataaaactctaacaagtatgccttgttcatgatcattcatgtgttataattatggataaattcatagcagataaaaaacttgattggataaatcttttttcattatttctatactttataactattttaatgaatatattcttattaacaaaaacatttattgacaatttatacttaattttctaattaatttacaatatgaataaaatataatttgtgcattaacaatataaatattttatatgtacatatatatgcatgcaaaataagaagagagggtttttgacactattagggaaatattttgtcaaatttgggtatgcattttgtttctttataattacaagattaatatataggttaacttcaaaatcgtacgtttttaattattaaaagttatagtatatatttgtttttttttaaaaagggaagttatagtatattaaatcaagtttataataagctagtttaatagtgaggaaggaatgggaaaaaagaaaaagtactcatgggttcgatcgaactcaaaatctttaatctattaaactattaaaatgattataatactattaccctacactaaaaaaaaacaaaaaaaaaa

SEQ ID NO: 267851 - DNA, 1850 bp, Cannabis indica
aatcatctttagttagagaggttcctagatattagaacgttaggtgttttgttttcttctgttctaaatatctatgttgtatcgttctatgtacattgaaaagattattcgcttaataatattcaagtacacttcagcagtgtattattgttctcttcttgattttaaatgcttttccttgaaaaaaaaaatgccttagaggcatcagagaagtattttttttcagttgaagaaaatcaaatggatcccaatggtttgggaagaggtcctggttctcatgcatatcagcatacctataaaatcattcccactgccatcatcgaaaacaacctttcacttcagattactggctttacatttattggtcccaattacctacaatggaatccctttgttcagcttatttcttttttgaaaaagagaaagaggcctttgtctaagactgacccttcccccgttatatatagataacctcacttgtggcggaggaaaatcgtgattacaaatgccatatcaaagaagattttttttttaaaacaacagcaatcaaagaagacataaacatatcaggtactattaaacaacattacacgacgttctccaatctctactcaactctaaaaatgaaaactgcccaaaactcttggttttgtaaacccaagtagctgtccaaaatctgactttttcccataactcttcaactgaaccttcattccctttaaagattccgttattcctttcaagtcaaattacccaaatgattgctaaaattagcagtcctccatcggtacgatctacgcttactaccctccaccttgctcacaatcattagagggattgatccggggagtacccattgaatctcaaaaatatcaaatagcttactccataatctttggacaaggctggcaccccaaaaacaaatgtatcacttcttcactacttttcttacagcaaacacaccatcccggggacatacagaggaatggtcgccttttttgcatcatcgggtgcacataaatttttccaaacgccaccaaccacccaaagacattaactttaaaaggacatctgcttttccataaggtctttgtccaaaataacttgccaaaattatgatcgaaagtaaaccagctgaatgctgacttacaagagaaagtcccaccaagatctggtttccataatcggatatcatccgagatgttgagcagtctaatatgttccagtagttgtaataataccataagactaggcatttctctctccatcaagttccttctaaacttaatattctagctcgctaaacagttcttcacctcaccttcaatggcaacaaggtcttttatgctcgtatttttttgccttggataccacagccaggtcccggaagcaactctttaaggatgtttcttcaatccaaacatcctcccaaaaatgaatagttgcggcattgcccactttaaattttaccaactgcaaaaattcaccataaaggtctgaaatatccttccaagggcctcttggagatagcctttgacttgagttagtatcccaaaaattttctgctctcccataacggcttttgatcactttatgccaaaatgaatttgattctaatgggtaccgccaaagccatttcataagcaaccctttatttctcatatctaatctaccaatagcaagacctccctcatgtttaggtgtacacacctcctccgaagccccaaatgatccccacccaatcaatctcctccttcccatagaaaatctctcataattttttctaaagagaaaaccgcttttgcagctttgtatatatatttatatatatatttatagagagagagaga

SEQ ID NO: 267852 - DNA, 554 bp, Cannabis indica
ggacactccgggtaagttttaaaggaagacccgcgaccttgacggctgcctctgtttccccaaaacttcctgttacttcccagtatttcggaagctttagccttccacttgtgatctgagttaccaccatcggtcccctcacttgcactaccatcaatattagggcttgatgccgtgacgacatccttagtagcctgttctttgataacaagttgttttgcctcttaaacaatcaatgctctcttaaccactttcttgtataatgtattgtgatcagtggtaatttttaagtcccaattgatagtggcattcagtccccttacatatatacttttgtttttgagtcaagtccgttggtactaagtcgccagcaaacttagatatgcgatcaaattccagtgtatactcggtcactgtcctcttctctttagttaattttataaaatcttccatgtgagtagttcggatggcaatattataaagtttttcctcaaatagactcttgaattcatcccaagatatagtattaatatctcgagtctgttccacaatat

SEQ ID NO: 267853 - DNA, 513 bp, Cannabis indica
ttctcgttctaactcattttatgattttgtagatatggataaaccatgcttctcaaacaagcccagtgcgccacttccaacccgtgaccgatctatcccttcggcatgtctgacatggaaagtattgtgactcggtctagactcaaaaggatggtaaattagtctacagtaatgtagggttacaaacccttgtccagtgatcgcactcttttgtcacctcaagacatggtggcttttagcaaatacattctcaagacaggtgttgcttggccgcttcactctttttatgtgaaggttttggattactttggcaaagctcccctgcagcttatgcctaacggcgaacatcctaactttcttctttatcgcctttaaggaggcaactggtagggctcctacagcaaaggaggtgcattatgtgtataattttcgacacaaccccacattttggggtttctattacttgcacaagaaggtttcaactgaccaaacacgggaaaaacttggaaacaa

SEQ ID NO: 267854 - DNA, 819 bp, Cannabis indica
aaaaaaaaaaattagggggtgaaatggccaaaggcagagcgttgggttggcgagaagagtaacaggcagaacacagaagggcattatggtaatttaacacaagttcattgagccacccaggttttcctcttcttcaaccatagccactctctctctctctgaaaccctaatccaatccaagacgccaattgttacgcacgcactctccgaacactgtaagctcttacaccttattcatggcgttatctttagccttaaattttcagtccttttcttttttctcagaatttgatttcaataatttggtgtttggagaggtcggagttcagaaaatcgtactgtttcttaaactaaattaatttaaaaatgaatcgctcccttttttttttttttttgtgttttctcttttcccgatccgaaacccgcgaggttttttattagggtttgttcgacccgatcggttacgactcggtttgaattgattgggtcagtcggagccccgattactccgatccggcaaccttgaggtttgcttttctgtacccaaatcccggattttacaggttgacccggtcccttcatcaagaacacggacctgggttgaataagattaacattgtattgatttaatgtgatattgaatcagagtaacaattttgttctatgattttcaagaagagttatgacacatatgtgttttttctttctccataattattggtaaagtgtttgagaattgcctctttcagtgattttcttttcaaattagttttttcgttacacaaaatatttagcaagtctgcacaaacaggatgtgtt

SEQ ID NO: 267855 - DNA, 613 bp, Cannabis indica
acttcctgtatgacaaaagcaaacacacgaatgagataaattgaaaaagaaaaacaatagcgggaaatgcaatctttcggcaacacaagaaatcgaagtgaatggccaaggatgttgaatggaaagaaagtaacctatttcgtaactcattaacatgtactataacatgccaaacaatgcatccaaattcaaagtttccgagtttatacatatatatattgaaattaggattcctgcctaaccgtacaacatttggggaccggcaaactataacaatttctatgtaggtacctaaagagggactcgaacctcagaaattgtgggagcaaaccacgtgcttgaccatttgagctaccccttttgggtaaagttgtcgagtatatgatttaccttaaaattacacaagtaatttcttgaaccgtgaagttgtgaactatattaaagatataaacgaaaaaaacatggatcaatttgtattgccagatagtgtaaacaagaatccaaaattatattggcagtcaaggctttgtgtttaagaaaatactctacaaaaaaaagaaaatcattgaaaacatttttgttaaaggtaaaattacatatataactaaggaaa

SEQ ID NO: 267856 - DNA, 1840 bp, Cannabis indica
gaattcatacattaaacataatcatgaaataaatcatgtgaaccatgcaacaagaatgatttcttattttttattaattagtaaatctgattatattgaaatgggttctatttagggcacaaaacccaatatatctatcttcttacaacatatatatatgtctatctccttacaacatatgtatatatatctatctctttacgtaaccaaatgtctatttcctcacaccttatatatatgtacgtctatctactcttttcatctcgtatttcgaaatagacagccaaatatttttatttagcccaatgtatgacttttataagcaatttatatccaagcgtctgtctaattgattagaccaacaagatgacttagtttagataagaaactctttgaagaactaattattcacacaaatattactcagccaagatagccacatacccgcatgcggcaaggactactcaatcgccatgcttgaaccattcatgcaattttcttatctcaaacagcaagatacgcatacatcgcttgacttaagcaggtaaaccacttgaccaactctcaggttattcaacagtagcacctaatttgatattattaactccccaactagaatgaattctcgttggacattgagggacaaactgtagaggtaaaaaaattgcttaatatttacaacatgtttaagaagcccgatatgcaagtcagacaggcccatcggtaatgaacccgatattattaggcccaataaagtagccagacaaactcattaggccttgaaatagacaaacatgtgaacttatgggccatgagccagttcacccgcaatcgggtccgagcccagccaatcagccaaacgggtggaaccaagtaaatattgaaccagtcagaaagacagttactgttcccttaaaattaggaaagcaactaacttgaacgagtctgatgggtgacgtggacggaaggcaacggtactgaggacacacgataaaaaaatcataaggtagacgcaaggcatcgaagattcgatactcacactactcacttgctcaagcagacagtcgtcctttctaaacttctcttaagcctcaccaccgtagttgttcctttagtccgtttgttcgcttgtccactcatccgtccggctaccatctacatttcatttattttttgtttttgttattttttactaaaatcgtactaacttgagcgtcgaagtccctttggctgacaccccaccgatgctcccaattgagcttttgtctctctctttgttcttgacaggttgctagtgcccaaatttcgtaattgtaaatttcaccctctacagtaactaacttaaagacaattcctaacataaacaaatgtaaaaatttaatcatttttatcataggttagattattattaagttttattttgacaaaaaaacagttcaggattctatttgtaccattttgaaaaatacaaggtccattttgtcatttaacaaaactgagagtctaatttagtaacttttacaaaacacaagatccaaaatagtatttaccccttaaataaatagtattttttagttttatatatttttaaattaatattaaaaattatattaaaaattaaatgtccaattaaaagtttctatctaatctaattactaattagattagatgattagattttgatgtttaattaaattggatgaggattagattttgaagtctaattactcattgaattagaaaaaaaaaaaaaacatgagtacatcggatgtccaaccctaataaaacccattatttaaccaacttaacaatacaagtgattttatttaaaaaaaaaaaa

SEQ ID NO: 267857 - DNA, 1628 bp, Cannabis indica
tttaataacaatactagtgagcggtacttaattatgccagttacctttcaaaaaaattatgtcagtctaaataaaattctaacattcttccacttggactacataattaaactaacaaattctcattgagcaataatgtctacatgcaaaaatctcaagacacacaaatgtctataaaactaattttgtactatattgtatcaatatgatataaatataatacataacgagacattagaatttacatatccatgaagataaatacttatttggattcactcaaaacatagcacagagacttggccactggctcacataattaagtgtacacgcaatatcaaagagtgatcccaagtatgcttgtattcaacaaccaatataaatccttaatatatctatcgtacatgaaatctgtaacccccacggactaaatacatctttgaaacttagctatccaactaagaaatatcgtctttaggatacacttttagttacgttctatcagggcagtcattgttatggttgttgtaagtgcgtgttatgatgctagtagaggaaactatttgtaaaataaatatatatatatatatcgttttgagggtattttgataaattggctaatagggtgaggataaacattatttgttgtagaaatttttagaaaatactaggaaacactttctctctcagtaaaaaactcccacaaagaataacccaattttttcttgcaaaatttccttgaagaattgaagaattgaagcttgccttggagcattaatctttggaggatagagtatttcaagttaaatctagcttgaggaagaagggaaggtaattctcttagtaaataaattcttttatgtagtagttgttatatagttgaattttattattctcttgatgctagggttaagttctgggtagtttgtaattaaattatagtctttttgggtggttaaaatgaagttgaaaggggattcgacagttctagttttaagagcttagagcatataatcacaattacctttcactgtgttgacatcactgtaattgtaaatagctatatgttctggatttaacagaaattgtatactaaaccttaaatatgaataatacatgtaaacataaataacttctaatcttttgttgataacaaataagattatattgaaatgagttttatttagggcataaaattccaacagaacatcaactaagagtgttcttagagatgagggcgaccatgtcaaacacagactttatacctacaaaaacaataacatcaaaaataaaattgtattagttgacgagcatttattcatatcaataataaccaaaatcctaatttttttttgccaaactagtttaaaactataaccgtcaagaacattttgatattctgtcgataatctaccgataatccagtaatgataaccaacttagcaaaaaaaattctcaatcatatcgataatctatcaaaaattaattgatatttaagtgagaatcaaaaaaaaaataaaattacaatttatttgcaatgattcaattgttgagaatatatttcgataataactaaacataataactatcacccttatcgataatccgtcgataatcaatcgatattc

SEQ ID NO: 267858 - DNA, 693 bp, Cannabis indica
taaatatataaatatgtattgattgatgaatattttggacaatacagtatcattctattctcaaatcaaacctaaccatataaaataattctcattctaattatcgttttcgggataaacaaaatttctattttttttaatagatttaattaccaaagtagcatttattaaaaaaaaaaatcaattttattttaaatcattccattaccttttcattggcatgcttatgtcatttggtagaaaccatacaaaaaaaacgggaaaataaatcaaataaactgaaagagtatcaaattattagatggtagaaaagattaagatacatatcagtatgtgttagcaactaggtccaaaaatctgttaaaatacatattttcttccttaaagtgcagttgaactactactgaaaactgcatcacatgatactcagctaaataatttataaaaaaatctaagcaaaagctggggatatgagaaaccaagtccttaatagtaatcctatcagtcgccgtggatggtgtatcgctcccatttccttgttggatcatatatctgccataatagattaagtaaaaagaaaaggcaatgagaagtctgttggattccgatcattctcattatccagttctaagtaattgtagagctgttaattaaaagttatagtttatatttaggcaagaaagtcatgcgtct

SEQ ID NO: 267859 - DNA, 867 bp, Cannabis indica
ggctgctgtaaaaggatgtttcaattgtataaaatgagcatatttgctcaatttatccaccaccaccataatggtatcccacccatcagacttaggtaacccctcaatgaaatccatggatatttcatcccaaacttgggccagtaaagcgatgggttgaagcaaaccagcaggtgtggtggctgcatatttgttctcttggcaagttggacattcacttacaaatttcaacacatctttttcgcatgcctgtccaatacacttttgcttttaacctttgataagttttctcttctcccgaatggcctcctattggagagttgtgaaattcttttaaaatggtgtgtcttagagtggaccccttaggaatcacaattcgccctttatagagcaccgtgtcttgttggagggtgaatccaaatggggttttaccttgctgaatgtcttgcttgatgcccttgaggaagggatcttgttggacctcttcctgtaatttatcccaatgttgccattgtggaagattaatgttgttgagttctgttgttgctggttttcgggacaaggcatcagccactttgttactagcgcctgatttgtaaaaaatatcaaactcgtatgtcatgagttttgctatccaccgttggtactcactgccaatgattcgttgttcaagcagaaattttagactttgttggtcaatacgaacaatgaatcttcgacccaacaaatatggcctccacttacttactgcaaaaacaatggccattaattccttttcgtaaatagacttgagacgacttgttggccccattgtatggatgaaataagctattggttagtttcctgcatgagaacaactccaagacc

SEQ ID NO: 267860 - DNA, 871 bp, Cannabis indica
gagctactgtttgtttcccgagaaaatattatatataagaaaaagaagagaatgaccctcttattctttctttcccctctttttcaatgttagagagagaaaggttgaataaaagaagatcgccaagacaagaaagaaaaattattattattgtttggtggtgtgaggtagtttgtgctagggttatgtacccctttatatagggtttattaaggcacttgattctatatatatattcttatatttgcggacggcgtagaatttttcaaggatcaagaaagttgtcaaattcatatttactatatatatgtattaatttacaaataaataataatattagagatttattgtggaaaacatagttgtagtaacagttgggtcattgtcaatcacaggctgtttaatgataattatgattttttttagtgtatttttttaataagaattcattttaaaacatttgaatgtattattcattttatattaatctcaattattgcatcaaagaaaaggaatgtaattgcaaaacaaattaaatcacaatatctcttgtgggcctctttggacgtggaaaaggggaaaatagagtaatgtactcatctaatattttttattattattatttaaaatagtttaccaataatattttttattattattttttaagaaaacggaaactattcttataagttaataattacctaatttgctaattttattttggcaaacaagaaaatatataaaattggaaacttaaaattaatcttgaattgattgcaatataaatgtataattagtaatctttatacggtacatgtacgtatccgatcgggttttatcaacttttcaaaatatgtttagcatagtcgct

SEQ ID NO: 267861 - DNA, 1231 bp, Cannabis indica
gagaaatgaggtttttagaagatttgtaattaaaaatagtataccattttctgagaacggtctaccgtttttagtaggcagtgaccaggaaaaacgacctactgtttttttagggtgttttcctaaagtctcatttctgtattttatcaatatttagggtatgttcatgctatttattgataaggaagattttagttttgagtttaggtcctgaaaagtgattaagcatatcacttaccagattatgtatgttatgacttagggacctttaaattatcctgcagtagtttctactcaagttgaccggtacacctgaattaaaaattgaggtaagattagtataatagtttcatatatttatacatgtttagcatgcatgtaagttattagaatattatatcaaggtatcaatgaggtgtacatagagttgcactaagataccaacatatatatgttacgcaaatcaatagccatcaaattagcatatcagaatattggtaaagtgtacatagaattgcactgagatatcaatagatatatgaaaggctttgttgtacgaacgttctagacttagtgtgcgttggaccgggccatagggttgtgattaggtgtatgggtgcttggatataatctggtttatgtttatgttatgtttatatttttttgctaagtaggtaaaagtaagaatctctaataaattaatgggaaaaaacatcaaaatagtacaaccgttaaaaatgatatatatctaatttgctaaatggatgaaccgcccaacaataagagagacattgtctttgaataaaactaataataatttaattaaataaataaataagtagggtacaacctaaataagtattactattttattcaattaagaaaaatatcttagaagtcttattcatttatttattttgaatggaataatcttattaagtattagtcttatggatggtgagttcaatagtttaaaatgtatgtatttggtgaaaactacatctacatggagtcatatgcgtacgtaccatctcacactagcttctcttcgtcaaaggtcggtttacttttctctgcccttttcctgtgaaaaataaataaataaaaatgggaccaatattatgagaagaggaatggtatgaccaccaaatttatatagcaaaatcctttgaaaaatttatataaatgtacacatatataaataccaaaagattacatagtaacttcagtt

SEQ ID NO: 267862 - DNA, 1672 bp, Cannabis indica
catttcttggttgacaaacttggtgtagttgagacaccactaaatttgagatgggctgtgaagaaataaaattttccttattacttctagaagagatttgctggcataacaaacttttggtggtccctaaacgttgacaaactttgtccaaacttttgtagcgttagaatattctttccttttcctctataaagattggattacaattttaatgattaggtattcaattctgttgtaatcttcacctattaatacaacacttccagtcttatcaaagtttgacctgagttttttcatcagtcttttttaatttttcttaaaattttatcaaatttatggttaatgtgattttttttaatgttttgatatgtgtacttaatattttttaacaataaatatacatgcatgtgtggttagattttaagttttaaaaccatttagaatgttgcttaattatattttatcaaaataaaataaaataattataattacttttttttagaaaataactactattaattattggtgtacattggtcggtttagtcagtttatgctatatttttttcatcccaatgtaaagatcggattacaaaaatctaagtgcaacccgctcaattaagaaaaatgaaaatagtaatgtaatgccctgatacttaggcgtgctacaacaattttctaattaacgcgccacctttgctaataaaagggttttcctaaaaaatcgtgtcaaattaaaacttttgttttaaattattaaactttataaacatataaatatatatttacataaatcggaatcccgcgtttaaacttttacaaatattttcaaaatatatttacaaacttgccgcacaacaactataaaatataatccaagatgtcccgagaccaaacactccaggtcgcatcgtctcgacatgtacaatcaccatccacactcggagctcactcttgttcagccttcatctttcttttacctacacatgaaagtaacaactgcgagtcaacagactcagtaagaaaagcatataacaaataatatatcttcgacttgtatctaggcgcccatacacctgtccataaggcttatcagataagtaagaacgttctttactaaggtacgaccactataccacatgcattacgtactactactgtactagtgttggtagagtttgtcttgtacctcgagtaccactaagtgttataccatatacacttcgtacctgcccgtactagtgttggtaacaccgtactgtactctttaaacatcgtacgctataccaatgcactcagtactgctatgttggaagttattttaccaggaacttagatctactcacaagtatgttgatttaacaacctaaatatgaacttctaaaacgatggaaaattaaacacataaaagtatcagaaatcttacattgggtgcagcggaatatatgtctcctcccactcagatctctaacccttgattcctttctgtcgcagagtataatcaagatctgagcccgatagtccttctttgttgtttctgaattctacacagccttcctcactatgattgaggtattacttgatgtgtgtgggcactactctatcactcatagatttcgaaacagagaaggtagagagagagagggtggcggctcagagagagtttttgtgtg

SEQ ID NO: 267863 - DNA, 1566 bp, Cannabis indica
  modified_base (55)..(55): a, c, t, g, unknown or other
tagcaaaatattataataaataataatatataaataaatattaagattataatanaatttagtattaaattatcaataattagattataaaagctggcacagcttagttctacgtgtgcatgatcttaattattatcaaatccatgcatgcaaaaacaccatatatataattacactcatcaataaatatataataaaataaagacaagggtacaaaactaaaaaaaattatctttagtgataacaatttagtcacaatataaagtttttgtaactaattaaatgtaacttatagttacaataaaaaattacgtaatatttaggtatacttactaagttagttttaatcacaacaaattgtatttttttgtcacaatatagaaataataatttataattagttactttttttttacttttaatcacaaattttactgtgattaaaagtaattttttttttgaaataacactaattagaatttgcatatacatttatagatcgatcgatatatgtaatattggttgcataattgcatgtataaattttatatatatagaaatgttaaatagtacaataataaaaaaaattataatattagttactatataatttttgtgatgttagttaccttaaattgcttaatttatcgcataataatatacaataattaaaactaaatcttggtttaacaattatcaactaagaaaatttactacttacctttgagtggttgaaaggatggttgttttgaaggctgtattcatgcataacccaattacttttttcgcccctcggagccctacccttgtagaaaactagggttttcttcatcccgacaagtacaccgcttcctgacctaaggatttccttatccttcccggtagttttccaatacccagcttctgtggccctgttcgttcgaagccccgttgggtattttcggtctttcaagctgaaaaaataccattctttttctcccatcgacgcctttttctgaaaacatgtacacatgcatgcaaaaaaaataaaataaatattttcttaaattgatcaaataattattattaataatatctctaagatataattatatatgcaagattaataaatttttacagatacatattagaaaaatatctatatattttgaatcattttatgtacagataatggaaagtaataatattataatactattacttttatgtacagtgtcttatcttttacgtccaatatttcaataattaattttctaattaaagtccactgttttctctttctgtaaataaaaaaagtccactaaaaccagaactatagatcatcaaaattaattatcataatataaaaaaatacacatatacatattacatatctttttttgtatgacatatatatatatatatataaagatttgatcatcacaaattagaatatatatatatcatatatatatatataatcttatgtatagatcttcatgtaacttcccttaataatattagtttataattaattaataaatttgatcaataccactatagacttattttaatttctcgtatata

SEQ ID NO: 267864 - DNA, 1427 bp, Cannabis indica
aaaagtgatcaactgacaacgagatcgtatagatttgatgcttgccacatgttacacaaacagaatgaaaaagtataaaacacattgattttttatagaagttcgacccccttgtgatagcaggtaatgacctcctccccttttggttgtattgatactagagatatactattcagatcgctataggtgggatttgatatagctctctataagtatacaaaatatgaatcagtaagtagatctctaatgagagagtgatattgccttagaggcgtgtgagagatgaagagagagagagcccttgggggcgtgtcgcaaagagagagaaagagatactagggtttctgacttagagcgatttggaggctaaggattaggcttagtgacttcagttttctaggttagagttaatgcctatatatagaaagcctaaaaccctaatttacaataaaacccttagatatttacatattaaattaatcaaatacaaaagactaaactaccccttgaaagtagatattttacatcaatttgttaggctattaaagggcccaattcgcatgtaacttgttgtccatgctttgggttgtacatagagtcctgccatgtttatcttggctgcccatagacctacaggggaggtctggccacccaaggcctgtacgatgaggtctggctgaccatgctcctgccaggacctaataggttatgtgtctatcaggatcctgcaggtcactatagcccttcgaagagaaggccagcctttggatgtggaggcccgccttttgcaagttgaggacaactttgtacactatttcctcatacaggttaggttcccttggtcgaacaaaagctcccttggtctggaagtcactttttggccggccagcttacacacagatcctggccggcctataggctcaccctggccggcctataggcttctcttggttagccagggatgtaggtacaaccccttgagagctcacttcaccccttttggttgatgcttgataattttgtcgtaccttttatagagcctttgtcttgctctagcaaggatgtattccacttgtactctatctttggcttacacagacatgccacgtcaggttgataaaatttgggttaacatttgccccccaagtccctgatcgaacatgtggtcggttagggactttctagctctcatcttgtctgtagtagtctctgttgagcagccttatctagccaagtgttggctttttgcatggcatgcttttggatctttaaccttttctcactatatacgtctcatcttctcttcttgggtatctcttatttgtacctgccattaacaagtttcaagctttttaaacttttggaaactttttgattctcatgttagtttgtaatctctttggtatattgatcctcatgatagtttt

SEQ ID NO: 267865 - DNA, 1836 bp, Cannabis indica
aactgaattctcattcaaacgacctgtcgttttaactaaattgtttgttaagatattaattttatatttggttgttgacctcattatttttagttaacgacgtggagtgagtgaaacgataaaatgagtaattatatgtaatggattttgttgtattttaacagttttagctgtggtttttaacagaatgttgtgttttttttaatagaatttattcaaataaaattttaattttaacagagttgttaagtaatcaaaatttgcatcttctccaaaatatatataaccattggcattgcatctttatatctctattttatatctgatcatgagcaaacatcataaattgctacatggtaaataaaaaataaatttaattagtgtaattagaatgtataacaatacaaatcatcagcacaatatccttagataaacacaattgcatagacacaatatccgttgtgctctttgtcttagattatcattgtttgtattctcttacctcttttatttctgatattgtatttgtgtatgttctttggttttagttacgattttagtgagtttgagcagtgagttttttgagttagttttttcaggtttgagtgctttaggctaaaagcttttcttggtttcgaactgagaaaggagtaagcttttttgggtgtttttcgggttagaacaggaaaggaaaataagaaaaatacttaggactctaaccctattttcgagtaacagaagaagagaagtagaaaaatcatagaaccataaaaaccctatgcccgtgagtttagtgtggttgttagaagtagaagaagctttgaaatccaaactgaatagaatgcctcaataatgaacttgttgtcttggagcttttcttcctcttctttgagtgctcgtgctccttccttgtctaacaatctcctctttttttgtactaaacggaagttttgagtgtttatatttagtgtgtgaaaaattacggatggactgattccaaccatgtcatcacgtgaccatgaaaatacatcgaagtttgctctcagaattttaattaaagcagattttatttcttacaacaacctcgtcctatcttgataattcgagtcggcatagttgggtcgatctctacttcttctaatgcttccactagcctaattcatgtgttagggtccccgaagcaaggatccatctcattgtccctgcctttggcagatccttatttattctcagtttatttgaccttggagctttggctgaactgatcttcttttttcgcctttgttagtgtaatgttgtaacattagcgggctatctgctgatccccctatatgcaccctaccccattcctggtagaaaacttcacacagaggtggtatatagatgttactgcttttgggtcatacagtgctggttagtcaatcatgacgttaaaggctgttggcacatctataattaagaactctgctataattgtggtgttagcaggtgccttccccatattaagggggagacaaacgactcccaggggtatgatgatatggtcagagaagccataaatcaattgcacgcacggaactagatccttgagttggaagcccatctttttatatagtttgacttgaacaggatgttcgataaggcaccattgtctatcatgctccgtgcaacggtgaagttcgctatttgcacttcaacaaccagagggttgtgcagataatgaacatgagtggcatctacttcactgaacgatacaagtgtatcatcctcgcacgaatgtttgggagttctctctccatggccagtcttctttttctcatactagagcgtacaagc

SEQ ID NO: 267866 - DNA, 2231 bp, Cannabis indica
cactgggagacccaattgcgaaacttcataggatgccataacaagacatcacttggtcaatggaatcccaattcagcctatcttaggctttcatgaggtcaatttttacggcaaaataaccttccttgcctcttttccggttgaatgaatggataatctcctgcactatcacattgttgtcttgaatattccttcccagcacaaaagcggcttgagtggggcaaataagattaggcaataaaggcttaattctattagcaataatcttagaaatgaccttatacataacattacaaagagaaattggcctaaaatggttggttctttttggattttggacttttgggataagcacaatattcgtagcattgacacctttgtgcatttcgtcagtcctgaagaaatccaaaactgcttcacaaaagtcaccgcccaccgactcccaatagtgcttaaagaacaaaacagacataccatcaggactggggactttaagattgttcatggcaaagagagtgtttctgatctcctcatgagtaggagtcaagatgagcacctccttgtcctcacaagaaatgctctcatggatcaattgatgacaattaagcgcttggccaccaactgacccagagaaagtacctcggaaaaaatcaatgaattccttaccaattaagtcccgagaagtgatccaaatattgtctttgttcaagatactctcgatagcatttctccttcctctaatagttgctaataagaaaaagaacttagaacacttgaccccctccttaatccaggaaatcatagccattttgccctccaatatagagttttcctttccatttgcctcatttaagggattttccggatgctacattcagttttccaatctcggtcacccgcaggtaagctttgaatctggttcagtctttcttccagccctttgatacttgtgtccaacttaccaaattgggacctagttacacaaggccactcgagtggccccaatctttttgaagaccctagcaggggcccatgggtgagaaacagagctccaggcatgggcaactactagcttacttctgtcatccagcgtccaaccttcttcaaacttagaacatcttttgaacttggtatccagaccaccagtgaaaaagacatagaggtttgtgatctgagttacttgtctgataagagcaaataatagctttcgggaataaattgagccacgctacattagctaagcctttatccagagcaaactcaatatgtttcataccagaccggtgattgtcccatgtcatcatgtctccctgaataggcatattaatgagaccccgtgaatccaccagatcagagatgaaagggatgaactggtccctaccagtggccccttcccgctccgattctttgagaacaaaattagtatcacccataattaaccaaggcccaccaaacctatccccaaccttcattaactcagtccaaaataccttctttgcatggaaatagggagggccatacacacaagagagtaaccaagggttggacgggggttttaataaacaagcccagtgatatgattttgggtacaagaaatgcactcaaaactaaaactatttttccaagccaagataataccattggcgaccccaatacccggaacataaatatgaaagtaaaaatgaagggattttaggatacgtaccagtggagcagcatccactttcaactcagacagaaaaacaaaatccagggaacgcgatcttaccagggacttcagctcgagaactatagaggtctgctctaaccctctacagttccaaacaacacctctcatggctcctgtggaggagatatgacattctcctccatagggatatgacagtgagtagacacactagagccagaatcttcaagaacaatgtcacctcctaaggccctaatctcataaacaaccatctctctaaaaatttttggaatatttacacaggatactgctttttccataaaactttcttttttactgttatacgcatatattttcttttttactatataatttacatactgtatactgaattagtataaaaaactttctcttttatgttttttgtcacttgaagatgtgttttttttttttaaaaaaaaaataaaagttaatggaaaaattaattgtcagtgacatatgtataaaactaattatgaaattttttattgtatttaatataaaa

SEQ ID NO: 267867 - DNA, 629 bp, Cannabis indica
aataataagaaatatttttttagtgtaatttttggtgttgtggttggagtagaaataatttttgacaccaaatttggtgatagtgtaacaccaaatttggtgtctctttggagatgctctaacaaattaagtattgtgcaagtttctggatcttttacacttattgatattttttaggtatgctccagatttgtaactatagttacttggtatggtccttcacaattaggtctaagcacacttgttacactaacttttgtgttcaagaacactcttctaagtaccatatctcccataaaaaacttcaattctctcacttatttgttgaagtatcgaaccattttttgttgatgagctaataactttagattttctcaatctcttttttcttcaacttcattaagtgattgtgtcaggagggcatggttagtcttttggtcgtaagtcaatcttctatgggtggaggttctaattcaacagacagcattgcctcatagtcataggccatggcaaaaggtgtctgcccggttgctgttctttctgttattttgtacgaccaacgtacttctgatagttgcacggaccagttcccccgaccagttccccttggcctcttcaagccgcttttt

SEQ ID NO: 267868 - DNA, 628 bp, Cannabis indica
gcccggcccggttttaaatattaaaaaaaaaacctaaaccctaaaaaaaatgttatgagtttcaggagaagcatatctgttattcagtactactccaccatttatcccaggtctacaaatgttatgactgtgtattctcctatagaacagacctttaataccacaacccaaagaaacttcttgactgcaataccaatgaaagaaaaaaagaaagaaaaaacacccatgttacaaattcttaataaataaaaaataaacaaacaaataattgaagagaaagggctttaccagggaaacatgtgaggagtaatccgataggtaaagagagagaaagtgaagcttttcataagcacagcccagaaagaaacttaagtaaggtttttgcaagagttcatgggttcacgtcacctaagtcgaaattcaaggccaaagactctgtaatcaaatactcttaattattaaactcagttcatttctaagtttcctcacaaacaaaatgcacacacacatatatataagcatattatttcaaataagttttaacacttgtgaggcattttctcaaacacttgtgaggaattagggacttcctaataataataataataatttttagaaagaaaaaaaa

SEQ ID NO: 267869 - DNA, 791 bp, Cannabis indica
cggttgtcaatcattgtaatcagtggatcttttgtctatataaataagaccttctctgccaactgagttcagttgagcttttcacttttcatttcatcttcgtcctccattgtttcttttctttcctcaatcttgagtactgagtttcagtactcttacttaactagtaaacatcctgcgcttcgcggcggatgtataaaataatttaaattatatataaaaaataaattttgtattttaattaataataattacttactaaaattatattaaaattttatataactagtatataatacgatgtaatagtaatacggaatactaaatgaaccctaaatgataaaaaaaacaataaataaaaatgaaatagaaaatgagttgctattttgttctaaatggtaaattagttataatagtatttgaaaaaacgtgtaaaggattagaataaaaaaaattagtaagttaaagtggttacaagctgccacatacactgaatttaatgcacttaaaatgctaattaaatgatagaaatcaaaacaaaacactaattaaataagggaaaaattaataaaaactaattaaatttgaaaaatgaagggaatagagattagaagataaactcactataaactaccaaatgaaaaattttgtgtatattgtttttaaattggggtatgaatatttggttatatctttatatattaaaagtgcctatctaacggcaattcttgatttaacagaatatatttaaaaaatattctgttaaatttaacgattaggtttgatctacc

SEQ ID NO: 267870 - DNA, 2273 bp, Cannabis indica
gagcttgaaggtcctatacaataatttaggatgggagcgccctactcctttggagatagtctttttttactcagttaaggcagttcctggaaataagcatgttgcaggagcctttactgtctcgaaatccacacgaacgatctcaggattatagttaggttgccaaacaagatagagtttaaagaagacttcttctaggcgacatgcctctctccaataaataaaactgccttttggattataagtaagttctctttcttagaaacttaaccttgaaatatttcaatttgtattttgaggtcgcttattaaacttttatttgttcatagcggttcctcgaaaaccagttccttctcctgagatagccgagcgtcacaaaatcttgttgaatgtttcgttccggctgagattggcagacttcttatgcaatgaaattaatctaaggaatgttggccttcttgcctcagatgaatttacttgtgactacaaagtacccaagtattctttgtggcaaaaggtcccagtcccagtcgacgaagaaagcatggactacgttgctcgaacacactatctctagagaaccgcccctcgagaagaaggagcatcacgaggtaatcaatgtgggtggtcacccgcagtgcttagggctaaacttttcaccctagtatctttccgagatagtcgatacaattttttacacttggaatccctttctcatagattgcataacacataggtttgatagttggtacccagaattggacgttcagattagttgtatatgttcatactatgggattgtggagcaagtatgggactatgttggatagatcaggtcatatagattcaatgtgggatttagatccactaaacccttatgacatttatgatcacaagatctagggattttagtggatattatagtcctcccttttgatcttcttaaaattacggtaactttctcaagtgggagtttgttctctactttcacttatttattttgcttaagtgctaatgtatttccctcaccttgcagatatggagctggatttggagaacatgttcaagagttccctcagtcgacaagaagtctaagaagagagttgcccaagctggtgaggcctcgtgttcttctaaagagcccaaaaggaccaaaaccacagccaacaagaagaaatcatcaggctagctcaccatcgagctagccaagtctctagagaaggaggttccagctgcaacgaatgccaatgaaaaatcgactgggctagtgcaccaagtgaagttctacggttctcgtccagagatggttctcctcgagccctcctgtcccctaccccttgaagctaggactgaaggctcgcaactctacatgctacatgctaccaatggttggcgtaacttcataactcttgggactggcgactgggagcttctcactcgaggcaactttgaggatcttgccaaaaggagttacgaacttttgcatcaggttaatttccctttctccttgttctcacttttcctcattttatcatatttaccaattttgtttttcttccttctcgcaggcatcccttctctcctttgctactcatcgtaggtcatctcagcgagcatagagacactttagtcaaaaaaaaatggaatgactccgaggccaaggtttctcacataaaggaagaggtagaaaagcagcgtctggccaaacaaaagaagattaaggagcttaaggattctctcaagtccctcaagccttaccatgacaaaaaactcaaagagatggaggctgaaaccaaagacagggtcaacaacatcgctaggagaaccatctattaaacctggtcggccaaccctgatatggacttcaacttttttgggtgaaggagccaatgccatgcttgtcctatgcgagaaaacaaggagagaagaacttggcgaggatgaagcggttgaggtggaacaagaagatctttctaaatctcctacaatagcaatatcaatggtttgcccattgtggcactttttgtaaagacaaatttgcattgttggatggccaactttactttacttttattttattttttatttattgtctcgcatctttacatttaaacttaatatatttgcttgtttgcatttttattcacaactttaataattatactttgatcaaatttaaaatactttaagtaagcatttccacagatcttgttttcctattgatattgcttaagtagttaataatctactatgtacgtgagcaattatcgtct

SEQ ID NO: 267871 - DNA, 565 bp, Cannabis indica
gtaacacatatgttgtatttgtacttgtagtcttgaaaatgctggaatatatccacccaaccagccacaacaaatctacaatataattagaatagtggtataatataaaatgtatttgtaaaatattttattttaattgaaagattataacatagcatattaatatctttcaaaataataattatgtataatttttatgcaattgatcttcatgtatattaaaaatttattttcttaaataaaataagcacatccggtgggcatggcaattaaaatggttaacacggacatggagggaaacacttcaatccctgtcaactttcttgcccaccccatgtgcgttatgggaaatttttaattaattagtgttgtgctcatgaattttaaaagatgattattatgtcagattaattgttaacaaaagataaaatttaattggtatgagccttacgtgctctattaaaaaaaaggaaaactctatatgcataatttttatgtttttttaataattcaaactccaaatgagacaatttaagctattttagaaaatatttgccaatactta

SEQ ID NO: 267872 - DNA, 2234 bp, Cannabis indica
cgatctgcaaacaagctggctcatgttttagccaatattcttgtttctctccaggtcgtgtgcttcaattggagaattgttcaaacgaagtgtgttctattgttattaacgattgcgagttaataaagttgctaagtttattacaaaaaaaaatcagagcatggtggttattttgttttttttttttggggttcttacaagaataccaatcttttttgttatttttactgtcatatttttcattttatatttttattgtactaagtttttaaaaatgttgtattaaagtttcaaaattacaaaaagattatgtttcagtaaaacttaaaaaaaaattatagaacaccttaacaacaacatgaaaacaactataaaacaacaaaaagacagctacaaagcaatagaagaaaaaaaaaagcaaagaaatacaatatgcaaaataatatcaactccttagcatatttttgtattaagaattttttttaattagttttcacaacttgatttatctttttgtactgctatattatttttttctatgaaatttgctgttacaatttcatactttcatctcttttctttctcttcctttttgggttaatgataattaaaatgacaattcattttttggaagttaactaaaaagttacattaataatagaaataataaaatcttatgatttcaaaataatatatatataatataatggataatatacaatttaaataacaaaaaaaattaactagataacaatattttagtctgttatacttatttttcggaatagttgatagaaaaatcgaattgaatgccatgtggcataaataataaattctcgcaatacatacattgtgggacatgttgaagaaaaactcaggactcaacatgtgaggtgatctcatctaaataaggatcataaagttcatgaagtgaggtatttcaacattgtcgggatgtcatttcgataagcattcaacatcttgcaacaaggactctgtagctggtcgaaatataaggatcttgtagctgcttgtaatacaaagatcttgtagctgctcataatacaaagatcttgcatctcctcgttacacagtcagcaatgcattgcctcgtatttcacaccagcaatgcatgtcgttgtaatacatagtcagcaatgaattgccttgtattacacaacaaaaatgtgcatctcctcgtaatactcaattagtgatgaatcacctcgtattacactgccatgatgaatcacctcgtaatactcagttagtgataaatcacctcgtaatacatagcagtgataaatcacctcgtaatacacagtcagtgataaatcacctcgtaatacacagcagtgatgaatcacctcgaaatacacagtcagtgatgaatcacctcgtaatacacaacagtgatgaatcacctcgcaatacacatttagtgataaatcacatcgtaatacacagtgagtgataaatcacctcgtaatacacagtagtgacgaatcacctcataatacatagctagtgatgaatcacctcgtaatacacagtagtgataaatcacctcgtaatacacaacaatgatgaattacctcacaatacacaatcagtgatgaattatctcgtaatacacagtcagtgataaatcacctcgtaatacacagtagtgatggacacctcgtaatacacatgcagtaatgcgttgtctcgtattacaaagtagtaatgcacatgctcacaaataacatggtctgaccaagtcaaataccacttcaaagaccacttctttgtattttaaatataacatagttatatatacttatctaaatgggtcaatatggtgattcatgttcaattatacgtgaaacgtgggcattaaccacccatcaattataactttttactaagataatattgagtaaccactatcctactcctataaatagggattcacaagggaagggggcaattctgttttacaaaaattatgccaaattgtaaacacaatcaaaactcaaaaataatattgactcgtggagtatatagattttgttgagttttgtgtccctaaataaaaccatatttcaatgtaatcttgaatattcatttatcactaaagaaacagatgtatttcattacttgtttaatgggtcatttggttcatgtgattatttatttgatttataaattcatccaaatccttatcacatttatattctagatattgtgtt

SEQ ID NO: 267873 - DNA, 1162 bp, Cannabis indica
atccgtttttgcacatatgggcacaaaatcggttgcctatttttatattaaaagaaagttatttatactttaaaaccaaaattatgcgggatcaaaaaaataaatatattatttagaaaataatttttttattagctccatctaaaattatctttttactttgcgctctctaatattgccttgagttagtctcaattattttttttttgtttaaaataaaataacgagagaaaacttttattcaaaacaacaaaaacaaaacaaataatatgaacacactcctcgaaatattctccttctatattgtcttagggtattattaaccacaaataattgaagctctccctttttttttttttttggatgggctctctctttttctacgtttctcaattatttcaaagcaaacttccagcaaaacattatttcaaagcaaacaaaattatatgggtaagcgctacattttttttttaagaaatgcaaaatttattcagataaacctgctattacagaagaatttaaaaatcgaggacaagcatatgtcgaaacacaatctccagtgtatgagcaacaccattcgctaatcgcggaatgatactacaagaactacaaccaacaacaactaatacagaataagtatattataaaacacacttaaaagtaaaattaatgtaaaacttattaatccaaccagttaccacagtaaaatcactgaatgagcgctacattacaactattcccatttgtggaaaaaaaaatcatcaatttcccaccaagtattgtatttgtaaagaccgtcctatttttttttttttgatttaatcagctcagtatagttttcactcatctcaatcaacttttacaattgttccaacccaaaaccaaaactatataattacaagatgctaaagagcatcaaaccatttcctatcctcctttataatccttttacaagagacttttgtaatcctatttgtaatattgaatttcacaatttgtacaaaaatctctattctttgtattttttgatttcaaaaactatcatttctaattttccaaatctggtacactaaagtagcaaccgttgcacttagtacatgttttttgaacttggacatgcttgctcaagatatccaccgcagcatagcagggagcagtttat

SEQ ID NO: 267874 - DNA, 701 bp, Cannabis indica
aaattttaaatgtataaataaatgaattaaaataaagcaacgagaaaaacaaaacctaatttactccttctcccagtctaaagaaaaaccctaatttccctaaaaaaaaacttccttttctcttttcttctccttgtctctcgtctgcttcgaccatggtcgtcgtcaatagtttcttatacctcttgctcctctcactcacccatgccacccccagcaaaacccatatgaccaccttctctttcccttgttcatcctctcttgcacgactccaaagaaacccagatgaccagacaaccattcctctgcacgaacccagaaggctactgctctctgtcccattctcacatgaactccgactgatctctctctctatatatatataaatatatatatatatatgtcacgaaggaactaagaggtcccaaaaccaccaagaggcgaattacgccttcaaatgttgtcttcttggaggattcaagtatacagcgtccctgaagatttgggtaggtatgttggacgatttggggtcttccttcctctctcatgtttagagatagaaatgtataccgcgggcagtggcgaacccaagatttaaagtgagggggtgcaatttttttttggaaggcatgggcaaaaggggcaaaagtaaaataacactctttatgggaattgaaacattaacctctaccctacatgta

SEQ ID NO: 267875 - DNA, 793 bp, Cannabis indica
ctgtcctcagattctgaaacttaaagaaaagcaaaccagaagaagggtttgcccggggattggaggaaaggcgggaaacggcgtcgttgagctttctgggtcgagctgtaaggagagtgttgatcactctcccaagggtcaccgaaaccattgttgaagcttcttctgcgttcgatttccataagaaaccttctccttcttccattgaaaccaatccttaattggggctatgaggaattgggtttccacagtcagtgaaattctgaaactgtttcgtactggaagaagctaagcaaagtagttttcacttttcggtctaataaatcatttcatttccttctctctttgaattttcttgaactttatacatatttgcgacaagtttactaaatctttaaaattacaataacaccctccaaaattaccatttgataattatatatgccaattaacttaaaaatcaattacttatcaaaaaaaaacttataaatcaatttgttgaaaaccggaaatttaactaattatgcatttatttgactaattatgtatttctgaactaattttttttttctaaaccaaactatttaatattagtagaatatgttattttttcttaaaatatcattctaccctctcatttaaccagccatctctccctctctctttcccccttctctctctccctctctgtaaacatgcatacagaggagcacacaatcaacctataatacttgttcctttctctccacgaccaccatgaccggccctatgttaatttgggccttagacaaaa

SEQ ID NO: 267876 - DNA, 1917 bp, Cannabis indica
atttcgtctcatctgtagtgcgaatgttgtagttggatctaggactggattcaatgtatctccttcactctgtagttgtttctttctctgatacctttcccatcttagttcatatccttaactttaactttttgttcaagaggttcccgcgcggacagcgctagctgttgaaaattagctaaacaaattcttattaagactttgaattctttataccaagttctatctagtcgaattatattctcatttggtttataaaattttcctctcaattctctcgattgggtatgagttgtcagctctctgaattcaagtatgaatttgagggtgtattataagaatttcagctagtttggtgtgatcaagaattcatcgtctcccttttttaaataatagggtcttctatttataggtggaaggaatgctcgattcattcttctttcctattttgatttgctcacgtgcgcttattttcatctactgctcattgcaccttctcttcctttctaagctttgctccacatttcttcttatgtagagctctgctcttccacctcgagtttcctgctctattttcttttaatgaaaggacgtgtttctctttatgaactatgatactataagatcagctttttcttcttaaatttattttctaaaattatttattgaccattaggattatttttattctttatatatatgaaacatttttcaatgtatagtacctattaatccttattaaataaatttaactataaatattaattttaaaaatattaaaccataagattttaatctattgaagaagaagaaaagagaaatttatttttatatgcttaatttgactaattaattaaaaaatatataaaaaatatctttttttatactataacaaaaatatatttatatacaatatatttaagtcaaacttaattattttttttatttttttttctaagaaaaaaatttttttttctgccaataaaacaagttcaaccaatataatataaaaatgaaatatttttctatttaaataaaaaaaattaaacataaaaacttaaattttctttataccacttgcttgtaataatcatggagagtcttatataatatgctgacagggttaaatagtaagagattgatcgtaagtcgtaattagataatagaccaatattatttagtgaaaaatgtaaagatgattattagattactacctaatcagatgaaattaaatgaaatataggtatttagaaatgttgtttttgtcggtgggttatgacacaatacacatgccatttagcagagctatctagttgggtttggcctgaagacaatattgaaataaataatgagtacgtttttcagaattgaataatgaagtgcacggtgtagaggacggtccaatatggtttactacctccttcaggacacgtacctttgtccttaataagtcctatcctaataaataatatataattcacaataattgtggccctctcttatactcctttactagacacaacaattatatacagcaaaatgtatttagctaattctagtgggtctacttcttaattatcaataaaagtgactttattagccaaattcaaacagaaataccaacacccaaccaatatggtaaaacccaagtataaatatgtgttagtaggatgtcctaatcaagtcttaatgtcctatatttaatatactctttgttatttttagaaaaataaataaagagtatgttaagtgcataaatacatttaatatactcttatttcatcaacaatatatacactagtaaaaagttaagtgcgaagcacacgtatactaagttttatgctaggtattttttactttatttaaaaataatacaataaataattgaaaaaaaaaatattattaattattgtttga

SEQ ID NO: 267877 - DNA, 982 bp, Cannabis indica
taatattttggttttatttgtagctactattttctcttttattaaaatataagttttatggtcacactcatttagtcagtcccaaattctaataggatcaattctaaatgcaatttattttcattctttgattatctatttgtgaaattattagaatttgagataagataaatgtggtcccattttaaaattaattggcaataagaggagcagcccactcttattatatattctattattatttttatacattagcaatgtgtgactctctaacatccccaagatgatagctattttatatactcatcatcttaaatcataagtggcttttttttagctcactatcgctgatcacaagtaactttttgctctactttttagatgagtatttttagatttttggtggctctttttttttcgctcactatccccgaattataaatggcattttttgacttttggctcttggatcagtttttttggatttttggtgactttttttttttggctctacttcgatcggggttctttttggggttagatagtcgctagagatttttttttggggttagatagtcgctagagattttttttttgctctgataccatgttagaatttgggataaggtgaatgacgttccatctcaaaaccaattgacaagaggaggagtagcaaaattacattacatgtttacattaaggggtattggcggctgttgacccaggttttcggcaactaataaaataataataacttagagagctgtaagaaattaggagagagattttttacgtggttggggcgttaatgaaccttagttcacgagtctgtgtatttatgatagtatttaatacagagaatgttcttggtgagtttttactcttgtagttcttatgaaacccagaattctcgacccctctttaatgagctttgggggtatttatagtatttttgtggggtgatccctagaattaaggtaca

SEQ ID NO: 267878 - DNA, 504 bp, Cannabis indica
ctgggtcctcgtccaggttcaggttcaagttcaggtctcaggtctcgatccttgtccaggtctcagtctaggatctagtcttaggttggggttcgggtttgcattcggtttcggtcctaggtttgggtcctaatccaagttccggctctaattttaggttcaggctcaggtccgggtccaggtctgggtgtgggtcttggttcgggtccagatccgggttcgggtcctgggtcctagtcttggtcaaggtctgggttcatcaggtcccgagtctggatttgggtctcgagtctacgtctggatccaggtctgggtatcatctaggtccagatccgggtcccaagtctgggtttgggtcttgttccagttctaggacccgtatttcgatcccgatttgggtatgggtctaggttcgtgtttgggtctgggttcggttctaggtcaaggcacggatcctgatcgtggtccaggcctgggtttgggtctacaatcaggtcccgagtt

SEQ ID NO: 267879 - DNA, 1913 bp, Cannabis indica
ggctccatgtggatcttgtaagtctccatgcttttcttatttgtgtttactgtgcaaccatgagatcttaaaggatggaaggctgctcgacaccaggactgaccctgaagaaataggggcccaagatgataaaaaattttgggccccttaataaatatataaatatatttaaataaaaaaaataatctaaaaaaattatatgctacatatcataacataaagaaaataaaataaatatacataaatctgaaataagttataaagtattcttaatgaatttctattttttttttaattagctgtatcattcatgataaaatttttatcttgctaaaatttcaataatacaataaatcaaattcttaaaaacaaaaaacaatcaagtctaaatttacctgtagtgaataatttttaacaaataaattaaataagatatataaaaaagaaataaattaaaatcaaatcaaataatatacaagaaaaaatttatttattattattattattgaaattaaatattatatcttgattaataattttttttttctctacaagaaaagaaagaaaaataataaaaaaaaaataagaacgaattttttcttagtagacaaaaaaggagaatgaacttatgaaatgttaggacttagaaaaaaaatatttaaataatatttatgcatttaaatctaataaaatctaatcttttactaggttgccactatgctaggccaagtttgggtgtattaattgttaatttaaattaaatatagcatttaaataagggaaacttacaaaaaatactggaatttaagttagcttttacaaaaatactgtcacacggaatttttttcaaaaatactgtgtttttataaaacaccagtaaaacacaaaacataacaactcaaaacaacagtagaacaactaaaaaacacaagtgaaaacttaacaaagtataacgcagtataaaacttataaaaaaaacacagtaaaaaagtaaaaaataagtattttgtaagaaaaatggcaaaagttagtatatcatgtaaatttttctttaaataatgatatattaaaaaatttttaatgggtcctacgcatgggtctagctcgcctatgcttagggctagacctgcacgaaactaacttaaccggttagtgctaacttgtctctaatgtgtttttttgcttttttttgccaatttagaggtgccacaccaagttaactaaaattaagataacatgtacatcaagtgattttcctatattataaaaatttcatatttttatatattattatattaattttaatttatattaaaatattatatatttatatgcatgcaaaatttaatagcatgtataatttgaaataaaatataatataaactacaatactatatgggatataatttgtaacgaacgaaccccctcaaatctttatttttaggatttgttgtggaacattgtgccaactgtaaaaatatataaaaaagataatgaaattatgataataaaaattaaataattaaagcaatgataaaattctttaaacgcccttttgcacacactgattctgacccttgcctttttatttgggattttattaagactaaacgaggaaagcttgcttcttcatctatctaaacataaataaaaaaatctcaacattttcaacaaaaaccaaaataaagaaaaaaaaaaacaaaaaataaagcatcacgctgaccaatcaacatgctcctaactcatcaatataaaaataataaattaaataaaaatgaaaaatttgaggtggcgtttggttggaggtaatgaaatggaatggaatggaaaggaaacaattttcattccattcttttgtttggttgcattttaaagtattagaatggcattccaatggaatgctctttccacca

SEQ ID NO: 267880 - DNA, 695 bp, Cannabis indica
cttcagttttggatcttgacactatatgtttttttttttactttgctaggtgatcaaattggagcctagaaagactacaaaaccagatgtacttctcttgtcatcaatgtttgcagcccaacctgcattacagaaagctttaagatcaagtgatgcagattgttttaggtgcaagccatgattctgtgtaccacactaacatatctcaagatgcgtttgattgcctgctaatgactttaaagtgaattatgcatgaattgacacactttatttacattgaaagcaatttttggtcttgtaattgtcacctactatggatctgtaattgtcacctactattgatcaattggatcactatcatatgcatagagtctttggacacttgtcattggagtagaattgacttttgcttcttgcatttttgccttgcatagaagatctttgatatattttgtctgagtaacgagcatgccttgatcagtatacaaaacttatatgcctagaaagtagtccaaaacacccaagtctttaagggaaaattcttgatgcagcttagatataagagaggtaatgacactttgatcactttcagtgattaaaatgtcatcaacatatacaaaaataatgataatggatggtggtgtatggtgaataaatatggaatggtctgtcttagatgagacgaaaaccaaact

SEQ ID NO: 267881 - DNA, 456 bp, Cannabis indica
tgactaaaaaattgtctctaaatataatcttttttgtagtgaatatttacccaacaaattactcaataatctaacacatagttatagctcatattaaaatattatcttaaatattgtgttaaattagtattttatctatttttttttttgtgtgtgttaaatgtaagtacactttatttgaagcaactagacgtggaatcttgcaatcccccctagaatcacggtgatactactctacttttaaaagcatatatttgctacgttagggccttctgcaccacacattaatatgtacacacacaaacgtgtttctgcatgaaatatcaaactatcaaagcaagtgttggtttctcctataaatacagtagtggccattatatcaaacgaatataaacgaagaaaagaaataaaagagtttaattatttaccgaagtatatagagagagagagagagta

SEQ ID NO: 267882 - DNA, 608 bp, Cannabis indica
gtattaaatttatcaagataatcaatcgagttagttgcacttttgtattttaatgactcggggagtcttaagccctttggaagctaagtttgtcgcacctcctccgtgatgggtgacattccgtgtaatttgtaaataggctttatctgctgctcgatcattttcagagcttgcaggaggtttttttgatcaattcctccttgcaggattggaatgttgggtagcgcgacttggttaccaagaagtggggtggctactactgctatgttcgcaggtactaccacattgttgagtacagtaggtgcgagtggtggattggcggtatttgatgcgttgttcacgtttgtaggggtggtccaccaagggggataccttgatcagccaaacggggatcatggggttcctcctccacattgcaatttatcatagtctgggaatgagcaaggaatacttcattaaggcagtctcgtagattccctctatgcacgtgatatattcctccatcccttatccacacagaacctaacatggtataaatgttaggagtacgattattaaatctcggggataaaaactgagtctcgggatcatttatcttgggacgtggt

SEQ ID NO: 267883 - DNA, 539 bp, Cannabis indica
agagagactaaaatgttgatattgtcagttaatgatgtggcatgtttatgtttgtgttaaaagtatggaatggagatgctttcagttatataataataaaattattttattttatttaaaattagaaattttcaagtgctaatttttattatttttttttttcttgagaaaaacaaataaactttttggttttatattttgagtaacatacaagatatcagtgtaaataaataaataaataaatttaatcagtgatagtttaaacctttggttaggtactaaatagtaatggattggatcttcatatttattttaaacggtcacccaaatatggtatgctttgtactttgtgactttgtgagttgtaagtttcgtttcttaatatatatattttttttaccacttgtcaatatgatgctttttatgcatatatagaaatgtagttaaaacttgttaggtaaaattaatcaattaaatttatgagcgtttattatttttatttttatatatatcagttatatatatggtacaattaatga

SEQ ID NO: 267884 - DNA, 2115 bp, Cannabis indica
tattctaatctttagttaatttagtagggaaaatagtattgtatggcatatttggaaagaaaaaaagaaaaaaaagagcaaatacaaagcccaaaacaaataaaaacgtttgtatatgtaattcaaacaaaggcagaaaaatcaacccacaaaattttcaatcaacacgtggcgagtcctcagcccctctgccaggatagtacccaccagctgcaaatatgaaaaaatctgctaaatatgtcttaacaaaaattatttacacttacatttctttaacttcttattggctcaatttctttcctcatagcatgcggaaaaaataaggagtcccacaatagatttatcctataaatatatataagagaattaagacagtggcatagcgctctataactactccaaatacttttatctattcctctccttaattctctcatttttttttaaatttttaataaggtttataaatatagttttattaatttttctattttttaaattttttattaagtttattaattattctaattaattaaaaataaaaaatttaattaataaaaaaattatacatacgtaactattattattattattattattattattattattataaatatttactataattaaatatatatatatacatgtttaccgagtttttcgaaagccaaataattttagagcttaaaaaaataatgaaggtatgaataatgtaataacaagcaaaagattttatgtggttcaagcgttaagtatccttagtccacgggtttattttattaggctctttagccgaagattgtttatacaaatacaaaatgatagactttgctcctattcctccatgttcctcttgaagaagaagaagcttagtagaaatattatggagttaacattagggttacagactaatgtgttctttatgcaaagaaaaggtcttggatcttcaagtgagaattcgagggatgggtctggatcccttctcttgtgcactcgttggagtatttataggccgacttcatggcatgggccaccttagatagatcttcataggatgaactcccaccattggattggtagatgatatattttctatgtgatttttaccgatgtcagatcgtactggctaccccgacggggtcttagacgcgtgtcaccaggaccactctcatttgaatttcccttgtttcctagccattggattgctttgcacaatacataaggacacgcatgctttgtatggccatgtgttgtgggagacaaactctaatatcgtacatgggaaaaaggcatggtcagtgggccccgtagcctggcatgcgtgggctgaacttccgcgggtcgaaggcatatcccagattgatggtggaaggctcatacccctcacgagaccaaagggtcccgtcttctagaatggagaatgtcgttggctcgtgaacatatctttcgtggtctcttcccgagaagatttctctcgcagggacttgttctgtgagattaatgctattatctttccgaagcgcaaggcgaggcacttagggggcttaattactcctcgtcctcctttaattagtatccacgtgtagttccgacaaaaatgtagataacaatacctaattatatccctaaaatgtataattctaaatttaattattttgtaagtccctctctcttttcttctcctctcttgtgttcatttatatgattagtatatattgattcaagttttgattacacatatatttttagcaacaatgattaaatttacatatatataagtttatgtattgattagtgtttatattattctgttatctattataaacagagtataaaattacctattgcttgaaaagaaatgtaatgaccgcttaagtaatttggattagtaaaggcaattagcactaatttttattattttattattatttgtgaatttatttaataatggatcccaatatttagaaataaatattagagttataatttctcaattccggagattttattagactctaggggtattatttagtttatatgtggaatatactatttttgtaatttttgttcggcgacaacggaaaatgcgatggatggctagattgatcacat

SEQ ID NO: 267885 - DNA, 1026 bp, Cannabis indica
tgcctacatactttcttcgtgaaggatcaagccacttgtagttcataatatgttatttttggaatttgaaaataagaattccagtatatgaccgttttcaggaattcttttctctttgaaaatttaggaaaaattcctaagtatatgatctttatggaattttaaatttatgttttataccattttgcggtattgacgactgcacttagtcttagcaactaagttgcctacatatctcattttaggaatcaagtcaaacgtagttcaaaatcttcttgcatcatgtgattatgtaatttttagagatataaagttcattttggaagaaaactcattattaatctcacatgaataaatttagagattacttgaattacaattcaattttaaggagaattgtgaaataaaattcaaatttaatcaagactgtgtgtctttacaaaagtaatatttgaatcttatattttagaattggttccaataatatttgagaaaatactctctcataaaacgagtacatcattcctttttctacttcttacgcattaattttatatttataacctttgcagtaacttatttatataattgatatattatacaaataatgtttgaaatgtggcaacaaggtggtttgagtgccaaaacaatttatcaacactttatatatgtatacattaatacataatatattgtttcacatatacactttttgggaaggagtgttctagtccccacatatatttatatatagaacactttttaataaatattatctataaatagttactaaataaatttaactataaatattaattttataatatatataggagaaatctagtgtaagctcccttctttctacctcatgccataggggagttaaattgaccaatcagaattaaaaaaagaaattgtacacctcatattagtgtactcctttacacccaattttttctttaaaaaaaaataacaaaagtaaaactactttatcaaagacacatataaattacatggtgggctgat

SEQ ID NO: 267886 - DNA, 1540 bp, Cannabis indica
aattaatagattaattttaaattgtcaagttaattctcaattaatctaagtcagtttacattccttggtttcaaaaacaataaacacataaccacataggacaatcccaatagatcatatttctactattagatgcatgataatttaaattgtgtggaatttttatgtatgacatgttattcactaatgcatgagcatgttagtaatcaattattaatgaatattttgtttcaaaaaaattattaatgaatatttatttaaaagtaataaatacataatgatgatgaattggatattagttgggtatttctaatttttcaacctttgaaattagaaaaaaaaattataaaacctatctccactgctgcaagggtatttttgtaatttttaggatcgtcgtaagcctcaaaattaattaaaaaatttaattaattatagaaataaaattataaaacttatctccactgctgcaagggtatttttgtaattttttaggatcgtcgtaagcctcaaaattaattattcttaaataaaaattttatttaagacatctcttaaatcttccaaattaactaaaacaatttaattaatttattcttaaataaactatttatttaatacattttctaaacctataaattaattaaaacaattttaattaatttattcttataaactatttatttaagacaaccttataatccataaattaattaaattaatttattctcaaataaagtatttatttaagacaactttataacctataaattaattaaaataattttaattaatttattctcaaataaactcgttgtttgagacaactgtaatatcttataagttatgtcttaaaataataacatttattatttattttggattaaaataaattttgtcttaatttggttgtaggtttgagtttaaatttcaaacctaaaaccatttatatttatttaattcaaaaataaattttaaaaactaaatatccacaaaactttattattttaaattttaaattaattataaaaaataataattttattttattatttattattaaataattaattcaaattgataattatgatatttatttggatttgaaattcaaataaatattccaaaataatagttaattatttacattaaataattaaatgaatatacgcaatatatattgtatacaatataatatacatattatatatagtatatatatatacctaaaaatatatatatgggtgtcgggtttgggtcaaaagtggactggccaccatggccacaccgtggtcacaggccaccaaggagagtagtcgcatgtgggtcacgaaggacccaagacccaaatggatcacgtgcaccgtttacgtactaagtacgtgatatatgtatagagtatgtattcatcaaaataaaacctttccatgtacagtattgaatagagttgactcgggggaccatgaacttatattttgaaactctaataaacacttgattattatcgatctaatcagtagaataatccagtttattaatt

SEQ ID NO: 267887 - DNA, 1171 bp, Cannabis indica
tggcagaaataatagagctagtgattaaaaaaaacacagcagagagtcaattgaactggtttggagcattttgtaggatgaaataagagaacccaaacttgtggataaatggtatgtgtgggattgaaatttattaaaaaaaaatgcttatatgtttcgtccccaccacattgcttgtgagtgatttgtgggatttatattagagtgatagctatcatgggatttggtaattggataaatggtatgtttgtgatggaaatttatccaagaaaaaaacccaaacatcacagttgcccccaacccaaaaaataaataaaataaataaaaataactttctaaaagaacaaaggtcaaataacgaacaagttgaagtactttgttagataaacaagataacccaacatcacaaacattaccttgtatacaaataacatatcaaatgctgaactaattgaagcaatttgttgcgcaaactttagattcagcataaaaagcatataaaagaacgaattgggttttccattgagtggcgaaaaggaaaaaggaaaaggacctgaagagcttggagccaatgcttgttgtcgatatggtcggacaaggtttcagtaacggtgcaggcccaggccttggctttgttctggcggtccagcttcttcttaacattctttatgggcggattccttcgagccccaggaagagatgtctcagagaatccagggtactctcctttcttccagattctttttttggtaccagaagaagatgaagaagtggttctagaaggagcagcgaatgcagaacgaaccagtcccaaggtggtgggtttgttgagggtgttcttcttccactggttgggagttgaagtggttggagacggaagaagggaagaagagaaggatagatattttgaagccatgggtttatccactcttcaactcaagctcaactacataacaatgaatatgggattaaggttttggaacccatagaaacgacaatatcccaacactagcctttacgaaaacgacatcacaatagtatattagtagggaaatttggggtaccatggtagtaagggaaattttatttacattccaaaaatttctaaagacaccacattttaatatttttatttatttaaaattaataactttaattatactaattcttt

SEQ ID NO: 267888 - DNA, 1112 bp, Cannabis indica
ttattgaaaaagccaaagatcatagtaaagcacaccagtaaaagtttcaaattcagctttgtcaagcagagaaatatttccaagaaaagtcaaaggattaaacatccacttaacaacctttgcacctacatacagaaggaaatcttcaatttgaataccccatttgctggagaaccaaaggccaatagtgatagggaattgacagcaacagtatcactgtcagaattgccacaaagaaaatagtgtccaaccttattcccaaaaattcttcccaacctcgagccaaacgggaggcaatcttttattaatttccacaggaaaagcttcattctttcatgaatacccgacctccacaaagaggaacaaatctcatccattttaaaagtcctcttatacaagtcaaagtagccagccttgagagagaaacaaccatcagaacttgacatccacacagcgagtcaccactttgaacatcaacaagattacaagacataatattcttagcagtctctggacaaaaggatctcgcaatcagagcctcatcccaagaaaccccttcatcaaccaagagtttccccactttcaaatcagtggtgatgccatggttcaaatccttaggccccaaaagaatcccatcagaacacgaccaattacaataccagacctccaccttcgaatgccttctaaccagccaagcactattgtccataatgaattcacgagtttcctagatccttctagcaataggagaggcatgacgagggagagcacatctccaaaagctagaatcatgacaatatttatccaggggaagttggactcaaagagaattgtgtcttttatccatgagccatccaagttttgtcatcaagcagaaattaatgtcacgaaaactgcggatgccaaggcctccacaacctttaggcttgcagatagactcccaattcaacaaagaaagaaaccttccaccctccgtacttcctatctaccaaaaacgtctaaccagggcatccagaacatggtaatctttacaggtaaaaaaaaaaattacatggtgtaaatcacaatagaagagatggcattcttaataagaatagttctagttgcctgag

SEQ ID NO: 267889 - DNA, 2766 bp, Cannabis indica
ctaaatggcaataacacattaagatcttttagatgttttttttaaatgccataaagtaactcataagagacttatcttgtttctctgcacgataaaatgctttacaaatatcatatatgcgagatatgttgtctttgccaaaatacaaaaactccaaataatttattagttcttaaccaattcacaatgattaatcaaactaattacctcattatcgataaaattttgaattcgaaggaacaagtgagcatccttacagagccatattttccttgaattatcttttcctaatattttaattatatagaattgccgagtattttaacaaaagtgtatctaaaatctgtatcaaaggaaaaataaatcaattctaagccaaatcgatactctttgccaattgataacatcatatttataaaataaattaatcactttatacactacaatatgagagttgatgttaggtattattcataaattcaaactacccaaactttaaaaatacaaaaactcataaacaaaataataaaataaatatctataaaattatagtctccgtttaactaataataataatgattcacacacttttatgtagaagttatatatgtattatatttgaaatttttatcatgccaagaaaatagagatttttttttttgaagccataagtaatttgatgctactattaataataaattataaaataatataagtataaattaatatgcatataaaattcaattgttgctgctaaaaataatatttaatcacatatactaatcaaaatgacttgaggaagaaaaaatgattgggagcatgcgggaacgtatcagtcttccactagttttggagctacgaaactaactgggaagctcagtcctttcatgggaagggtccagtcgacgatctccgacgccgttattcttgcttctgcttcggttttctgtgattttctgggtggtattgcggttttctagggttgtattacgatttgctgcgatttactgggttacggtacgattagagttgcagttttttctgggttttattcgcagttctttctggggttttctgcgattctcgttgtgcacagggctggttgtctgcgattctccatggatttggagttggtgaatagactttctgaggtcttggttcttgatgagggtgatggccctgttctttccttgaacaaggatggtattgaggaaggtaagaagaagatggagttatgtttggtggggaaggtaatcggtcccaggccagccaacaaggaaggaatcgagaaggctatgaatggggtttggaagatccaccaccggtttcaggtggaagaattgagctccaagaatgtatttcggtttttctttggttgtagggaggatccgcagagggtatatggtggtggtccttggacaattgacaagcaattgatttgctttgtgaaaccaatggggctgggtgaaatttcaaagatgaactttgattttacatcattttggatatcgattaataacgtcccattagcttgtatgactgaactttttgcaagagaatggggggagaggattggaaagctagaagacatcaagatttttaatggtaccatgaaagtgagggtgtgcattaacattacggagcctcttaagcgtggcttacgtgtggcgattgatgatcaaggtaatgaggtttcacttctttttcaatatgaacatttacctgacttttgttttgattgtggaatcatcgggcatagggcattggattgtcctttgagggattttgctggggttaatcctaactttgaccgtgggaggtacggttcgtggatgtgtgctccgagttccccgccgcgtgatcggtttcggtactagaaaaagcgagagacttctccctctaacaggccgattatgactatgggggaagcttcaaagattgtttcggctgttgagagaaactgagttcgttactctggccctatgccaaaggagttggcccctacctctgttttagaggcccgagaacgtgatgaagaactggctttcaaagccgatttggaagaaaatgctctcgtgactgttggggttcaatcggaggtgatcgggtctgagatgggtgggcagaatgttgatcttatggtgtccgaagaggtgtccttgccttcttctgtgccttaggtgtgtatgccggtggtgggtagtgtggtgcccgatagtgattttgggaaggggcggttaggtaaggtgtcttcttcagaagggaatgttggttcaactagtggaaaggtggacatgcatggtgagggagagttgagtgacaaccgaaagttaagggtcactgaagatcgtaagggaaagggtgttcttgttcattcggatcaagatgagctctcgttctgccaagcactccaacaaacttttgaaccgattattcaagcacaaaaatcgaagacttggaagcgtctcaattctgcaaagggccgtggccctactggggtgtctaaggcgggtgcttttcccattagccctaagttgtctcatgtcattgttgcaaatgccaaatttaaggtgagtcctaaggttggtggaggtgggaaacggaagatggaattgggtgttaattctgcaagtgtgaaaaagggatgtttggatgagcaatctgacatggttcctgagcatgagaatattttattggcgagacctgcggagcaggctcgccaagagcaatgagtcttttttgttggaacgcccggggattggggaa

SEQ ID NO: 267890 - DNA, 1440 bp, Cannabis indica
gttttttttttttacttttagtttttactatatataacataaatgattaaatatataataatataaagttatatacttaattgttaattttaaagtcatatatattgtgttgtgctttggtggaatctaatatttttaatttatctttttaattttattgactttgactttgaaaccaaaaaaaaagtttggccggtttggcgggttaacccgaccaaactgcccaaaccgttggtcggtttatagatttttttttaaattgggcgggttgcacttaaattttagcaacccgaactttagattgggttagaaaatatataggataaaatgcccaaaccaaccgatgtacagccctagtttaaactatttttaggtttcaggtgtttttctaacaaatctgattaaattttgaattgggttgtgttggaatggcttgcattactactcctccaagtccaacaacaaccggtgcttttcattgatctctctttaatttgttagatttaagagtgtgtgttcccagttgaaaatcctatgcgtgaaaggatttgaaatggagttctaattaggctataaagctttctccataatttaagcactatttgaagatcgttctcacatgcacaatatatgtataaacattcagttttattagctatataggaggagaatgaagctcttatgtagagcttattaggaaaaattactcttaaaatttttgttctaaaaatttctcaaacatttgtggtgtttccttttattatcaaccagatgtttctcgacttgcaacatacatgtatttcctttacttgtttccatttgcctacattaatttctagtaatggtacactatttcaagtgatgcttacttgaaggaatgaatgtgtaacaccctgatttctcgagatgtcacagaagatagtccgtataaaacaatttaattagataaagacgataaagtacttctttattgaaaaatatctaagcatgagatctcactgtttaaaataaaaatatttttagtactgtaaacttaaataagaactagttaaatcaaaataacgcatccacaatgtttaacatttaaaataattaaaataaaatacagcgacaaccccctaacatgcagtccacgtctcgaactcttcaatctcactgcttagccttacccttacctgcacacaaagtacccatgagctatcgcccagtaagaagagctatgtagcacataaccctcctaactagatacttgacataagttactcttaatattaatcaacaataattcacattccataaaatatattcacaatgcatgttgttctcacatgcataaatcaagtctcataccacacattatactcacatacgataatcaactatacactcatgttgattagacatgaggtaacatcccctgccttgtgttattctcacact

SEQ ID NO: 267891 - DNA, 1307 bp, Cannabis indica
agttaattcggttaagacttactcgacttaattgactctttacaataatgagatctctaagttacgcccttggcatcgaagtctctccggacatgtatcacgcttcctggacggacgttaccaaattgataaagctcaatctggaaggacgtcttggataggcacaaagcctactagctagaacagattatttggaaccccttcttggaggaaacagctatagccttctaaaacccctttcaagataacagtcaactttccagttccacaagacttttttcagatggacaagctagccttccgaaacttcttttcggacggtgactaactttcttgaagactatttgagacatttttatttggagaaactatatataccataaattattatataaaaaaattaaaatcaaaattattcagatatcgaaaagagaaaatgaatgtgaaatgcaccatgggaatttataaataactttgtagaaagtgaaagagaaagcaaaggagagggagactgagcctttagccacttttcatagccgtttcttcatttcgatgtgttttcggatgtaaagtgattcttccttccttctatagtatatatatctccattccatgcaaaatacatataataatatcaatatacataattctatatgttatatgataattctaccgcaggaaccaattttttattttttatttatttatttagacttatatgtgtgtgagtgatgattctcagttcatctactaaaaaaggtgtattatatacttactatataaaatctgtgaaataaaaaattatttctacattatttttttgaaaaattatatgatatattgtttttttaacttttttttttttaaatttataatttggattgctccggtagtttttatgttacggatttgagttgcgatctaggatgttcgatccgttagttactataaaagtttttgcgtggaattccgtaaaaatacaaaaaaaaaattattttaaagtattaaaataacaaaattcctatttcttatttgtctcccttatatataaattaatttttttaatataattttcccatcatttttactaatatcttatgagttttgggttcaaactcataccttttttttattcacttcatattttagttttcaattgtttagagatattattacaatggaagataaaccaagatatatacaactcaattgtaaaaataaatacaaggacaataaaagagatttgatgaaatatatgtttacaatacatatatatacactataaattatatatatatatatatatg

SEQ ID NO: 267892 - DNA, 615 bp, Cannabis indica
ggctatagagataaagtggtcttccataatttaaatcaagatatataatattattttgatattgaaatataaaagtgtcggggtaatcctccaatatatatgaggagttttagacttgtttggtgtttaaaactaaaatgtgtatttttgagatatgcatgataccttaaaataaagtgtatgtaacttaaacatatttagtgtctaatgttaagtgtgtaatataaacatatttagggtctaaattagtggttagttttgatatgcttggtatcaaaaaattagtaaaaatttgagttgtgtgaaaattaatctttttttattaaattttcaaagcttaagtacttaagaagaaagttgtcaccttaaaaagtggacactatattttgctaacatgattcgcttggaatcaaaagtgtgtgattaacaaattgcctaatctttatacaagatgaaagcatgaattttcaagggatgggacataaactcccttagtgctttactcattgatggcaacctatcttaacactagtaaaaatctaatcttatgttcaataggtaataacaagtcaatagagtgaatgtgatgctcaattgtcccatctatggatgagt

SEQ ID NO: 267893 - DNA, 1500 bp, Cannabis indica
aagattctggtaaaattaattccaacagttacttcatgaagtgatatatttggcttgtctttttgtgcgattgcttgagtgttactgtttaatcatgttatcttgtgatgtagttatatgtttgttatatattttattatttacttttcttgttgggtctttgtgattcacgagtgctttgtagtgccagtaagggaaaaggaaaactagggcaaccatgagatgatagttttctcaagaaaatgtacatattaacttattggcttgtgtggtcgagttgtcaggagttattttgggctgtacctaatgtgtattttgatttagttttgtatatagctctttttgtaaaacttttgtaataggagatccccaaaacaaattttcagcaatgtcatcctgttcgttgctatagttttatcttagtgaagttttttactattatcacagatttgattaaatagttaatctaatattactaaattatgttccaaaaacacacacgtgacgtcgctagtaattagggtgttatagttagaatatgttttaagcttaatttattttagctagtgagttgttgtagagtgtttgttgttggtttgttgagagcttcaagtttgagttcatggaactcaagcttaagctctaatgaaaaatttgaattgtggatctaattgtagtttctgttggttaggatgtgttatatggatgacattgagctgttctgtgaagtttggtaggatttggttgagtttggaaaggttggagatgtttgaaactcagagttcttgcttccagcaaaaaacaacagactatttatgggaaagcgatattttgcctattgccacactatttattaatagggaaacttctggttatggatttaaaatctaaaacaggttagatcaagttttgatcaatttatcattgttgtgacatagggtcgagatcatctggcatttctccactcaggttggccagcatgcatgagtttggattaaaggtaagaaaagtataattttactacatagcatgtcctattgggatgcaattattattgtttataagatacaattattatcatttttataagacacagttattactgttatgtgagaaaaagtcatggctataaatggaaactatttttaggtttcttacatgttagttatctcattaggtaatgacaatgacatatggatgccgagataagtatcagggttatcttatgagacaacaacatttatgtttcaatgtcagattaggagttaattagggttgtcttactagacaatgaagaatttgattactttataaaataacaggtatgacttgttattatagacaagtatgacttgttatattagacaagtacttctgtattattaaatatttatatatttgtaaatatctgattgtgattatttgagtttgaattgatattatttgtcatctaatttgagatattatgttatttttttttactaagtctttgtgactcac

SEQ ID NO: 267894 - DNA, 601 bp, Cannabis indica
cagaactcctttctggaggaaggctagctttcccaaggacctttctcggaaggacaagaaagctttccaagagttgggtttcaaagttagccatgtgaataaagaatgccaaacaaaagagttgagcctcagtaatgtcatgatgggatccatggatgtgttcaagtagacacacgattttctctatatagaggagtttgcttgagaaagagcaagaattctaaggtagtggcggtgtttcatgtagggcctgtgctccaacgcattagagggcagtacactagttggtggaaagtggatatgtggtagggaaggcaaggtggtcctttgtttaaggggatgattgctagatgtgtaactaaagttccacattggctaaaaatgggaagatcatgggtatattataaggatgaataatatctctattggtataaaaaattttgggaaggtacccaaaagtaaattcgtaagggcttagacccaaaacgaacaatattataccaatgtgaaaattattgatggtgtccaatattctaaatttctaatggtgtgtcaactcccaattgacatagaaagtgtttttgtaatagtaataggggaa

SEQ ID NO: 267895 - DNA, 523 bp, Cannabis indica
catcacttttctaaaactcctaaccaaaaaacattaggcaggttgaaatttgtttgacattcaaataaaaagcgcaaaaattataaaaatcttataaaaaagtataccatttacgtacctttcatagagtttcatatccattcagcttcatttgcgcatgaagaaaaaattcaattgctattttgtgtctcatttatagaatgttttgaggacaaatgtcaaaaaaatctatgctggacatcaacatctccataaattttatgatgtacatatcacgatcatacctaaattttaataattaagattcatactattataataaataaaattgtaggactaaaataataagaaaatttacatgcaataggtatataattaaaactcacgtgttttcttaataaggagttttcagccactcataattgaaatcagtgatgtcgggtttgtagttcttcctctttttatggaatcccaagtattccaaaataaaaggaattaccctgcagtacactttaatacagtt

SEQ ID NO: 267896 - DNA, 854 bp, Cannabis indica
ttttcgatcgctttaatatataccttatagcatgctatacatataaatatatatatatataaatatatatctttatatataagtactgtgtttataaggtttgaggcttaggatttggccaaagtaaagctttttaagaattttgtgggtgatagggatcgatggccgtgtggaaattacaattttctttaatgtgctcatctatacagcgtttatttatttatttttatataaagtatataatatatgtgtataaattattaaattatatatgtattggtatgaaactaggaaagttttcccaaaaagaaaaaggcctgttttaagtatttcaagtatattaaaatatagtacaaatgtggctttgtacttgtacctgatctaattaataatactatatactacaatttaagtagaaggaaaagactgtaaaactatagtgaagtatttaacagtaaaagctgtgtattagtattttatattattttaagcaaaagtacttttattagctgtagataacttcacacgtgagaatcccagtacataagaaaatgtgttttttgatctgattttctttttttggtttgctttaccgttggttgagtgtttggtcaaaaattaaacctaggattgatcttgtcgattactaagtcgtcctgtagctcctaactaattataaattattattattattattattattattattattattattattattattatatttacattcagtatttatatttataagaacaagtttagcttacatttattaaaaataataccataaaattaatcaattaattattttttttaaaaaaatgaaatatctaaatttaatttattta

SEQ ID NO: 267897 - DNA, 1755 bp, Cannabis indica
aaagttaacccaaattccagtatttttgtaagtttcccaaattttatcctttaaccttttgacgaaactaccctccaagatatgctccggtactccatggactctggacgtcgatccctcccactggagccggtagtcacgaacggtggtcgtttgggtcccagacagaaattcctccgacaaggacccgaccggagctgctcggaacctatgcaacaataattgtttaagcatttctcaggagatgataggtctcctctggttctcccaccgaaactaggtgagtgcatctccattcaatccaacaatgtcagtttccaacttaagcggctcggtaagaccgaaaatgagaaaataatgctctgctatgtggatccatcctacgggattactgacagagaacagtggtaactccattcaaggtggatggaaattttgacctcgaaattgagcttggaaatatggatttggatggggcagtagctatggtggaaatgtagcttgaggaggtggagttggagggtattggatctctggttccgccgttgatgaggatgaggacctatccctgtgcacagcttgaggttgaaatttattgtttgcggtggctgtctcgaccagagccttacccacgacgaggaatcgagtcatttgggccatcaatagctccggtaattgttgaacctctactcgagtttcaaagttctctttacttagctttcacctctgcaatttccttcaagacttctgattgcagagcttccttgaactcatcgaattgctcaaacgtggcatccttcttaggtcctatgagtgaatcgatggtgctctgataccaagttgatagaactcacctgctcaaattcaacttaataactgtaacaatggagaaagaagaagatgaagatggatgaaaatggcagcagtgcctttgtattgaatacctagaatttcaagagactggttctctcccaaaaatgttaccaaataatcaaattcttcgcacccacaaatgactaacctcttggcttttattgtcacagacgcgtgcaagactaaacccttcacacactagcaaaaccctcaaaacaactcacttgccaaacttatcaaactttttaaagaacctggaccaaagctctacttctgtagagcaatgttgaatgattcaccattttaaacatttaacaccagtttggaggggtatctaattaaggttacacctaacaaagttctataatcaaatgctaaggtagagatataagctgggagtacaaatccatatttccattctctttcttaaggtttgaacttggaatagtgtttcccataattgacgattcgctttgtcaaactcattctagtttggaatttactttttaatcttttctttctcattagaggaataatcaagaacaaaatctcatatgcttgtccatcccgtccaacaatactttcaactatttttctctttcccatgagcttgtattttacttcactgcatattctcctggattacatctcggcaccaaaattgcaagtagaggaaaaaggaggtcaatgaacaaaataaatagcctaaatacctttaatcatgagcataaagtgtaaagaggaggaataaaagtaaattccatttctttttcttaatgcattcatacttcaatttgaaggttgcgaccatttggtgcttgcatgtttttcattgggaagaatattttcttcaaaacaattcttaggtataacatacattca

SEQ ID NO: 267898 - DNA, 1018 bp, Cannabis indica
ctattctaaacttaattaaacaataagaatttagataactctaagaatttcactatcttcaactaatattatcttaggcaaaataccaaattgccccatgcaaagactcttaataaatctttaaaacctagaggtagaatagtccaagccataatctcgaatactcctgacattctaaatgcctaactatcttactacactaattctaagatacctgatcgtacaaaaataactctatttgccaaatcatcgaattctactgttaccgggtataaattatgaaaattataaaattttaaatatcacatatatattacatttagaattcaaatatatctccgtaattgggaaattttttttttaaggtctatttctaccaataagctccaatttctattaagaagcatttaatcataatattaattaaatccttaattatcttctaattttcatgatttaactatacggtcattacaattatcccctagttaaaacaattttgtcctcaaaatcacatctagaatactccggacactgagtccccatggtgttttttagccttactaattctccaggtaccttgatcaatacaatgattttgtatgtctctcttatcaataatttcaacttatttatactcataatataggtttgacttaagttctagggttttataaaattttaggatatgtgttaagtttcttaacatacaacaaggaaactttttgtgtactgaaaatgttattcccatggctagatatgaaattattaatctaatttttcttgagaagctctaaaagtcataggaacctatggcataccttgcccttgtcaccaaagttttgcttacctttcactgataacatacatagaaagacatgtttccctgacttgggatttgggtgtctctaagcttcaaatctacatatcttttactgtttgttttgagaagcaagaaccttggacataatcttctcttaagccttgctaatctactaaactgactccagatctaggt

SEQ ID NO: 267899 - DNA, 1093 bp, Cannabis indica
gtaaccaacttaatcaaaacacaaatcaataacttgtggatcccattcagttgtgagtaatacaattggagaacaaatttaagaaatatcaagataaagaatataacaaactgcatgccaggatatgattcaaatgaagaatctgaaccattccaccctgacatcctaaactcacattttcctcaaggatttaaaaatatgcatgtctcgcaatatgacaaaaccactacacttgttgcccacttaaataattttaacaccataatgcgagtaagcaacgtttcaaataacttgtgatgcatattatttctaacttcattgacaggagctgcaagtagttgatttgacaaattctccaaccatttcataacttcttgggagcaattgtcgaaggatttcaaaaagcaatttcatgctgcgagagattgtcaaccatatgcatcctcattaacaaacatcaagcaacaaccaaaagattcccttaaagcgtacttgagtcgtttaagtacagttgcagctaaagttagaaatttgaatgatagcattcaattaacagcccttcaggttagaattataaatgatttatccactgcagggggataattatgggatgatttgcaagggcatcctgtaagaaatatcaatgaatttaatgaaagaggatagaggcttgtgcgaaaagaagaagcacggaatggaatgaagctgttaaagtcaagctcgagagataaactcagcactagcacaacaacagcgagcaccgtgactacaaaggtagaaaatcccaatggatcgaatgctaggagaaaggataagtcaagagactcatccaagaataagaagaaacaaaagaagcatgagaagtatgtacctatttatttagtgtatactgaattaaatgagactcgcaaaaacatttaccttgccaataaaaattgggtcacatttcgcagactaaaattgatgaggcatgcaaagaataagcgagatttaactaagtattaccgtttccacaaagatattgggcatacaaccgaggaatgtcgtcaattaaaagatgaaattgaaaatctaattttgcaagagtatttta

SEQ ID NO: 267900 - DNA, 1740 bp, Cannabis indica
tggtaaaatataatccaacatttactgagcaaatctttatgttatgtgaattgcttgcgaaatgatcaaggaaaaattaataacaaataataatcaaatatttatttatcatccaaataaatgagtgattgactgtcaacaatgcttacatgactgcttgagatatgctataatacttttgtagtattattccatcacactgctcgtgaacaacataggttgattgagtcaaacccctcctttttatatttgaatatagagagttattgtatttatccaacatgtatattcaattgactgtaaacgtggatatttatcccaaacgattgtaacttcccattaagattaacgagtaatcactatcttattcttataaataggggtttactaaatgggaaagaggactttattaggatatcataattctgttactgttagttaggcattctgttagttaggaatgattccctacttgttagtttttaacaataatcttgttacacctcttgtataaatactctgtttttcttttcaattaataataataagaattcattacattaatatggtatcagacgaaatttactctctctgattctctgcaatttcttcttccattgtcttctatggcgagaactcgagctactggttcacgaagctccggccaaactccattgccgcacaattcttccaacattccagatgctccacccaatcctccaatcattcctccagtttcaaacattactggagacaataatacacaacaaccaattgttcaaagtcgacccgttcacgaagacatttcaagtccctatttcttgaactccggcgatcttcctggtctcactctggtttctcctcctctttcagacaagaacttccagccatggcgttgcaagtttgaattgtcggttggtgctcgaaacaagactgggtttctcaaaggtactctgccttcaccaccgatcgacgatcccctgcacaaccactggcagtggtgcaaccacatggtcatgtcctggatcctacacttcgtttcccctgatatcaagagcagcatcatgttcatggacacagctgcagaaatgtggaaggagctcaactgacgatatgaccaaggcaatggaccccgtatattcgagcttagagaagctttgattactctccaccaaggtgatgacactgtaagttcatactttactaaactaaaatgtatgatgggatgaaatacaagaaattcgtccaagaatcccttgtacttgtgctacttctatcgataatcttgcgttcttgaatcaagaacaagtccttcaattcctaacaggtttgaatgagtcttttttccctgttagagcacaaattctcctcatagagccttttccctccctgtctaaagtcttctccatggttatccatgaagaacgacaaggaaactcaaaaacccccaaattcccccactcattgctattgtcaaggacccatctacctcagctgttgcacaaactccatctgcatcagctgctgctgcaaaccaagagccaacaaacgcagaccctattgtaccaattgccataaaccagggcaccgcaaagaaaaatgttttttcttgattggattcccacctggctatggtgataagaagaaaactgacaacactcaaccctcggccaatcaaacatctgcatcaacagatcctctttctctattggccaacatcaccaaacaagaagacattca

SEQ ID NO: 267901 - DNA, 1078 bp, Cannabis indica
caaacatcaccgtactgtcaatacgattctcggaaaaagagtcaaccgaaacttcatcttggttcttccataaaagagctaaacccccacttcttctaatggcttcaactacaaagcacccttcaaagtctaacactctactaacttgctccaccttttattttttacacaacgtttcacataaaaacacaactttgggccgcttctgagtaaccagattttttaggaactgaatatttcgtgttggcccaagcccacgacagttccaactcaagagtttcataatgattggcgagccccattgccaaggcccgccaaagataagttttttgaaatatttcccattgttttttccacatcagcattccctcctttatgctcattttccaccttgcgtttcttactatcattgagcataggattatcatgataagtaatgacatcactttccttattttgaacattttctctcccttgatttcctcttacaacagaccggctatcttcattaaatccccccaaattagcataattattaccttgaactgctgcctcattcacggccgaattaggtgctgaaaaatcttcagcattgactgatgaggattctccattcccagctgccggagctgccatcgccactgtcggggtccatcctttggttcgaagccaccgtaagccaacattcttgtggtttcgtggaggtaaagctttcatgaatttgccatacggttttgctatatgatcaatcggctgatgaaacaatttaggacagtatttgtctgaatgtcctattatgccacagataaaacagaaagtaggagtcctctcgtatttaaaatttatccaaaaccaagtcccatcatcctttgtgatcttcaaacgcctgcgtaatggtttttcaatattgagagtgatcctcatcctaagataatccctccatactccaataaaattcttaggatcagattccaagtatttccccattgtattcccaacttttcggagagtagtttcggtcatgaaacctggttccacattgtgtaattgaacccaaatatccaaagtattcaaaggt

SEQ ID NO: 267902 - DNA, 1789 bp, Cannabis indica
tattacactaataatgtgtgatcaacacaagagttacaaatgacaacaaattgtactcctctccaagttacaacatgtaggttacaaaagtgtaggttataaaatcataggttacatatttatttaccatacacttaatatatattattcacataataatatatattaccacattaattttaatctactcttattatattataaaataatataacatattacatattaacatttttcactatttgaaatttatatgataattaatcttttaataaaaaaataacaatatctctaaataaaattaaacaaaacagcatgcattttatatttctattatacttatagctaatacatgttattgcttataatatatatacaatacattgttgccatatattaactaataatatatatatatagatatattgagtgataatacactacaaaaaagatgagattcccatcagaattatatattaaaaatcaacaaagaccagatcagcatgcatggtactagctatattcatttaatatcatatgtcaatttattaacaacatgtactagctctttataaaattaattttaactggtaaaaaaataattatctaccactactagctagtctactacatctacagccgtacagccagtagaaaagtttgactatatattctgtaatttatatttttagtatatttaaaaatataatattaaataaactgtagttatatatattagttaggttatgatcagtcagtgatccatgcatgcatgcatgcatgcatatatatcgtacgtctaatgtattatcatcgatctgaaattaattattactgaactatatattactgtactatatagtataattaataatttacattaatatatatttaaagagaaatgttaaaaaaattagtatagtactgtctatcagcacgttgaacgtgtcatattcctagttaattagcattactatacaattaaatatcggatcgtataattataaaatgtcactttaattagtgctaagtactattaatacgtactttataataatactcatatttaaatatatatatatatttatatacgcatcctttttgtatatatctcatgagtaacataccttttcttttccacatgaaaatcatgctaaaagaatattattagataattatacagctaatgatccggagagaaaagtgaaagaagatattatatatatatatatatatatatatataaataggacaaaacattttgatgaacctttattttaaaaacattttctatgttttttctcctgatcattaaaattaaaaacacaattttattgtttaaaggttggttcagtacaccatattgtatattatattatattatcatatatttttaataaactcgacccccaacaccgattattggtgtcacgacccgagccctaggcggtggcagatgtgtaatatccataacttgagtggtcaaaggtcacactttgacctttgtaggaagataaagcttataaatgatcattttatttatattataaaatactgatttaaaagtaatgcattaactcctatattaataagaaaatattagtaacaaaatcaggaccactcatcagtataaaagaacaataatattcccacagttatgtaatcaccaaataagatagattaaataagtacaataaaataaccaaaataaataacctagcctccatcatttctcatttctaactagtacatagctaattaagtcatcaagaccatccatttcagctta

SEQ ID NO: 267903 - DNA, 800 bp, Cannabis indica
agtctcaagtacttctttacttagaaaatttaaatgtgagatagagacaatggttagaactagttaaggactatgactatgagattttgtatcatcccaaaaaagccaatatggtcctgggcaggctttcagtaccataaagatctcacctcagctagcttcagatttggttagagctggtattgaattcttggttgggaaactacataacctgagcccctcagtcagacttgttagaaagaatcaggtaggcacaattggaagactctgagctagtcaagattcgagaggaggtattagtaggtcggcctaaggacttctcaatctcgaacattggaatgttactttagaaggctcgagtttgtgtttcgagtagtggcgatctcagaaaagaaatacttaatgaggctcatactacaccttactcattgcatttgggtaccaccaatatgtaccaagatttaaaaccttattattggtggtgcaaaatgaaaaaagatgtagtagaatatgtgtcttaagtgtcttacatgtcaatagattaaggcaaaacatcagaatttggctgggttattacaaccattaacgcttcctaagtggaagtgggaggatatgataatagactttgtggtgggtttacctagaaccacaaaaggcttaacaaatgatcaagaatgttcttaacagaagtacgacctctgtaccacatgcatgaagtaccgctactatattagtgttggtaatgctgaaccatacctcgagtattactgagagttgtactaatttactgcatacttaat

SEQ ID NO: 267904 - DNA, 1799 bp, Cannabis indica
acagaagagctctaaaatctcataggcagcccatatattttgttctcttatgacatgctcaacctgatcaaaacaccaattgcagaagataccttaatttaaaacaacaaattcatatcaaaagccagtaaaatttaaagggttacaaagtattcaaggcatacccgaattcgagctatagcttcttggccagtctgcaaaaattgagctatctctttgcgcataagtttggtctgtgaatctctcttgttttgcaacaatttgatccgtgcaatcgccaaattcaaacatgttttgcttcaaaaaaaattcaaaacaatgtaaagaaaggaaatttctaaagacattgataagttgcacacaaaactaaactgaatttcgccaccaaatctgaaatcgaaagaaacccacatatccattgaagattacaaagtttttgaccaatcaaattgtaaaaacaaacccctaaatttgtttacagtgattcaaattcgcatcaaatgaattgattcattaatgaaaaaagagagaaaaatggaatgtaaaaactaaccattttgcaccaaatacacctctgttgaagagttggtttaggagagacattgaagactaaatcagagagagagagagatttgagttgaggcagtgtttactattctagtatgaatctctctgatctaccattgccaataaagattctcaacactcgagctgtgtgttgtgttgaagcaaaaacgaaggctttttccccacatttcagaagaaattatgtgtatatattttcaaataattttacaaaaataacgcaatggatttaaattacaaatatagcacattttttttagttaaatgagaatttttagtttataataaggatgcacaatatttctataggtacgacgctttttgggaaagagcccaaaaataagtatgtggaggtttaggcccaacgtaaataatattataccaatgtagagataggtgttgtccgatggtcctaacaaatggtatcagagcaagatctaaaaattagctatataaataaattctcaaaatgccaaacaaataagataagcctcagtccttacaagtactctagtagataggcagtgtgctctgaggagttggcctaagaaaagagcaagaactctcgaggtagagtatacaaatggaagatcgtttgaggtttgcctaagaaaagagcaagaactcttgaggtagagtggacaaatggaagatcgtttaaggttggcctgagaaaagagcaagaattctcgaggtagagtggacagatagaagatcatttaaggggaagcaatgtggtcctttgttttgtttaaagggaggattgttagatatgtaaccaaagtcccacataggggtgttcatccgattcaatccgcacttttttggtcaaacaacatccaatccgcactaagtgcggatttcatattttggatccaatccgatccgcataatagtttaaatccgatccaatccaatccgcaatagtgcggattggatcggttatttttttaataataaattatttaatatttcatagaaaaaaatttaaaaaaagactattgtttcttaatctccaataataaactatttccatctccatttatatataaatcaaacccatatacatatatgtcaatatataatttacactaaaatatatatgtatttattactaaaataaataagttagtatatatatatttaaatttgtgtgtatgtgtctatgtgaatagaataatttttctagtgttttttattataaaacaaataaa

SEQ ID NO: 267905 - DNA, 1698 bp, Cannabis indica
ttgaactcatgtcattgacttttttttttttgaaaggacacatgtcattaaaactaaggatagatgggaatcacaggggaattccctccccttggataatctcagctccaatgctagaacctctagcaagtttagctaaaccatcaacaaaagataaaccattacgactaacaaagaaaaaatgataattagagttcttaacaagatccaaaatagcaaaagaaacattggtaagcttccaattgggaatgagttttccttgctccaaagcttgaacagccaccttacagtccgataaaacatgaatttctcagccaccattctcgccagcccataagatagccattagaatagctttagcctctgcttccaaagcagagcaagcattaattttaccacttacaccattattatattattggttgtgttgattattgtaggattaaataacttgaatattttgtacttttttagctacaattattgtgttaagtagaaaataaagttaattaaaaataaatatataaatttcaaattaaaaaaataattaattgaaaattataactagtcataagataaataagtaaaaaaaaaaaaattaaggtttggagtttgttagttgaacttgtaattaataatattaaaaattaattataataaaaaaatatattaatgatggtttagttttcaaggattaatttgagccatttgattaaatcaaaggctacaaattattatccctattgataggtgaaaattacaatacctattgcatgttctggagaatttatacattaaacataatcgtgaaaataaatcatgtgaaccatgcaacataaaagtaatttttgatctttttttttttttgtttttctattttaaaggtggttcttttggatctaattttttgtatttttaatttaatttgggtttttgtttattttatgagattttgatatgataaggtgacatatgtattgtgtagatttgtttatttgcgtttggatttaaaatgtgggattgtgtttgagtcatggtaaatgattctgctattatgttgggtttgtgatctaaaaaagaggttttagtggtggtggacaattttggtggtttgtggttgtggatggtggtggtggtgattgtttgaagaagaatgacgaaaaagaagaaaattctagaaaaaatatatagtagattagaaagaaaaaaaaattgtttttatttttttaaattaatttatttttattttattttaaatatttatgtaggtgtgccaataacatagtaccatgtgtacattgtgtccacgtggacaatactctatgtactcatggataaccaagttggcggttaataactaaaaatatatggaaagagcaaagtaatataaaaacttggatttatgagattttactgtcaaaaaatacattttaagagttacttactaacaaaataagactttaagagttttgccgcaattaactctactataaatacaaacaataactaaagagatattcttatgaaagaaaaaaaaaactcaaaaaatatgatggattgatgggtacataatctcttacaaataatttgcatgaaaatacaaaataatcaagtgaaggtgtccttttaaaaaaacaaaattggtgattagggttatatggatgattaaattataacatactctcacttacactatat

SEQ ID NO: 267906 - DNA, 661 bp, Cannabis indica
caatttgcaatcaggggtccccgtgattcggagtttgagggcggaatctatcatggacgaatccagttgcctgcagaatatccattcaagcctccttcatttatgttgttaacggtaccatttgtgatcatcaattactttctcatgtcaacactcatgcataacattcatttcactcttttgcttgttcttttctctgatacatgctaagagttcattctttgtttttctgcttcagccgaacggtcgtttcgaaacacagacaaaaatttgtttaagcatatcaaatcaccatcctgagcactggcagccatcatggagtggtaaatttctttcctattatttttttaaaatgtttcttcttagcttgcatattattattaggtgagaagttttctgtctttgattttagagaggagtttgtcataatgccgagaaagtgaaattagtataataacttgttttaacaatgattgaccgtgaaagtcaatttgcaaaatatttttgtgtgtgattttattaaagtcattttatacttcttaaggcatatacagttaagtgttcattgcttattaattatgctgttcctgttggcagtgcggactgccttagtggcactgattgcatttatgcccacaagcccaaatggtgcattgggctc

SEQ ID NO: 267907 - DNA, 958 bp, Cannabis indica
tgtagaatttttatgagaaatgtatttttttaaaatgtataagatgtccatactcaatcaattaaaattttggctattaagtcattttttcattgaaatatctaattattaatatttcttgaaaaaataatttgcgacattacgccataaaaagattaaaaataaagatctcaaaatatattagaacctcttaaattttttatacttttactgaatcacacaaaacaaaattcattttcttgaccataaaatctaatactcaaaattatttcaaagataattatgataaaagatagattaaaatgtggactttatttaattaaaacttaaaacaaaattatttccaacaccatataacataaatttgaacgataacatagtttattcttgtccccattcggcaaaataatgccattgacacttaatttttaatattattgccattaacaacgacattagctttcacatcttcatcattctcgttcattgcagaagcctcaaccttagccgcaaccgccacttgagatgtcgagttggtgttattattcttggcagcaatagtctctatcctcttattaatttcttccaaattcttgtcaatgatacgaacgagatcattcaaatctgtaacagataagccaacgagattagccttaccgaatagattggagtacatgagttgggttaactccttctcacgattctctttcctcaactttttcacctgcttgctcacttcgttgatccttttcctaagaaaagcttcttggttcaccatcttgttgttctgctccatcttcgaaattttactgaacctctttggaacacgattcaacccaccgtcaaagggaacacctcaggctgagcttcgtacgattcaacctgcccaactcgctccccttctttaccaaatctttcttcctctttttagtttgctcttatcgttagctttgtaccc

SEQ ID NO: 267908 - DNA, 839 bp, Cannabis indica
caaaatattacatatgatgatttcattacttttttttaatcaatcacatttatctctcaaaaattcagtattatatgattgtgtgttatattctccttacttgtcttttccatttaatctctttgttcttggagtgtcttaaaatgaaattaagttttgggtttataataatgacatctaattgtaagaataacaatggaaaatctcttatgggtgaaacttatttcttcatttacatgaaaaaatctcggctcaagtatatttgtgtttcctgtatatatggtgattcagtaggctgaatacatttttgttccttctatcaaccaattacttttgcttattttatctaaatactcaatgtttgtttgtttgtttctatcaaatcatggatgaaataactagcaacctgttatttgtttgttagttgtttttactcattttgttatgaaattgtttctcttataatttatatattagtatttttggaattcgttcactcttatttttttttaattatacttggtttttgaattgttgtgtgttatttgtttttagtcattttattgtgaaatcgattctattttaatttatattgtaactggtttttttttaagtcattttagaaaacggttcttaaattatttatatcaaaaatcgatttgtgatttaattattaattcaaggaattggtttttaatttagttattttggaaactaatttttgatttagttaattttagaaactgattttgatttttttttatttaactaatttttgtgtgtaagtttttattttggttactttacaaaaccggcttctttgtctcaaatttttaact

SEQ ID NO: 267909 - DNA, 2177 bp, Cannabis indica
atcataacttattgttatggaaaaaacaagtcaactgtcgttcgtggcaattgacttcagccatacttgaacagtgatcctccacctcaatttctctctaaactaaattgcactgtaggcacatttaatccaggttatctcgattggaaattctaagattaactactcatgtcatgactcctctcatccaagtctaaaagcctactcatgcacatggttggctgtcaaacctcaaaataaatttggtctaaactaaagcaatacttcactctttaagtctcaactaagattcttgaattttgaaccaaactacaacctgaaaaagggtcgttgactgtctctgagtacctattgaaagtaaaacaccttgtgttcttgcctcatttggagaagtctacactactcgtgatcatgttgtagcaatcttcaaaggcctctcaagtgaatatgacacattttttcatatccactaacacaatactaaagagttatagtgttactaagatcgagtcattacttcttgcatctcaatctaggatcaagaagatagacaaggagattgatcttaatgctcatattgcctcggaatttgactcacatgaactcaatcttgccaacttcattcgcaattttagcaactttaggccatcaaatttttcaagattttttaacttttcaatttttctaaactagtactagaggagactatactcgtggaggttatctcttagttttcaccacctagattttgtgacaaggcaatacctactcactatggttgtggaggaggaaggattcctactccaactagcagaccacactgtcgattgtgctacaagattggtcatattacaccggaatgcttttacagatttaataagagcttcacaggggtttttcctcatttagcaagctcttctatttcaactcaggccagtgcaacacaagctaatatcgcctccactcaaactaatcaagatccaaattagtatctagactccggagctataaatcattgtactcctaatgcctatcatttgtcaacaggtgctgaatatgatggtacagggaagatctttgtgggaaacgaaataagtttttcaacaaagcatgttggtcagttcttcttttccacccaactcttctaactctttcttacttgatagtctcttacatgttcctaaaatttccaagaatttgctaagtgtttctaaatttgccaaagataacaatatttttttaaaaaattcatgatgatatttgttttgtcaaggacaaagagactcgttctaatcttttgatggggacacatcagaattggttgtattcatttgatgcttctcaacttcatttcttgttcccaagatcaccatctctcagtttcaagccttgttcaaacactgttagtactcatgttgctcaagctaaagtacatacttgctcaaactgtaccacaaataatttttttgatttttccatggcataataggctaggacacccctctgctaggttggtccattctgttcttactcattataatattcctattttagatcgtaataataataaaatttgctcaacttgttgccttggcaagattcataagttttccttttctaaagcttctctcactgagtatatacaacacccatacaattagttgtctctgacttatgggaaccttctcacaccttttccgcaaatggatacaaatatatattatattcattttgtatacttgtgtattatagattcacttggctctatctacttacaaacaagtcaaatggctttaaagtttttcaaaacttcaaagctaagagtgaattacagttggaaactaaagtaaaagctctttagatagattggggtgggggagagagaatatagatcctttgcaactttccttaacaaacttggagtgattcatagacacctttgtcccacaacccatgaacaaaatggtctagctgagataaagcatagacatattgttgagaatgggttaacactattagctaaagcaaccatacctctaatataatggtatgaagcttttaagacaactctatatcttcataataggttgcctacacctgttttaaacaacaaatcacctctaagggttctcttttatcaaagacctgattatcaagctcttagaacctttggttgt

SEQ ID NO: 267910 - DNA, 1006 bp, Cannabis indica
agaggctagaagaagagcttcgatttttccatagagtacccttcaattcgagtattggaagatatgataaacgagtcatattcacttgacagtcccttaaagatagatgcaatgtgatcttgagctaagagagcatctccaactaaagcaagcaaattcacatgttgcttaactttgagaaggtactcattgagagatgaagttccttttcaaaagttctagagtttggtacgaaatttaaggacctttgatgaaacttgaagaatgaaatgcttctttaacaccctcaaaactcttagtcatcgaagacagatgccatgaaactagcaattgatctttgacctcccattccacatgcaaatgatggattctgatgataagcagcttgatctgaatcactaagaaactatggtggtggagcaatgtcttggatggatatttacaattgattccctcgaacggaagctaggatctgctgcttccatagaagataattgtgatcatttagcttgatcgacaatgtgtgattgatcaagtagatcagagagttatcattatctcaagattgatttcgaactagaccttgagagaaccctagaggaatcatttgattcgagggactagagttgcctatgttttccatgtttgttgttagaggaggaaatagctctgataccatgttaacattgtggttttgtctcaccattgtttaagaacacaagaacagaaccttaagaataaagaagaagaaagacagagtaaaggagagaaagaagagagaaagaatgagaaagattgagattgaaagagtagtcttaacattgatcaaagagcactaaacattttatatacaagctcaatagagctgaccaactaaccacaaatctaactaactcctaaccaaattctaacagctaacataactatcatagcagataacaatatgtaatatccagaatattgtttaagtttcattcatattttggacattctcgtaatttttttt

SEQ ID NO: 267911 - DNA, 600 bp, Cannabis indica
tttaagtctttaattgtgtatataaaattaatttaattaaatattttcatgattcaaattataaaattattttaattgaaaatatttaacttattttaattttatgttattttcatatttgagtcaataaatagtaacatgtttggagcttgaaaatccaactcaatggatggtatttttgcaaaaatgaacaaaggatgcaagcccaagtattatatctctagtcaagacaatggattcaaatccaatatttgattccactttgtcgtggctttctacgtgctcaatatatgtatataatgtgctcaatatatggactagatcataaaagatgaaagactctacacttggcttcaagtattcagttggtccaaacgaagaaatagcaatgatctcactatctcacatgcgcccaactgtttacatatttcaccactcctcacaacaagtgtctatcacgtctcccatctcctcagtttttcaagccactttttccattatactatgcaccaaaattccatctttatgaacaatattttctctataaatagagaacaaaatcagtgtaaaaatgattagattttattagtagttattata

SEQ ID NO: 267912 - DNA, 1525 bp, Cannabis indica
ttagaacaccaatttttgatttcaacttctttcaatcacattatacttcctgcctttggcatctatctcgattattattttgtccactaaatttatattattttcgtctataaagctcaaaattgaacaactacaaaaaacacatcaaatatatacgacacttaataaataaatactaatttatctaataattaactaggaatgagtgtacaaatgggcactcatcagtcagagaagttccatttatttatcatattggatacgaagaattaatggtattcaggggataagctactaacgacaaattgggtttgtagttctttctcaatcaaaatgtctatcagggtagctttgtgaaatttgagaacattatggagtaaatgtgcagccctatcttgttcattagtcattttgacttgttgaagttttttttttttttttggttaaataagtaatttattaatccaaacaacaatttatacaacctaagagcatccacaattagaggacctccaaatctaagatttataatctttacatatgctttacaatgtattaaaccaatgttcttctctactagttacattttttggccatatacacactattctatttttaatgacagcttttactttagacacaattctatctcagttttcaatctccccgttcgaataacgattgttccgattggcccaaatcaagtaaatcagagctgcaatggcagcagcaaatactctttcttttgaagctgtcacatttggcctttgaaatccacttgttgattcctttcaaagaaactgccgaggtcttccaatggagtcaaaacttggtttttgacaagcattatttgaaaactggtagccaaaataaaggtgttcaattgtctcactcccattgttgcataataggcagtcatcattgtcaatcaccccaaatctcttcaatctttcctttgttttcaatttcccaagcatagctaaccatacaataaaactatgcctcgggatattgaaccgattccatacaaatttactccattctacttttggagcctggcaatgtacctttttatagccaactgccacaatatatttgccttgaaccatgtttaatgcacccaaatccttcatttgatctttaatcttcaccaattttctccaataccaacttgcttgagctgaagttttataggtccaccaattctcatccttgatatatacgttgtgtacccatttaacccatatgttgtcttccttcttagcagtagcccaaacatatttgtacaacgcaaccttgttcaaatccgcaatgcacctaaatcccaatcctcctgagcttttaggttgacaagccgaggcccaagcaaccgcaggcacccctgttaatgtatattgtccattccataagaaactgcagcaaatagattctatttcacttacaattttctttggcagcaacattacttggcaccagtatgagtgtatggtcgtgaggactgaattgatgagcacaacacgacctg

SEQ ID NO: 267913 - DNA, 885 bp, Cannabis indica
ctctcttccaactaaaaaattaggagttaattacactattgtttttgttgactactttgctaagtgggttgaggcagaacctatgaacatgattacctccaaaaaggcattggattttgtcgtcaagaacataatatggccatacgacctttcgaacaagattttatcaaacaatgagaagcaatttgacagtgatcacttcactaatttttgtattagacacggaatcataaagagcttctcatctgtggctagaccacaggaaaagggacaagtggaggccgtcaacaaaatcctaaagataacgttgaagaataagcttcaagcatgcaaagatcactagccgggagaacttcctagaggtctttgggcataccagaccacaaagagagcttcaatggggcatactctgtacttaatgacatacgggtgcaaagcagttatcctagtctaaaatattgtaccttctcatagacgggagacttatgatcctacatggaatcacactttacttcaagaatctttgaatttgatggaagaactccgtgagcaatcttaagtccaacttaagatgtatcaaggcaaaattcccgacatttaaatttgaaagtaaaaatctaaacatttaaagttggaaacctcatcttaaggagagtatttctagcatctcaagagccaagagtgggggtccttggacctaactaggaaggaccgtatgaaatacaaaacaagatgcatatcagaacataccaattaaaaaggctagacaaatcaaaaattctacgagcgtggaatgtgaactacttgcactgatactatcagtaaactgggagtggcccgatcgagattctttttttttacgcattattccttttcccttttcat

SEQ ID NO: 267914 - DNA, 553 bp, Cannabis indica
tttttagccaaatgtgatcaaatgaacttccattagctcctataaataatatattgtataataaagaatcgtgtataatatagaaaacacccaaactaatgtaatatgtaactaatgtaaacatgtagtagagaatgaatagggcataaatttattttaatagtatatacataatattttatttatatattatacatatgttaaaaattattattttaataatatagaaaatattattaatattatttgatggtgcagaaaaagaataaaaaaaaaaaaaatactaatgtatagtgcaaagtaaaatctaatataaaatagagaaaatagaatttttacaatatttaaaagatagagaaaaatagttattagaagtgctcttagcatatgaaagttcattgtaaaaaaaaaatgctcttagcattgaaataacgcaaacatatatacataatacaaataacataaaataacaaaaattaagatgaaaaaaaaagactaacaaatgtagaagatgaataggataagtgaaaaaaaaaaaaaaaaaaggtgaaaa

SEQ ID NO: 267915 - DNA, 624 bp, Cannabis indica
agtgtcaaatcatgttataagtgtcgctttagcgcaggaagaaggaaaggcacaactttttgtatattacataagcaagagattgctaggtgcggagtccagatatcttatgattgaaaatctttctttttgcttactaattacgttacagaagttaagaccatacttttaggctcatgacttcatgtggagtgcacggcaaaaaatgacaatcctaaaaagccagtcctagagagagaagtgtagaaaatatatgtagacagagcatcaaatgaaaagggttctagagccagaatcattttaatatctcctcaacaacttcaaatccaaagtgcacttcgtttcaaattcaaagcctccaacaatgaagttgagcatgaggatatgattgttggcttgtagttagctaaagaggttgacaccaagaatcttgaattgtacagtgattcacaactagtttttaaccaagtgtctagagagtaccagacaaaaggagaaaaaatagctagttatgtagcaaaaactagggagctattgcaacattttaagcactaatctatgaagcaaatccccagggagaagaacgcatttgtagacatgctagttaaattagcaacagattcg

SEQ ID NO: 267916 - DNA, 931 bp, Cannabis indica
gcagagagggacccattcatagacagatcaacatcccttatcgatttactccacttccaaactctacaagtgaggggacattcagaagtggacctactgttgccaaggaaaataatagagaaagctttcagctttttgggttgtgccaagcccttgaattacaggtctttcgggagatcatcatgagcctaacacaaattctaaagcagattattgtacatgaccacaacgacgcaggatgagtatcatcacaaagccatactgattttgatgatcaattcacctaggcagagaaaaagtgacggctatgcactatcacaccagcatcatatgtgataaattttgtctcactaaactcttaccacagaggataggtagcacctagagactaatagttcacacatctttttacctcctattgccctttttttcctataaatacctagaaacacaagaggaaaagggacttttggactcacacacaagaagtgagttctaatattgtaacttgaatattctctgatcaagataacattgcaatcattaagtaaagtgacttgtggactacagtttattaacattgaaaccacaaaaaaatcctatctttattttccttaatcgtccttatcgacatttacttagtggttgccaaaaatctcaatcaataggtaggttttatgggccaaaggatcgtgcagggttgtatgtgcctaccatgtttggttgaaatagatgatagtagctttcacttcaagcattcaatgtaagcattaaaagttttaccaaattttcaggcaacttagactatagtataaaatgaagagagaatgcagtgatgaaagaaaatacacaaaaaaaattcataatttaggccttcaaaagaccttactccatgatcagtcacttacattatgataggatttggacagct

SEQ ID NO: 267917 - DNA, 553 bp, Cannabis indica
ttttccttatataaatatatagatatagattgatgattgattgatattgattgggggttaaatctataatctttggttctttacacttcctaataactatctctcaatctaaaactttagtgacaatacctcataaactctactttaatttgtgaaccaatgctatatttaatattgaatgcacaacaatattttacgatataaagtatgacaaaaagtaaaatagtattgacgttcatgaattgaatatttaaaaaatagtaaatgataacattgtaattatatatcattaataaacaaaattataattaaaaattatattattgtatgtcaaattcgacacaatataatatgccaagtttgcataatttttaacatgatccatatttaacatttttttagaattttttttttaattttcattaatatgcaatgatgatgtatcactcaaagaacataaccggttactgttagtacatcattggaaactaattttctcaaaagtgctaaactatagtaccatactactactattttcgatcatctccaatgc

SEQ ID NO: 267918 - DNA, 679 bp, Cannabis indica
agttaaataaattcagctcaaaacataacaacaataatatatgtatatccaataataaaatacttgatggtttgaaactactcaatgtttactccatcactaaactgaagaataaaagaaaagaaaatccattccaatagggttcaaattgcactaaatacaaatctcaaatggatgtcaaatttataattagttatgtttaccaaatgctaagaacagattttcaatgacacaacatctaaaagattatttaatactatttatattgacatagtaattgttacaatatatccacaccataaagaccatatatctaaatcaattttgatataacaaaagcacaatcataacaagttggcattttccaattccctaatcactcattcattcacacttggacaacacacaaaatccctttatcaaaatccctaatcactaatcactcattcattcattcacacttggacaacacacaaaatctctttaccaaaattcaattctcctgaacttacaatatatagaacaatttaatacataaaaattccattgtcaaaagtaatccattatatctacgttggtgcctctatctctggctgcaacaatattaaaatcccaaattcatatcaaatttacaaaaagattaaaataaacacttaatgagaagcatataagaagacac

SEQ ID NO: 267919 - DNA, 2240 bp, Cannabis indica
acatgtggcaagaaagaaaacattctagagttgagtagtccaaagtcataacagtcgacctgggaggggtccctagccctacggccaggttgactccaagaactcttgaattggtgtttggatcccgctacgttgtttccaacttatgatctttcagtattctaaatcaagaagacaagaaaaatcaagtctaaggccaagaaactaaaaaagagatgaaatagcaccccaaaagttaaccctggtgcctagggttttcacctagtgcctaggttgacatctcaactagggtttcgattttcgtgcccatcttagtgcaaatggctcaaaatttgtacattgacatgaataagacatctcacgatcttatttgaggcattggaatcaaaattggaacactttcaattttgagcacttaaggtaccaagtgcttagggcacctatcgcccaggttgaatatgccatttccaatcactttttccaagaagtcttctaggcatattttgtgttttcacaaataactgagatacaagtgtttttgagaatcatgattgacctagacgtcatctttcataacctcaatatagatcctcttcatccacggagacaataaagaaattgtctccttgaccctgaaatataaaatgcatagaaggacaaagtcaacaaacttttgactaacgactttatccaagaagaattttatctaacttgggtttcgaatccaattttagttctaaagccaaacgacaattggagaacttgtatagacttctctgatctaaataaatcatgtccaaaggactgtttcacttttccaagaatagatgaactcattaatgccactgtagagcatgagctcatgactttcatggatgcttattctagatataactagattaaaatgcatgttccagacaaggaacacatgagcttcatcacaaacattagctttattgttataaggttatgtcattcgggctaaacgcaaaagcaatatatcaagaactagtgaatggaatgttttaatgatcaaatcagtcgtaatatagaggtttatgtggatgatatgctagtgaaatcagtggaaagtaaggatcatgtgggcaacatcattgaatgcttctcaagtctgagaaaattcaatatgaagttaaatccaaagaagtgtttgtttaaagtatcatatgggaagttccttagatttatagtacatgcaagaggaatcgaggaaaatccggtgcaaataaaagctttcctccaaatgccatctcccaaaaagtcaaaacaagtctagtctttactggaataatggtcacactttatagattcatttcaaaattgactgataagtgccttccaatctttaacatattgcgagataataagaaatttgaatggacaaaagaatgtaataaaactttgtagattattaaacaacacttatcgaccccactggtattgtcaaaaccagtgacagatgagattcttttcctatacttagcagttttagaaaatgctatgagtgttgccttagtgtgagaagatgggaaagtctagcgaccagtatattacataagtaaattgttaccggggttagaatcaagatatccaccacttgaacacactaagcctagtacatgcctcaagaagattgcgaccatattttcagacacacccaaattaagtcctaacgaatcaaccactaacacaagtcatttcaaaaccagatgcttcacgatgactaacaaaatggtcaattgatatgggacagtttgaatctcacactatccacgtgtggccataaaagggaaagctttagcatattttttggtagaaagaattaacctcaaagaaaatgttgaggaggatttagaccaaaagaccaagaaactgtttctagacgacttgtcaaatgatagcggctcgggcgaggaatcattttgatttcttcttagagccttagatttcactatgcattgagatttctattcatgcttctaacaacgaggacgagtatgaagcgttactagcaggactagggattgcaaaagtcataaaagttaaagcaatctattattttagcaactcagtttatagtaaattaggtactcgaggattatcaagcaaaaggattaaaatggctaaatatttagagagttgagaagaacttggtaaaattaaattattacaaaatcaagagagtttcaagagagaaaaattataatgttgatgcgtta

SEQ ID NO: 267920 - DNA, 651 bp, Cannabis indica
gtgctctattgtgcagccaagggtaaagtagtgtcaggctagccatgagttcgagagttttgatggtgaatcgtacatattccgtccaagctagatcacgagagttgggtccaatagggagattgtatagaaatcttagttttaccgcttaggtcggcttgtatgtaaacaacttgtaatattttgaaaagaattttacaggatcacagacatgtaattaaattattttgttttgaattaaaggttgttattattattacaagttgttttgttatttaagttaaattatttttattcacttggcttattggaccccaattaatgggattagtaaaatgtaatcacaacacttggcgttcctttaattaagacgttacaactacttccttggaattcaagtacatcatcttgttgatggtcaacatttgtgtcaaaagaagtacatcatggatctttttgttgttcaaaaattgattgtgctaattctcttcccaatccaataactagttgagaaaaattgttaggatataatggaaaccctactgctgatcctcaccaataaagaagcatcgtgggagctttacaatatgtagtaatcacaagaccataaatagcatatgctattaaaaaggtttctcaattcatgcataa

SEQ ID NO: 267921 - DNA, 664 bp, Cannabis indica
ttagtgaatggaattatgcaaacatcactttgtttatcaattaatagataggacgtttattcttatttcttaatcttactatacaagattgaagtaccatcacatgagaatgagattaaagaggcaatgaattttagattttgacaaggggtctctatatgactactaagaaaagctgacaattgaccatatgtatttatttcatatatatttttctttttatctttaaaaataaaataaaaattgaaatatatatgccgttttcaaatgtttgttatttactgttagttgattgggatttcataatttgaatatattttcataaatttataggtacttgttgattgttgtgatagggacatggtgaggtgctaaaactgctgagaattccgaacgtgatggtctctagagctgagttggaatatttggattagttgctcatttatttgggcgttgcatggctcatgagagaagagaattaatgttacacacataagaaaacaatttacaataggttataacaaaaaaacttactaagtgtgcccgacgaccaaaatcaactctcaactgttttcaattacaagaaaaacaaataacaaaaacaataacaagaaaaatacaactaagcaactacaacatcataactaccctaacgactacatta

SEQ ID NO: 267922 - DNA, 1246 bp, Cannabis indica
tataataaaacctctaacaacttcatcatggtactaggcactataaatacctcataataatactacccaaaaaaacataaccaacattacactgataatctttttatatataataataataataataataatgattataacacctatactagttcacatgaggtatatacataccatatataatacaacaaaagtgataaagatgataataatattatatagatatgtattatccattaactaagctgtaatgctgtatatgatcaccaccatgtataaagagaggtactatttttcttggataccaaacatatataactggaatctttgtacaaatagatggagagtactcagaaacacacagcaccagctggtcaaagagtaaacgtaggccaatgtatgcaatgtcattgttttttttttatttatttttttaattatgtgatgagttcaaagtgatgaacagtcatttggtacaatcttagttgtgaatcattatcatcatcactcccagtctttcttgtatataatattaactatttgtgtatttatttttggacagaatcatgccaagcttcaagttgaaacaccacaagagtgaacatcaaggacttgaatatatttgatatgtcatttcaagggccaaatgccacaagtttcacctaacttattaattttgcatatataaattgtcttaaatattatatgatatgtatcaacgttgctttcacttgtaataatgaatagattgcgacatagccaacattgatgaaacagattggacgttcgtacaatgagttgtttgactacttatatggtgtttcctttattaacaaatatataaaaagaataataataataacgttacacgtattgtttaactaaaaatttgatttattattaatgaggcctaattactgtattaattatttaataaacagtaaattattttgtaattaaaatttatatacttcatgaatttatcttatttttaaagttttttggttgcaaacactataagaaatgtcacttttacctagcacatttcgcaaactgcgttggcaaaaagatcaaagttttaccagcgtatatttgcagtggctaaaatctaacttaaactagcacatttacgcgctgggaaaagttatttttgtcagcgcttttcattttatgttggcaaaagttctaacaccaacattgatttgccaacccccttttgccaacacatcacaagtaaattttattt

SEQ ID NO: 267923 - DNA, 943 bp, Cannabis indica
gctcatgggagaccaataacaaatttgataaagatggtggttataatgtcattgggaacaacaaaccaataagaataagaaaatagaatggtcactattcttggaaactgtgtagtcaatggtatttgagcaagagaggcttggtgtcgaaaaagtatggaggacttaggaaaaatgtgaagaaagcgatgtggtgttcttagcagccgtctactaagcaagtgattcctccttcaccctaccctattaccatctttatataagcttaggatttgttagttatcccccacatgtcagggtgcgtcacttccaaatctcgtatcttattcctaataatgaataaaaaagtataaataaataaatatttacaaaaatctcacttaattctaggccaaaactctacaaacattaggaaaataattattcttggctagaaatataccaaattggagaggagtgataagggatgtcacctctcggctcggacttcatgaaattggtgagaagtgttagaaataggtgttttttgggtgacacttcttgcatatgatgccacatgggctgtggcatagttcttcaacatctcacacttaattacactacttaattcccgagtaaagtgtactagcatgtcttgtatgctaattttgagcctgataacttcaaaattgagctacaactttgacatacacttaatgcaagttgaaccaggtcatttggataaaattgagatatttatgcctattttactgaagggaagtttgtgctgttttgctccagatgcgagcattgacacgaccaaatggagattctcggccgtgcatgttctattttttgatggtgaatcatattttggaggtcctgagaccccaaaacctcattttgatgtacaaaaccctaacgggagaccattgccgttagtcagagccaaaagatggtagtg

SEQ ID NO: 267924 - DNA, 1214 bp, Cannabis indica
gcatactcgttgcccagctccaagatggcctcgtacgcccaatacttcaacgctacagtatagccgtaagatgagtattacgcctcctactgactaactcccttcccaattttcttaagcattttattcttcacatctatgtagtctttaattaaaaaaattatcaacttgttgtacgtaaaagaatagaagtttgtcaactattcttatgacaaatgaaggaacggcaatcttctcctccttccaagtgagaacgctcataacaaacaaggtcatccccaacttgtaaacatcatcaatttctgtgcagctctcaaaaactctgcgcaattggccaaagctgatggaaagattaccgttaaaaaatttcataatcaaccagtttaaacttcctttctcttcaattttttcttcagtaggtccggagaacaagtttaacccagtcaccgaatcaaactccaccctaccgaatttgtatgccttcttcgccaagtaaaaaaatacttcgtctgacttgtcaaattgaatcttgtgcaacattaattgatggatcaatgcccccaaaaattgtaatggttctctctcgaataattttttaaaaggggattccctcaccttatcccataatctaaattcctcaaatttagtcttaatcttcgagtcgcaataacttctccgcgtcaagtaacatggcttgtgtaatactccgacagtgaaattattaattgtgggagtctacaaaatttaaaaaaaaatgaaagaatcgagccctatatcgggtccgagccaaaatagtcaagtttaaataggacatcgggcccaacataaaacacatcgagccataactaaaaattttgacaaggccattgggaccaatatcgaacgcatccagcttatcaaaaattaaaattatgtgaaggccattgggctctataccgagcccaacatcggaccaatcgagccacaattagaaatgaaaaattcaacaaggccatcgggacctaacaaattttaaatttttttacaaccatcgggccttcatcttcttcaacaattttgtaaacccatcagaccggtgtcgggcctgcatcgagcccgccgaaataaaaaccttaacccaagtttttgcccaaaccacagctttgaaaaaatcaatacctaaatcaaactctaaatctaacaaaactcatagtgcacacacaaacacatacata

SEQ ID NO: 267925 - DNA, 929 bp, Cannabis indica
acctaaaatagcaaaacaatgcaaataagaaaaaaccaaccaaggaaaacaaattataaaaatcaataaaaagaagaaagtggatcacttactgctttgattgaaatttctggacagaggaagatttaccgattgaaattctgaaggtcgtaaaaatgggtttcgaaaacctctggaacaatagatgaaattaactaaaatacgcaggaagtatgtgaaaggcaatgacgacatgcaagtttgagaaaggacaatcaaaaaatttctacaggaaggcttgaaggtttaaaaaacaaaaatggaaaaataatctctcagctttgattttattcccaatgagtgatcactattagaccaaaaaaaatctgatctaacgggtggaaacattggaaaataggaacagttaaggcattaaatgctcaatgatgttcctcgaagtcttaaactgccaaaactcaaaacgtacaatttttcaagagggtttaatacgattatacccctatgatcatttaaaaagttctttttaattaaaaacactttttagggaacaattgttataccaaattttggctatgtaccagaagctgacacttgtcctacagaaagaatatgaatcaactcagggaatataataataattttatatcattcaatgcaattcaaataactcattctaattaaatacaacttttatagaaatgttcaaagtcgctgactacttagtcttacgcgagacaaaaataaaatttattaaactagaattgacgagatttatgtctatctcaggatagagtaataaaatgtacaagacaagatatctaaagacctcatgaattgttgcctttcatacacgaatagagtaaaagtaacaacattcaatcacctcgcattatacacaatgtattgatcgtctcgcatcattaatacaa

SEQ ID NO: 267926 - DNA, 701 bp, Cannabis indica
taaaatataaacagtataaaatcatattaattaaaataaagccaaattcgtaaataaaatgaaaagaacacttcgtcgcacaaattttttattggaaagtattttgaatttttaatatttacctggtgtgacatcatatatatttttggaattaaattagaatttctaaatataacataaaaaaattttcaaaaaaataaataaaaactatacattttaataaatattactttaaaattcttatataagttttaaatttttttaaaatatataaccattgtccattactttattatctaaatgcatctatatcttatttatatgtactttgcagttttgtgtaagtacaaagatatggattttaaatgctacaaaacagaagatcaacaataaacaaaaccaaaatcatttatcaaagaacactaaacgaaaagcaaacaactaccaaaaacaatgtgtaacgccttaatgctaaggcacgctgtagtgttttttccattaagtgttattcttgctaatcaaagatttttctcgaaaaacatgtcaaattaaaacatttataataaatattacactatataatttacaaaattatttacaagtaccgggatactgtttttaaacttttgtgcaaaatacataatcagtcgcacaacgactacaaaataatactcccaaatgtcctaagaccgaacactcca

SEQ ID NO: 267927 - DNA, 1376 bp, Cannabis indica
aataataccttttagcaatcagttttgtaaatattaattggatggttgatgaagtggatcagatagatgattcccctgatttcatgccatactagtttgttgggaacttccctcaccacacctttatatctatatgtgtatagatgtaaccaataattatacctacataatatatataatttttagaaaaataatttacgtgtttgttttttatacctatatttgaattttaaagaaaaataggaaatatatattataattacaatgtacatcattaggtaaataattagaattataactatatttaggtgtgaaacacaaaaagaatgtaccaataatgttatgtctagagtgataccaaaaacattaattcccaaattatatagtacatggacatttcaaagttgacaaaaatgatcttaattcagaataattttttttgttggtcattatgtatatatatatatgtatatctaagtatgtttttagtttttgttcatttgatcttgagataatattggttatatattattacttaattagtattaaaaattgtttatctaaatttttggaaaccgattaaaaaactaaagaaaatagattagaagtaagggttgagacgagaatttttacgcggttcgagtattaacaaattctagtccacgaatcaacattatttagcttgaaaagctttcaaatattacacgagtgttcttgtctattttatgaaccctaactcttagcctttgctctccaaggatgaatcccaaaccctttagagggttatggttatatttataggctaaagtcgagtatgattatacccggactagggttagcatataagcatggcccacaaataaggtaaatgtaaataatatatattgacattgggttgatttgatgaggccgagcccgtgaagcaacggtcgtccatatatgagaccacatgatagtgacaggtgacatgtgtgcaccgccttggtgtacagtaacatcagtagagtagcggttggacaaatggcatgtctccttgggtggtctacacattctcatgtatggcgcaaaggatatataaggtcttgaaattgtgagatttggtgtcatgagaggagcgccacgccagtcttagcttcaagtcgcctcttgaactgtccatccaaaagtaccccttgaggacattcagatacatcccgtatagtcttccttcttatggattcgctaaaaaaatttcttttcatttgctaaaatttcaataaaactgctgagaatcatatggttgcatctcaaaatcaattggcaatgagcggagtagctcatgttcttatatatgactcaattctctaccatttattctatgtgggacaatgtccaca

SEQ ID NO: 267928 - DNA, 1061 bp, Cannabis indica
tcgtttttggtttgcttaataaatatcttgtaaattgtcattccttaaataagagaaagtttggtgatgtggaagaatatatagaatgctcgtttggtacgccgtagaaggattgtattgtattaaataataaataatattatgtttggataaaacaatgtattatattaattataacgactaaaatttttaatacaatgtatgttgtattatttaatatataacaaatggtcagtattagcttgtattagaatatttataaaggattcaggatcaacaccaatctccgatccgaacccagactcgggactttggacccgaacttgaacccaaacttgggacccaaacccagacccagacctagacccgcacccgaacccgtgacccgaacccagactcggacccaaatctagacccagacccagacctcgaacctagacccgaacccggacgccagacctagaccccagacttagacccaaatccaaatttggacccgggtctgggagccaaacttggaccccgacccgggaccggacccagacttggaccgggaccaggacttgggacctaggacccaaatctgggatcttgggaccaggactcggactcgaacccggacccagactcggaccccgacctaggattaaatctatttttagttgaattttgagattgacattcaataagtgattcaattcaattcaattagaatctaacttttatcattcaaatctaattcaattcgattgtaattgaatatcaaattttttataattagattgaattgaataagtttggtaattggaagttgtctatctttacgagtacacattccaaaatataaaaattaattaataaaaaagtaaagagcaattcaattaatgaaaaatggcgggcattgtgatttgggaagatgaatgaaataaaggatagtttggtatattattatttaagcaaattaaagaaggtcccctctcctcttgtattcccaggtgggtgggggtggtcactagtactcaatactcatctccctctctctctctctctctccagtcgtc

SEQ ID NO: 267929 - DNA, 1566 bp, Cannabis indica
aacttgacgaacaaatgaaaaactaatgtgacagctttcaagtcatatagaccggtcggcctaacatgacgttgaaggctgatggaacatcaattatcaaaaattgtgccatcacagttatgctcctcagagcttgtcccgcagtgagggtagacggatttgccccagaggtacaacactctgaccaaagaaaccatacacaagttggttacaggggattaaatcttcaagttggagccccatcttctcatatgttatcttaaacagaatatttaaggaggctccactgtctatcatggttcgagccactgtcttgtcttctatctttacttccacgaccaagagatcgttgtgtgggaagttgacgtgaataacatctacttcagtgaaggttatagtgggttcccatacccatggtatttttggctttctttcttctactgccgaaactgtttccttttattcatgttgtaaggctcgggcatactttccctttggttctgatcggccttgacatatttttgcaaatgcgagttattttttctaatcaagaattcaatctcccgcttcaggttgttacactcatacgtgacatggtcgtaatctgcatgaaaacggtagaacttggacatgtctcttttacttacgtccttcttcatgggagcgggttttttgaacgggaccatagattgagttgttgggtagattgtctctaggttgtcagtcaggacagagaaggcagtaaattttgaggcattttctctagggttgtgttcggcattgccagtgaactttcccttctttctgttgccttgcctgtcactgttattagactttttcccactccatgtggagctgctaagatattgtggactttgggcaggtgcccctgccgaggaaatatattgctggcctttcttatgtccgactgtgtctacacaccgaacaacttactcgagcttaataaatctatatgctcagtctagaaattctgccatagaccccacgaggccaaatcttttaatgtctttccataagtccccaagcggctcaatgcctccagtatggcggccagccttccctcctcaaataaccccttaaccttcattgcctctgttaggaacttgcttatatatgctcttaggggttcttctggtacttgttttactgcgactaggtcctctaggtgcgaggggagttgacgagaggaagagaactgtgcgtagaattctgaggagaaggcctttcacgaattaaaccttattagagatagcttaaagtaccattgttggtcggcctctgcaagtgtaataggaaatattctacaccgcacatcaccccgtaccccttgcagatccatctgcatctcaaaatatttaagatgtgataatgggtcttctttccctgtatagatcttccaggtcgacatcttgaatttaaggggtaattaaaggacttcaatctctggggagaagggtggtcttcgtgctcggtccagctcaagatcagtgagttttaggctggtcaagccttgtaccatattttttagttgatccaattgtgctt

SEQ ID NO: 267930 - DNA, 790 bp, Cannabis indica
tttttttttttgagataagtaatgtaaactaattaataactcaaaatttgacaaaatcgtgtccattaattaatttgaccttgactaagcaagtcaacaaaaatgctcccatttaatagtaatagtgttaaatgagtcaattttgcatcaaatattaaaaataaaatagtttaattttccataattatactaccttttttttgagtgaaataataatgataatatatttgagacataaatgattactgcatttattctaaatctttaccctaaccatggtaataatcacaatatatatccttgtcattgagatccaaaattaattattaattatttgtgataaaaaagttaaaagtaattcaataatatatatttttttttacacaaatagtagttttttaattaaacggactttctcaaagtgacaaatttaataatgtcatatcacattaaatcccgtaaatatatatatatatatttaaattataaataagtgataaatttcataaaacttccattaataatggtatttatatcttatcacattaaatctcatgaataatgtttgagatttctcttttcacacaaacacattcttaaattttatatatttttaacgactattttacagtataaatatttaagtttaagtttttaaaagtaaaaatacttaagttatatttctgaaacatctatatatacctaacactaagggcccgtttggttgatagtaatgggccagaaaagaatggaatggaatactaatgggcttgattcttttgtttggttg

SEQ ID NO: 267931 - DNA, 1503 bp, Cannabis indica
ccaatgaccgtaggaacaacctgggatttccaggcaagataattggctcgatcgagcttgatggtgagagacgaggttagcgagtttgagaagggattccagtgcgcagggacagcagctgaggaaggcggctgaggacgaggatctgtagcaccaacacctgaggaaggcacctgaggccgaggatctgtaacaccgactggggacgagttgtcgccagaagaagccatggacgtgagtcaagaagctccgataccatgaaagctttgaagcagagtaacaaacagagagaagaaagcctcagaaccaagataacagaaccttgattaaaactgaggagtacaccttttatttatacacaaagatattacaaaattaataatctgttaataacagattctgttacaaagaaaatagaaaataacaaacaaaactaaaccaacaaacacgtgcgtttattggttatcaggtgtttttgttttatctttaatcacttaaatcattgtgctgtctagtgtagttagtgcaagtggagttttatctttaatcacattctttctttttatgttgagcattactgtaaggtgtcttggtatggtccattattgagtataagctgttaaaattaagtttatccaatgatggatataaccaagaaagcaaaacttgtatttgtatagacaaaatgttcaaaagaaattaacaaatttcagaaaatggacaccaagatttattgagataattaattaaggagagacaaaggtagcaatggttgctatctacaaatcattaacaatggtctcaaccatttctagtttacaaagtaacagtaatgaccactctaatcacactacaatcatgaaccaatctgcatctgagaacacttccaaggctaagacagaagctggtttgaaatgcaaaccggtactcatttatggttggaggctgcaacaacaaagtaagcttgtgtttatatatgttcattcacttaaaatggaagcttatcaatttgaaaggcattcacaagtagagtagagatcaaatcttcagatcaaatggtgaaagtaaccattcaacactcatgttctgatttcagctcagaaaattgttgatcacaagactcccaaggatcagaaatttaaggaaagaaaagtagccttacatattttgtatgcagtcttactcgaaagcatgcaaatgtgcaatcgaaagtacttatgacgacttgtcagaattagattgatttattacagtatgagacaccacttttaactgaagatcttgattcgaagctaacactggattattcatcataaacaccaatctcaatttctttttgcaaacttccaagcaacctttccaatcaaagtatgcaagcaatctcttaagtgaaaccaaacctagaagtgttgtaagaaaattgaataaggactttgaagactttgattcaacattgaataaagctttaaaacaatatagaacagggggaagagaaaagagtaa

SEQ ID NO: 267932 - DNA, 801 bp, Cannabis indica
ataaaatattcatttatcagaatcaataatattattttatttccttaattagaaatattctaataataactacatcttcgaaatagtttatcttactaattttgtaaattcatgttgacaataatttcttagtacaatttataaatatttgttgtttagtttttattttattatttttttatgtatatatggggttaattgttatttaaagagagagaaacaagtattttttctagtggttagacgaacaataaataatggtacgaatggatgtgagaatttttcaaataaaattaataagtaaaaataacaaaaattgaatgaaaggtgaaattaattttttttttaagataaaagtgaaaaggttgtgcaaagtaataataatttttttttgctaaaagataaaataaaagaatattattaaaaaaactgaggaggagatatgttaacataaactaaattttaccttcactttcatatatctcactctcttatcacccttagattgttaatttacttacaataaaatgttctcactcatagggacaaaataagggtcccttccatataagtatcctatatatatatatatatatatatgttaattaattaaatattaatataattttaaacccatgcatataagaatttaagggaattaaatgggtttattggggtctatccagaaatatcacttgcaaattatctaaaataatactaaaatacaagaatgtagttttatgtattgaaatacatgagtagcattgtcgcacgtgcaaatcctaatcgttatttaccgat

SEQ ID NO: 267933 - DNA, 1368 bp, Cannabis indica
tgccaacatggacagtttatgtgtacactcttattcatataataaaaaataatactcataatactaaatatatatacagtagcttagtggtaatttgattagaataataattaagaggtttagagttcatatcccaacaacctcactttttcacttgggccccaatttttatttttacctaaggcccaaattagcatatagttggtcattagaccttagcatcaattgtttttgaacctttgaacgagctccactcagaaggccattacttaagagtgatgttcgatcattatgcaattatatggtcctcggacttgttgtatttattgatagtattttcttatgctcgttgttccaataacatggtactagaactagctctatattttcatcataccgaccaagcttatatgctcctgattttgtaacttccgttacttgatatggcccttcttaattaggcctgagcacacctgatgcattgtccttagtgtttaggattactcttctgagcaccttgtccctcagaaagactttcttgcctttgcttgcttgttgaagtaccgagctactttctattaatgagcttgtagctttagatttgctaaatctcttttctcatcaatctcatcaagtgactctcctaggagggaatagttagtctcttaattatacatcaatcttctgtgggacagaggctctagttcaactggcatcattgcttcatagtcataagccatagtaaaaagagtttgcccaattgtcgtcctctcagttgttctgtacgaccaaagtacctcgggcaattcctccgaccaattacccttgacttctttgagttgtttcttcatagtgtcttttagtgtctcattgactgcttcgacttgtccatttgtttggggatgtgtgactactgagaaactctctataaccccatgtgtcgtggagaaattaatgaacatctagttgtcaaattatttttcattgtctgattttttttaggaagtctatactaacatataatattttttcctacaaaattcaaaattttcttggaagtaatggttgccagtggttcgccctctgtccacttagtaaaataatcaacgaccactactgcatacagcactccacctttttttctgggtaattgtctgatcaagtatattcctcatatagcaaaggaccatagattttgcatatgtatcaactcgttgggtggtgcaggggattttgaaaaacttttggcatttaccacaaattttcacgcaaacttttgattcttcaatcattgtcgaccgaaagtaaccctgccttagtatttttttggataaactttgcagcccagaatgattgccacaaaagggg

SEQ ID NO: 267934 - DNA, 703 bp, Cannabis indica
cgcttacacaagtaatacgtgagtccttttttcacttctcccaacctaaaaattgttcataatcttcttaaactttttcaagatttttgattgtcatgatgatggggtgttggggtttcagaactagagctgggtattctcgcggtgatcaattctatgcgtcttacccagcgggaactgagcttttagtggataccacaaaggtttgagaaaatcgatcgaatcttcttgcatttgattaattcatatattttctgggaattgggtatttgatccatcatttttttttgctgcattttgtttttctttagttgtataaggctgcgcttggtaattgctttgagatagaagaatggggacctattgagtactccatcatggcaaaacactttaatcgtcagggcaattcggcatatgagtatcattctgtaagttactcaattccactttggctacataagccattttcttatgcatatattttcatgaaaaagttgtactttcttaatagtagttgattttttgtgactactagagttatccagaagatttagaaccaaaaaagatgacatttgaacttacatgtggtcattcatagctgtgaactgtaattaagcggtatttcaatactggaaatttctgttactttcatgagaatggtgaaccttcatttgtttataaaatggattaggtactaaaggta

SEQ ID NO: 267935 - DNA, 1043 bp, Cannabis indica
cctccaattacacacaaatccaattacatcgtggctttccaattacagttttacacaaaaacaataaaaaaaattcataaaagtaacatgaaaataacatctaaataatatcaaaacaacaacaaaaaataacatacaaataacaacaagttaacaacaaattaataagaatacaacataaaaagacgatattttttgtaagtaaaatcaaaaaatcgtaaaaatatttaaattttcgtgaaatcatacttttctaattttttgttgtttttgtatatttgtgaaataatatcttatataagaagacaccttgatcaaaacatatggaggctttatgaaaattttatcaattatttaatgaattcttaagattgtctcttaagttttctcttgagtaattgtctcttaaccataaaagaagatgcccatatccttttaattaacccaattaaattaattaaatcatagttctgtctctctctttgagaatgtttgactattcttgtgtgtaacaccctaactagcatatgcgtattacgtgatttttaaacatactgtgcagctcgttgctaatcaacgaggtttatggaaatcgtgattaattaaaatttttgctttttaattaaacttataaaatattttatacagaaatactcgggatcccgattacaaaatactttacaaaactttactgtctaatacaaaatacttgtcgcctagcgaccaattacaaaggcgctgctgtcccgaggattgtacgctccaggcctaaccgccccaacaagtacaatcttcatcggctcgttctcacggttcctcagccttggccttgcccttacctacacatgaacataacactgtgagtcgacagactcagtaagaaaagcataaacataatcatacataaatcccaggttatgatcagacgcccatacccctgaccataaccctaactatcgtgtctcacacgatactaagtcccgaacgttcataagacggtactattgacaagtaacaacatatactcggtacactggtcatac

SEQ ID NO: 267936 - DNA, 1402 bp, Cannabis indica
attcataaataagacatagtcttttttagaatttcaattgatttaataaatcaattaattgaatttataaagcaatattatctcaaataacgcggggaccatgggcctatgtaaccaagctcccaataagtagtttccgaaaaaattaaataaatttctagcttattaattcctcgtgactccagtatagattcgaaattacattcttgattacatagaatgctctatacaccaaatatagatatgctatgaattatctattgtttcagtctaaacaatcagtgatcctctatagacggtttacatcgagtagggacaaatttactattttatcattcaatgtattttatccttaaaacacttagatacttgtaaatgatattttaataaactaatgtaattactaaaatgagcattttatcatttatcgcatttagccaagctcaaaggaaaccatcatttaacttctaaatagttatggaagttatagatttcatatttatgattaacactcccactaaattgcactatcgaatttccaagatgtaagtatgggatagtcctacaggtaagctggtaacgaacaagtcaaagaacccattcaatacaattaagttagaacctaaccatcttaggattgagatcaattgacctaaaatcaactaagtgagatcgacttagaaaagacataacagtaaatttatgacatcttttccactatcaatattggaccaatccgatgtataaccgatacattcaattcaattttactttgctaatgctttagaaaggacgtaccatttatacaagtgtaagcataaaacaactcagccgaaatatataaataaatcgataaaagatatatatgataaattacaaaacaactcagccaaaatatataaatatataataaaataattttgtcaattaaatatgctaaaatggaattaaaccggttaaacccgaggtagaaaattattaggagtccaatgaactcttttttaggatgtaatttttttaaggttctttgatcttttaattttattgctcacaatttgggtaagtagtattttgatcgaaatataactgctaggactcaggctcacttcataccaaataatattatttataagggaaatttacatggtatactaacttttgctattttttttataaaaatactgccaggaggtattttttacttttttactgtgttttttataagtttcatactgcagtatgctgtgttaagttttcattagtattttactagtgttttattattgttttgagttgttatgttttgtgttctactggtgttttataaaaacacaatatttttgaaaatatttccgtgtgacagtatttttttaaaagttaactttgttgctccaaaattcgc

SEQ ID NO: 267937 - DNA, 3320 bp, Cannabis indica
cttgaccttccccaagcgatgtgggattgcacagcttacccggtatttccccttacggatcacgggactactcactatcacagtaactaaacccgaaggagagaaagagatttaggttcagatcttgataaaactttgtgacataggaacaagggttagagatctgagtagaaggaatcattctattctgctgcaatcaatgtaaggttttcttaaacccttatgtgtttaattttattgtttaagatatattcatatttaggatgttaatcaacatacttattagtaaatctagatcctggtaaaatattcccaacaattggtctcatagccattataatgatttactttcatgaaataaggatttaaaacgatgaattttgtttattgtgttgatttggatgtgttcatgttagtttatgtattatttgatgaatatacgtgatttgaaaaaattttgcatgagaataattttattttcattctgaaattattttatttgaatttcttatgaaaaattaagcaacttttatttttacggaactcgattcagataaaaaacgagaaagttatggttgtttgaaaatcagatgccatgggtgtcgaagcttggtgctcacacgcactaggagcttcggacaagaccctcttacgcccgcggacaggggacaaatcccgtgtctaaagctcggtccttgcccacgttcagacacgatgcacgtagttgaccgtgcaagatgccgagaaatctcggctgatgaacctgctgcctccttcgtgcgcgcgcgggcaaggctgcattcagcctatccttcggcaacaagggtgctttgcacctaaaatcttatttttcgataatttttcacctaatttcaaattttttcaattttcaaaccctaatttcaaaatcaaaaataatttttaatatattgatttaaacttaaatatcaattttgcaaatttataatattcatttttaatagattattattaatttttgatattttgaggtttaaatttagaaattaatcattatattttttaaattatggttagattttaaaaattgcggcataaatactcattttgttagttttgttactaataaatacccaaatcttaaaaatagtagcataaatactcaaatcatgaattcccgttactgccgttagtacctattttaacagatcaagtaattattctaaaatgaacacgtgtacattcttaattggtctaataatttaaaattaaaattaattaaaagaatttaattttattttgtcttttatttgtttccttctccctctttgagactgaatctgaaagaaacactaagcctaaacctaaaattaaatcccaaagttgaaccaggatatcgactcagcccaaaaatcgaaccccttctaatccataagcatgttattaacccctccctctgccagtttcatcaccgttagacttcgaagaagggtcggttctcaactcatacattttcttgttgctcattgtcgtcggagggagcttctcctcccaatcattggcggcatcatcgtcattaaggtggctgctctcgtcccaatgctctcccacacccaaactctttcttgcgaatttcacagaagttcctcaagtttgtttgttgttgttgttggtcaacaatcaaagccacacatatctctacccattaaataatttttaaatttttatcaatgtaaaaaacaaaccctttaattctttatgtggtatttttataataaagggggaaagaaagagagataagagatagtagtttataattgtctttaatactaattaatataataacgaaagaaaattgtgatgatagaagagataagaagaggagtatgttctggggtgagtcggtatttgggatttagttttaggttgggaagcttattcttacggtgatgatcatttttctttgaaatgggtttatttagtttttggattcagttgattaaaactctaaaaaaaatcgatttcatgtttggttgctgagaaaataaaattagtactttctcgaagcacttcttcaatttttctttttgtttaagaaaattatatatgtacgaggcattttgcttcattgtgtagagtgcaattgatattattttgggtgtttcgggtatgagagatatctattgcaggaaagaggaagaaaggtatgagagatgtctattgtagtgtatgtattattgtaagtattttattcttagtaacatccaaccgaatagtggttgctaagagtaagacttacaaagtatgaaataatggtaaaagctcatgaaataagaatgaccttgactctcgactaaaacgaagcaacgtcgaattctcttttcaatcgaataaacggttgctagaatagtttccattttagatgagttaactattttatttaatgaatgatatctttgactgtcgcataatacgaagcactgtatcagtttgttggaaaccttaaaattatttaagatatgattgttttgtattttcacatgtctttccaacgtgttaaatgtttgataatttcggaatgtgtatgaatttatattgaatcataatattttctattattaatattgtagtataatttcaaatcttcattgttggtctaacttaacttgttgcttttaatgggacaaatcccaaaggattgtcatccgttagacaaatataatagtgatagatctcgacagataaatatttgtaaatgcgacatctagttgtacatctaaaaatgacaacttagactagtgtttacaatatgaaacaatgaagaaatttataaaataagaataactttgagtctgaaacatgtgtactcaatataatattttctaattttttctcatatttaatatactttttacttcatttattgaaaatagtcttagttattgtaactcgatatgagggttagtgcctaataactattcaaaatttataattttactttgttctatttaatttctctttcttccttacttttatttttaacctatagtatttttttttaatgattttaacatatactatttaattaatataaaaattaaatattttccttttgaaaataatatgatatttaaattatttgattgtttcaattttgacaaaataaacacatttttaatgttttttatagcattattccttatttataaagattttttttatgtatatttgtaaatcctttttttttttaaaaaaaaataatatttagtgtaattaagtttgcatgtgatatatattaaaacttgtatttattttttttcatatttttgtaaatagcattt

SEQ ID NO: 267938 - DNA, 1378 bp, Cannabis indica
tatgttcactcttgctgtaacaaacaattgggacatacaacaagtggatataaacaatgcttttctaaatggggaactcaaagaaaccatttacatgcaacaaccaaaaggcttcgaagacagtaatcatcctactcatgtttgcaagcttcaaaaatccatatatggcctcaaacaagccccacgggcctggtatgaaaaattgaaaacagcccttgtctcacgcggttttaccaactccatttcagataattccctcttcttctcaaatcaaaagggtcatctactcctcattttggtgtatgttgatgacatcttaatcacaggtcatgacaaagctgttattcaacaaattatctctgctcttgacaatacattcggcctcaaaactctgggttctgtacattactttctggggtttcaagcatacagatctgcctccaaaattcatctcactcaaactaagtatgctcaagacatcctaaggaaggccaatatggaagactccaagccatgtagcacccctatgtgccctggtaacaagttgtacacagataacaaggaaccattccatgatcccaaactttatagaagcatcattggctccttacaatacctcactttaacaagacccgatctttcctttgctgtaaatagactaagtcaatacatgcaaaatcctacagtcacacattggaatgcctgcaaaagagttcttagatatatccaaggcacaacaactctgggtcttgtcttcacacctgctacaaatatgaccattgatgcatattcagatgcggattgggcatgcaatctagatgatagaaaatcaactaccgggttttgtgtcatgattggagacaacttaatcacttggggttcaaagaaacaaattgtcgtggctagatcaagcacggaatctgagtatcgcgccttatctaccactgcaactgaggttgtttggataacctctgttctcaacgaaattggaatccatctgcaacagacaccaaccatctggtgtgacaatcaaggcgctcaacaacttgcttcgaacccagttttccactccagaacaaaacataaagaagtggatataaactatattcgtgaactcatcacaaaatacaaagtccaaatatcttatataccaacagaggagcaacctgctgacttactcacgaaagctctcactctaccaaagttcaattttctcagtcacaagctgtccctggaccaaatcccttccagcttgaggggggatattgaggatagtcaagattagtttaactaagtctgttagagttagttgcaggttgttataatttcagttatttctgttattagttttgtactctctatactctgttattggact

SEQ ID NO: 267939 - DNA, 904 bp, Cannabis indica
gtttctgtacctgcagaattgtgggtagtaagtacaactttccttttatagaaaaggaaagtttagctccggttttcacttcaagaaatctgatctaagaaaatgggaactcacacaagagcagaataaacagctggttagataagaataaatgtgtaatcaaaacttaccattttaacctcaatttccataaataggaaagctagacaactttcgttccaagtttagatacacaacatatggtaaccaaattaaacacttcagccgaaatatataatatataataaaatatttttgtcaattaaatatgctaaaaatagaattaacataaaccttaacacgaaaatatataaatttaaatattcacacaatcaagctgtaaaaaaaaccttacaacgttttcataaattaaagcttcctcatttaaataaaatattttttaaataaaggtgatgaaatgctatcattgtgatttctatttttacaaaatcaacgtataataacacttgcccctaaaaatatacttgtaagtcaacaagtaatacttttgaactttttctaggacttgcaacatagatttagaattacctctctaattgttaccttaattgagggaagtaaccatcatatcttggcatggggacgaggtgatgacacctctttggtcacgaatgaagtgatatgatccactcattgtggcacaaaggtgatttaactatttggaggatgacatggaatttttaatatatacaaaataaaacacaaaaaaatcttcaaacgtataatatagtgaaaaaaagtttaaaattaagtaatactcacacaaaatatagatacaaaacaaaaagaagaccataaacttatagaaaactaatcacataatttcaaaataactgtcatcaac

SEQ ID NO: 267940 - DNA, 692 bp, Cannabis indica
tttttacagaaacataggttgtttgttcaaaaaaaaaaaacaacggagaaattatcgacaaaaaatagaaaaattcagttatatgtagattcaaaacgaacgatgagtccaaagtacaattaactcaccattcaagcagctgagctcatagaagataggaacaagtttcactatactgtgtttaatttttctaatagtattctatattaacttatttaataatttttttccttaattttaagatcccacatcttctttaatttttattacataatgtttgatttaaattttgtaaaacacacatattgttccactaaattttccataagttaattataaatgttaaagtcatatattgttattgttagacatttatgcatatgataataaagcatatatattattgtataaagtgtggaattaataaaacatatatgcactataactaaaggatcgaaatacctcccgccattgattcttgagtttctatcccacacaagttttaatctgtagagaaaactaattgatgtgggtaatcgggctttcaagctctctctactctcttgggatggatttactgtttttcatagaatgggtagtgaactcagggtccgagaccctatatttatataggtgagaccttccatcaaagtctctgccacaattattgtcaaaatattttgacaattatt

SEQ ID NO: 267941 - DNA, 1042 bp, Cannabis indica
gtagctggggaccatgcacatgttcctggagaccatcctcgtacaacctacaactggggaccatgtgcatgtacccgaagaccatccttctgcagcctgcaactgggaactacacagacaagggtacaaggtgccaggctacctccagcacctacatcatgcagcgggaaagtgacatctcttctccattggaccactttgtacactaggccattagagcctatataatacccccatctcatatgtgaagggggttggaaaatcatttggtgtaactcagatattgaattaaatatggagaggaatattcagaaattttttcaccttcatctttatcttatcattatcacatttctggataaccttacattttccgaccactaacttagttgacgagttcccaccttcaatagtttggcgccatttgtgggaacgacaagattaagtcaagtcatttctttacacataatcgatacaaaatgcctagatgctctcgccgccttcaggacgtggagatctgccttgacaacaactagttggtcatttcaaagcaagacctccctccacccgccatcgcagagaaaggcgctaaccatcacaagcctcaagtaagagaaaaaatgagaacattgtcaagcctcgagtaggaggagagggcgtgagtaggcaagaacctcaagcaagacaaggagattgtcgccacgaaaacaccctagtggatgagcagtgcaacaaagttactgcctttgtcacgaccagaggtgtaacgccccgatattttactttactttacaaaataccattttaatacataatttgaaaagatctaaaaatacttgaaatacaacagtgggttttagaaatttaaaatgcaacagagaaggatccttcatttgtaaaataaaatacgataagcaaatgattttaaataatatatttccactgtgttagaattatcgattgcttaaaataaaactaaggcaccactggcgttctagatcgtttgcctgtccatagccgctcacagtatacgtaccagaac

SEQ ID NO: 267942 - DNA, 693 bp, Cannabis indica
aaccaagaaatgccgttagataggcacttttaatatataaaaatacacaaacacacagtagcacattaacacatgcaagtggtagtagagtactactggtggacccacatgaagaaaggagggcggccgcctcgctgaaaaaggaaaaaaaaagtattatataagtattcaaggacaattaggcttaccccactggcaatgggaggaaccatagcaccataggtaagccatgcttatctcttacagctacccaaacagtccatattaaatcgtaccagtatcattatggtgttttttatgggagaacattatccctggattaaatatgaaaatattcaactgtatataacaacatggattattctacttattagtaattagttttgatataaaatttcataattctcatcaccctttagttttttttattattatttttgctacatttatttaaatgtttttttttttctaattttattggtacatgtgctatttcttggaactatgaataccaatatttacattatttttaagaaagtaatgaaatggaatagaaaagaatcaatttttaatgggaaatttgattttatatacttaaaaaattaaaaaaatttattattaaaccaaaaattatttaaaccctaaaaaaactataccttttttttcaaaaccccaaaaataccccctcacaat

SEQ ID NO: 267943 - DNA, 844 bp, Cannabis indica
aaaaaaaagaaaaagagaaaagaaaatgaagctatattaacattaaatttggaaacttattaacaaataagatcaaatgatgatgccaacaagagccattatgctgaaaagagttgcacaagccacagcaacaaagcccttatctttcactaaaactccaaccaagaacattgccacgtcattggtgatcttcctcccacttttgaccagaacccgacggcggttaccggcgacggtgagaagtactaacacggtgatacacgtcaccatggtggctcttgctgcggccaccagtcccaacccaattgccataacaacacccaaaagagccagggctgacatgtagtgaagggcagtccattgtgtgatgttgtgatctgtttggagaaagaagaatgctgaaaacgacagcaataatggtattaatattattgtcgtttttctggttagagatagagatagacccatatgggatctcaatgaagaagtagaattggaaataagaaaggagggacggattgtggttgtgagactgaatatattattgggttgatgagctttaatggctcaatgaaaggaattggctggcatgtgctgcacatggaaagatggcatattggaactaatatggtgagaatgagaataataaataaatatagaaataaatcaataataaaaagttataaaaaagagagagatagagaataataaataaatattttatatatttattgaggtgatacagagtaaacaacaacataggaagaatttataaaatgtagttgggaaaatagtgtatacattaatgatacttataggggtgtttacggtacgggaggtgcgg

SEQ ID NO: 267944 - DNA, 1375 bp, Cannabis indica
atattaaaacactcacttttggggacagcagggctcaacaggcaaccattggtgatcgcacaaggtaggccaccgtactgataggaagggctaccaagtcgccaataaacaaccggctactgcttccagtatccctttgggcggttcaaaagggtatgcatctgggcataccgcataaacccacattgttcagccgtccaatccacgaccataggtctaacctgtaggccaaacattagacgcccagatgctgccggactgtcccttgggtggagttatacacaccaactttaccccaactgaaatttctggccaacctgccggccaaacaagtcagatgcaaaggccacctaatacttcagtattcgataggttgggcgttacacatgacctaaggacagacctaaatcgaagaaggggcctggacgaacaaatgttccactagttttccacccaggcatcgcatccaagatccagttcaaagagatcccaatgtgacacaggtcattcaacaggccgaaaaagttcatccatttgtgcaagcacaactagatcaacttagaaacatggtgcaagccttgaccgatccaaaactcactgatcttaaacttgaccgaccaggcggatcacctttctccctagagattgaagtccttgaattatcccccaagttcaaaatgccaatctggaaaatgtatacagggaaagaggatcctttggatctggtcgtctaccgtttggcccacaatttagacctgtggcctttgattgtacggctaacgactgtgagtttgtgcggtatgcccagctgcatactcttctggtccgcctaagggaatactggatgcagtagctggtttttgattggtgacttggtaggccctttttaacagtatggtggcctgcctagtacaatcattaatggctgcttggtgagccttcataatctccatctctcgattcctccattctatgaattgatgcctctattcgtcaaatgcaagatttatggttgccaggaggtcttcttgatcatgatgcaaaatgttattatgacttgcatgagccccagtgcctctcacagattttggattttggtgtcatctccaacttatctttgagtattagttgtggacagaacctcagtgttgggagtggaatgatcaactaccgaactggtgtttccagtttcttgtaagcctagtgtgatcccagtcagaggggaagtcactccgtggcctatagtaggaggttgtgtagtgacctgctcagggtttgtccttggtggtcctttcgtgtttccaagagtttgcacattgggatctgtcaccattgggttgccctgatcagtgaggcctcctctacgggtttgtac

SEQ ID NO: 267945 - DNA, 678 bp, Cannabis indica
aaaaaaagatacatttacaattactattactataattcaaagtgaattcttagaaataaaatccacaaatgcaataattttagggaaagactataattattaactagaaaatttgataaatttaagaactagaaaaaaattacttctcaaaatttttaatgtgtgagaagtttgtgatttataatttgtaagacgctatcttaaagtagtgctaggtgtcacggactaactattagacactcccaagtagatgagacgtgcgacacttgctggcacatcgaactagcaagtcaaccgaaacatgctgagaggcaaacaaactcaaaggttaggcacgatatatattaagtgcaactacaattaatgtatgagcaaacacaacataagttattctaataattaatcttacacaacttataagtagacacatagataaatgacacacaatgacttaacaaagacaacacacagacagcataaaatcatacacaaagaagtatgaataaatatcattttattattatatgaccttaataaggtaaataagtatacaattggttacaaagtgcttcacaagtcaccaagtcactcctgaaagattttaaaaaatttcaagaaacatatatgatattagctttgctaagtgattttttttttacaaataaagctaaatagaaa

SEQ ID NO: 267946 - DNA, 998 bp, Cannabis indica
atttaaagcacggccgtatatatatatgtatacatacataatttgtcccatataaaagtaatttgtttttgtcacatattaatcttgattaatttctgttaaaaagtaattattatatcataatgtaatgaatattaatcaaatataaatataattaatttataatgctaaatataaatataatttttgatataatgtaacgaaaaaaaagatttttttgattagcaaaactaagtacaaaaatttaaattttcttttattatcagtattaaaatcttatttttaataattaatacttttaaaattgataattaattataattaacatggataatatgcgcagcatttatgtgttattaatattgtatagattaaaaataatgaagcagtactgttttattgatgttagtacgtactcttcgaaatattgaaataatatgtatttgtatttgtctaaattaatatattgagtttttttttttcttttttggaaatgcagtttgagctatttaaaggaaataaattatcttcatatataattaatataataatttttctatgaagtggaaaatattcattgacacatgtatataaatatctatatttgtatacgtatattcacattcttatatataaaaattcgtttgatgaagttaaagaaaagaatggtcccatatatattttccgtactactgattcctccatatatattggactttccatgcacacccaactcaaaagcaacactgaattatgatgttctaaaagctatatatttatacattttgaatgtgaggaaaattgatgataatctataattagtgtaaaagttaataagggctttttaaacaagttctaagtgctgactaattacaattaaggtatctttttaaggatttgattgcattaattgttctattattttatttaaaaataaaacattatagaaccaaaaacattttcattaggggtgttcatccgatccaatccgcactttt

SEQ ID NO: 267947 - DNA, 551 bp, Cannabis indica
catttccacaattccactaagaccaggaatttcttgccatttacttacaagcaagccgcctcaacagcaattcaaccaaaaaaaaaaacaatggatcaaattttgaccgtaaactttttgtcaattgattaaaatcgcaaatctcaaatctcaaactaaaagaaaccggacaataaactaaaattacacaggaaacaaaaaccaacagagaaagaaatctataaacaggagagtttaccacaatgcttctaaaaataattacattcaaaaaatgcaatcgaatgactgaaaactatgatataaaatataaatcaatgaaaaaatacgtacaaaaaaaatacgcatctccatattccccaatggaaagcttcgaatagaaaacaaaaaaagaaagatagagataagaaaaagcatacctccactactatggcggcgttgttgttctatgttgattgactatagcttaaaaaacacctgaaatcggtatctcacaatctcagatccatacacagagacagaaaatggcaaatatccaactcttgtctccttgg

SEQ ID NO: 267948 - DNA, 547 bp, Cannabis indica
atggacaaaatggtaacgagagtgtcgagcatcacatactctcttcgagaaacttttaaagtcgatgtgaacaaacttttgatgctaccatagacttcatacattgtaattgaacaatgagctgaaactttaagatcaccttcatctatttgaattcacagagaaaaaatcttaaagaaaattcacttaattgcacagccatagtttcctaattattatgagaaaacaaatatttgatttccatgttctacattgattttcgagttgctagagaagcaagtgtgagtggttttagaaagctcccatgtattttgcaaaaaggctataaagaagtttagatgaataaatatcatcatactaatatatacctgcaataacccagtattcaatccaataatgtttaaggttctcccatgtgataaattgacttgttttaagaagttacccctttcttcatgtgattttgaaactctagtggtgtacctgcataaaatattttcatgactacacaaactttgtgacacagctaaatcattgcaagttatgg

SEQ ID NO: 267949 - DNA, 618 bp, Cannabis indica
cccatccaggtattgattaattaattgctatttatttggttgtttggtgggtttaattccttttatattgattcaattattagctcaattatcaaacctgttagcttactcataattcctgatccagcattattatattagtgtactttgagctctttgttttttttttttttttgaaatgttgagctgaaaacattgtgattaatagatctcgtgattgtgggtctcaaaaactaatggattttttgacgatttatgatcaaacagtttggcagtgagcaatggaagtcgtccaagtcaatcaacagcggtcgggttggggcctagtgaagacatgagtggctgcgacctagtgactctgcattggttttggccacttttgataggcagtcttttgtttttttgcaccacttactactcatagcttgagattgatcttgttaagcatagttattagcttagcataagagaaaagcaaaggcttttttttaagttaaggtttagttttgatcttgggattctcccccacttctggtatctgttttcagttttgtagaacttagttgacaaagtgattattaagttgaagatattcatatttgttctatcttcatgaaa

SEQ ID NO: 267950 - DNA, 835 bp, Cannabis indica
caaaaacaaggagaacaccacacaagttgcctttatctctaggctggagtctgagcttgcagggcatgaggagagactgggagcacctcttgatggccagtaggccataagggaggagtatgctgacttgtcctccgtactcacctatgagttcaagttgcgtaaccccagagctaatctgtcttacatgggtagtgagacttttgtggaaagcacgttggccagaggaaaggcgctcttcaaaagccagttgggagcagactagactgccacctatcaagaggggtcatcatcagggaattatgatgaggggctgaccagcccacttgttgaggaggtggccagccaggaaattacccatcacgccagccaacttatttgtaatgatcgtattttagaatatagattagtaaaggcaattagcgttaattattaatgttttttataattatgtatgagcttactatgttatgaattccatttttagaaacaggcattatagttataatttctcaatttcagagattttattaaactctagaggtattatttaagttatatatgcattatgtaatttttatgattttcagaaaatgcgatggatggccgtttgactcacttgggtaagtctagaaccttttgttgggttttatgccctaaataaaaatcatttcaatataatcagatttacttattaatatagatcagaaataatatttaatgttgcatggttcacatgatttatttcatgattatatgtacataatgtatgaattcgtctgaaacccttttcacatacttgatcctgttaattgtgtcgtcaacacattggaaa

SEQ ID NO: 267951 - DNA, 608 bp, Cannabis indica
aaaaatcaggagatttggaaagaaaagataaatcaagcggaagagaggttttgatctgtcccttttttctttaagaagataaaatcaatgctattttctgtggtaagactaatcctctatgtttttttatcaggaggaaaaaagcagtagaattaaaggaagatagaatcaagcaattggaggaacaggtaatacatcattttcataatgtgtttatatgtttttgtttttttaattaactaatggaattcccatctcccatgggctattatttcacttttcacagcttcgggatctgatgtcggaccttgagtcagtggcttaacttgcaaggaagctagaaaaagctaactaaaacagaaacagaaaagaaaaatcaagtctgaagatacatacatgtacaggaacaggaacaattgatgttaacttctactgctgtaaatttttgttacaggatgatgaaatattaaatttgatatagctattcaccttggtgctgcagcatattataataaattttaatttaattttctactgacgaaattattattttataatgctttctcctttgattcattaatagtatattttcttcttctttttttttt

SEQ ID NO: 267952 - DNA, 1635 bp, Cannabis indica
ttagttattgtgaaaaactaaacagacaactgaaacgaaatcaaaatcggataagcagacccaacgcactaggccatttgccaacctaggcgtcgggtaccctattcccgagctcccaagatctcgtttttatacatacaagatctttgaacttgagaacgaggtctcttaccctatttttgaccactccagattcattggtcgaatcatatttcacaattgagtaatttaaggtaacttcccaagttgattgtcaacctaggcgctaggcccaacaccatgtcaacctgggcactaggccctatttccaagggcttgtgtctgtggttttctccctgagtttgcttaaatcttcattatttataatgacagaaaaatgccgataacactttttggtgaatttgactggaaacagcctaggttgacaatatttcaacctgggcgctgggccttatttcttggcacccagaaaagtgttgtttcttccccgaaatgacctacttccccattttttatgaagacgaagaagatgcaaaattcatatcgttgatctgatactctaaaggtgcctagattaatgaattgtcaacatcggcactaagtgcttggggccccagggccctaaggctctgggtcctaaaaaatgaacttactttctgattctgatgcctcaaatatgtccatggtatgtcaagttgatgtcccaatacaagttttgacccattttcactaagacgatcctgaaaattaaaaccttaattgggaatgtctacctagcgcgggtgaaaccctaggttcccatgttggctttcgagttgcaggttcgtataagtttagctcccagggcttagattaggttgctccatgtcttcatggtacaaaatacatcagtctcttagcttcatcccagttagtttaaaaaataccttgttctaagtactgtgtaattgaagtcatccatgatggactgttgtcgattatcaagataggctctgagtcttcatttatgctccatttggtgaggtattcgatgggaactacactgagagtgtcaaaatctgttgtaccattgtcgttctactcacgcgacacttgttggatggagtagttcttgagctaggccaatagatctttaactttgcttaagtatgcaatcatgttcaaccctcgggcttgatactcgttgagaatttgattaataactagttgtgaatcactgtagatctcgagtgattcagctttgattgctaatgctaatcgtagtcccgttaggagtgcctcatacaccacttcattgttggttgcggtgaactcaaactacaatgcattggggagcttaaaatccctatggaataactaagatgagtctagcactgaaccgtgcttgttagaagatccatctacatagagtttccaagaaggtccagtgtcaacctgagctagtctcaggcgtgtggacctagtcttcacaaatcatgagatcaacttgtcgaggcgagtacatttaacatgaaatttctaatgcctgtccttgattgtcttcgaggctggtaggtaatctcaaactgacctagttcaactgtccacttgagtaggcacccttgatgcttctggcttcattgaacttgcttatgt

SEQ ID NO: 267953 - DNA, 909 bp, Cannabis indica
taaaatacaattcaatactatacaatacaatacaatataaatacaatgacggtgtatacaacatactaagcgaaaccctaaacgaactaaatattttaatataatgtttgcaacaagaagaattaatacatacattaactatttaacaagtcaagaagactagagagtagcctcatcaggacaccaggtttttttttattattattattatttaattaagtatcaagcttgtttagatggtcatctctccaatgatgttgataagtttaccgtggcacaaccatgtgcactagaaagtatgttcgagttgtaatgagattgaactcgcgtgatttaatccttaacaataaattaaattattattggagtattgttattagacaccttaaaatacaaaatgatgcttaattttggggccttttccaataagtttcaatgtagatttgaagtactatagaaagccataacttatttaattcaaggaaatttcctatgttaataattaattacagtgttttaagttgagtcattgtagtttgacatgttctactttataatttaggtacgatggatgtgtttatgtatatactaaattagaatgattacgtatataactaatgcttaatggagaatataatatacaactttgaacttgaagtaattaattatatttaaataattatagaagagtaagattttattaatatatacattgattaattgtatattaattgtcctattatttgaacctgtctttagcaataaattcaataacacagctataatattattgtttctctaaaccctagctatatacgtatgtgtatgacgaggcttttagtattatataatatttatatagggatataatttttttccgtgagcggtactttcacggaatgtatttcg

SEQ ID NO: 267954 - DNA, 1376 bp, Cannabis indica
ttttcatacactttgaattgtatatcttaaggaaagagtgtttatgtttgtagagaagagcttgttcgactcttactctgtttatttgtattttgtattatcttgagtttgtattcaagcctacaaagaagaagaagaacattgctacttttgggagaagatttttcaaagcttccgggagattacttttcaagttttgcatcgcgaggaagcaagcagtactcttcaagaagatcgaagggagttcgagcacttgaagtttcagcaagattcgattagaagatagagtacatcaagcttgcggcatataataaaagcaggggcggagggatgttgtgctgtacaggggccatgccccctcatctttctaagaaatatatacatatatataattaactatagcttcctcgtatatatatgttattaaatttattttgactttttaatttaacttttttgttgtgcaatttctataaatataatataatattatattagaaagaagtggtaaatcaattcttatttttattcattatttttattcattattattttttttattttaaaggaaaattaaattacttaattaaacaaatatttaaaagtaatataagaattaaaaactttaataaaaattatatattttattttctcattcattaaaggactaagccatcttcctaatattagtcacaattaagttatattgggtaaacccacaatatcacctatcgagttttatgacattttaaaatttgtgagctaaatttcgtggcatatcagtaatgtttggtgagtttaaaaaaattgaattcaagaagcttcttaaaatagtttaatgtgactcattcattaagttggtaattttaatacacatgtaaatttttatcatagttttagaataccactcagtgtatcgtagttttattgtaattttagaacagctaatattaggatttttaatcttaaaatttaaaatgctatcattatgatattatgtagtattgaatatattttggaatgtaaatcacaacaatgatattgatttatacctatttgaaagttgcagaaaaaatataatattttatatagactaaataagttaaaattttagtgagaactagagtaattttggcatccctaaatatttatttctcgctccgccactgaataagacggagtctatttatgtataagtcaattactttgtatttttgagatctatttaatgaatcttatccctgggcttggtcccgtgaactagtaacaatctgaaaggattgttgaaactacgtacaaaaatcttatgtattttttacttttctgcactgtttgtttttctgatttattctggagttacagaattgtcttctgta

SEQ ID NO: 267955 - DNA, 1366 bp, Cannabis indica
ggtttttggatttggtttcagatctgattcatgcgttttctgagttgcccagtaaagatctcaacttcatacagcactccagcagattgggttggaaactgtaagcctttttcctgtcttagttttgatttttgtatgtatgttaattatgttgtaatttgattactgaactttgttttggttggtagggaacaagagaggtaaaccaatgtaattgatccggggctttacagaccttaataaatcagagatctggtgggctatcaaacagagagctctcccaactgcatttaagctatacacaggtcagtctttttttattctcttcacttattcaaaatttagtctttttgtgtgtgtatgtatattagtgtttttgtctttttgtttaccattaaaaatagataataatagtaattaaaaaagaggaagcagaagtagtaaactagaagacattgggtttggccggcttctactcattttatattttatatatatatacacaatggatttgaaattgaactttgaaaatctttgagattagtggtgaggtgaacatgtgaatttcttctgtgcaaaaatgacacgtctaaaggttgctgtaagtacaaggtacaattgttagcttggtgatggcgatgacaacccaaaaaacaaataaaataaatctactgtacaaaaagtgaaatgcatgttgtggtttctgataagctttgaaatgaaattgtgaaaacgtgggaggacccacttgaaagttggaagtggtggggggtaataatttggttggtttgtttttattaataaacaactccaattctcttaatattttcagctacttgaagcttgtttcttgggcttcttcttctgtttcaatgttgtcttcttagctcattgtttcattgctaatggatatgaaaaggaatttaattgttatgaagaaagatttgaatttgctaatgaattttgtaaaccattaccacattacaatattagaatgtctctttcaattttttttttttcttgatatattaattaatggccatatgatggtaggtatgcaactaccagtggctgtagataatgccatatgtcacatggatcttgaaattccatacattaagtcattttcaatccacctaattaataacaatgtcagccaatccaataatacgccaccagtaccacccaacattttttctaaaatcaaacttaaaacttactagagtagaggggagtagagtgtaattttggacatccatgagagacatgtgcactgtgcacattgcatagcagagtctggaagatgcatgtgcctatcacatgatacactggttaatggtaaagggaatgcaacgtggcttcctgc

SEQ ID NO: 267956 - DNA, 1599 bp, Cannabis indica
cgattcatagttcaataaaccttttatgctttagtagtttgatttactagtatgattaagaaaagcctaatatgaagcatgttagtagcttgatagatgaatataggtgcatgtttattttctcaagtaagcggtaattagattttaatcttgatcgcaatctgactaggctaactcatggtttcacaggctactctaataaaaatgtatgctaggcaaaacacgagaagccaaggtaactcggccggatctagtggcagtcagggagttcagttttccctaatgtttatggctgaggtagggcacgcatttgaggtaatgtaaaaccattgtaggctgctattgcaaggggagccagttgctattggaaatcgtatagaaccattacatgaaaggttccgtaagcaagcacttccagtctttttggaaggttcagatgttatgatagttatcaacatgatactgaattttatgggagtcagtggcaacgatagagtgacttatgctaccttctaattccaggaggatgccctaatccagtgggacatggtatccttcacccgggacgtcacaaaaattacctagaaagaattgtaagaattgttcaatgcgaactactataatgaggtagtttgtagtacaaagagaaaaaaattcactcaattggtccaaggggagaatatgtcagttatagaatatatgaaccaatttgatatattagctaggttggcctcgggaatagtgccaactgatttcagtaagaatgaaaaatatctagataggttgaagcctaagatcaaacaagatttgatgattacattggatgatgaaactacctatgttgatagggtagggaaggcaacacgagctgagggcgcagtagagtgtactcaagagccctgagagactcctagtgttagtggggccactgctcctcctacgtacctctggttttggtaggagtggtggcgactcaacctcttatcaaaaaagaaaagccacatttacgtctggtggctcgagtcagaataagaggttctgagggaaccaagaccgtgataatcggtaggatggttcagagagtcgttacacttacttggaatgccccagttgtaaaaagcatcatctgggtgagtgtaaaggtcgagcatgtttccagtgtgttgtagttggacattacaaaagagactgtcacaattaaagaaagaagagtagaggacagaggcaaagcccactctagctagggtgtttacccttacccaggctgatactgaagctagtccttcagtagtgataggtcaactttcattcaaccactctttttactctttattatttgactttggggccacacattcctatgtggcggccaaagtcattgataaattggataaaccgtgtgacagttatgatataggatttagaacctgctcttggtggagaattagttatctccaaaaggtcgattaggtctatgccaattaggattgaagatagggaattgattactgacctagtggaattaagtatagagaagttttatattatactataagtgaatttcttgaccaagtacgctactagtattgattgtaagca

SEQ ID NO: 267957 - DNA, 584 bp, Cannabis indica
ttttccataatgattgaaatttttatttttaaaaagatttaccatctttttaaagtatttgcacattctgattgtatatgtccaaaactaggacattgactacattgtacaccttttttattgttggatataaaatattttgaataaatattacctctcgaggacttagacattctttaattgttgccaacctttgaagaataagatatagagcaattttgttcaaaaaatgacatttcacacaaaataaatcaaatgaaaataaccataagatctcactaagagtttaggaaactgctctaatagtaattgacattctgtgttctaatattaccaatttcttatttaattaatcaattaattaaatgtgaaataataaatatagtgctaaaatagttattctatagatacagatacaactttgtaactacagaatagaaaaactagcaaagaataataatgcagaaaaataaaaacacacaaggtttttatacgtggtatcaacaatcttttgagattgttattagtctatgggatcacacatagagataagattcattagttagatctcaaaaaaaaaaaaa

SEQ ID NO: 267958 - DNA, 678 bp, Cannabis indica
atcgattacttcgagctaaaatttttcctcttcttgataattatggttgtgatacttgtgttaattgcactcgtggaaaattgactaaaataagaaaggagactatcaaccgtagtctatttttattagaaattattcacactgaaatatatcttacaaaataattatcatatactatagcttaacttaaaaggataacaacatattataaatattaattttgactattttctatttattttattatattattacattattttattttgattgtgaatatcgtatagtaaaagtgaaatacaaattttataagcaaaaaaatgtacaagtacaaaaaaataagttgtctcgtataaaataaaaaaatcaaacggtgggcaagagaaagtaacgtcgtcggagcaatataaaacggtgtcgcatgagtccccgcggttaaaggctctaaccaccaagctccacgcgttagtcgttacttagttttgaatgtcgttcagtcttttcttctggattgaacatttgatatgacacgtgtgaaaatgacccatgaaactttgttgatgacgaacttgacccttttttatgatgcttatgtgtgtggtgacataatctctgttggccttttgtgagaagacttttttattttttcattattatctattttatttttctattttt

SEQ ID NO: 267959 - DNA, 914 bp, Cannabis indica
aaagaacctcagttcatagattaaacccagaaaagtttgggattcacagggggtaatccctcccctttaacaacctgccagacacccaaatcacggcgtgtggacttagccaaacggtcaacataaccgataatatctcttttaacaaaagcaaacttacaacaagaaaaggcagaaagtaaattcaaaataacattaaaagcagcaaacgaaatccattctggagctttcctcatccgaatagcttccaccagaattttggaatcggaaacgacagttaaatcatccaaccgattttgaatagcccattgcagtccatggataaccgccatcatttccgcttccaaggccgaattgcaagagccagaggagacaccggtccaccactcggacgaacacctcgagatcgacaccatagcacagccgaaatttccttcaagaaaggaaccatccaccaggagacagagattggtagataattgggggacctgcaccgatctggggattccaaggggcgattgagccaaacaaacttgatcaggatccaattcgccaaatctcctcccaacttccaaccgaaccatatcaatactctgaagagcttccttggaatgaaagatatgatttctttgcttccaaatacaatccataataacacccgcatatacaagcatccttcttctgagagaaggggacaaagaagaacaaaggttgcttaaaaacatgttgatgctatcccctggtattgaatcaactctaaccgacaaagggccagaaaaccaaattgcagtcgcaaaagggcagcgaacaaacagatgaatggcattttcagggaccgaagtgcacacaggacaaacattaatagaattgaacttatcagcagtagggagaatctttagacaggttcgccaaag

SEQ ID NO: 267960 - DNA, 1447 bp, Cannabis indica
tttattagggcataaaacccaacatccccaagcatctacagtggccttcaatagtggacaagtctttgaatttcactttctcattcttttcttgaatcttccataaatgactttaagctttttcaagctttttgaaatctttgattctcacgttgttatgtagtctcttttacattataatttgcttgatagctttaggacatataatgtatgacttcatgatataaaatattggattttgagctcaaattaaattcttgactctttgagtcacgaagaacacgaagaactttgtttgagtttttgaaaaatagaagtttgattctcctgagcctctggccggcacatagggtatgtttgtgaccctagtcagtccatgcttataatctaggaccctagttggttcgttcccctagccctagaaagttgggcggttcacgactatgaatcccatacctggtcggttcatggttttgtacccaaaacttggctggttcatgacatgtggtttggcatcatgagatttggtcagttctagcccatacttagtctttgtatagactctgtatggtgtctcaagcccatttcacccttatcacgtacttgattcccatgggaactttgtatggcatgtcttaggtggagtctaccccagccaattagcggcatgaactcaatgtctgtttaattttttgtacctggatctcgtactttgttgcttaacgactttgtacattagggctgtctggctaacacctttagacttaggccaattgactcgtgatttgtctaagtctttttatttcgtctggttgctcacctccctctacctttttacatagatgaacatgaacgacttttggggaggtgacaactggattgacgaagacttgctcagtcttctctacaaagaccatcgtctagtttagttagataattcttcttctaagggttcttcgggtagctccccgaccaattttaaggttagcagtagttctctggaacctgaggttcaacaccaccattattttgagcgaatagaaggtgagctacggtcggttcatctaggaactaaactaggggttgaggcagttcctccccaagtcatggacttatattgtccaattcggtgtgcttgacacgttgcccactcgatgggcaattcttttagtcagagatctccacgcagccgaggctactgttactattgctaaacagtttgagccatacctaccatggctaggacaaagcaaacgtgtcgtagggaacctcctaaggaccctctcattgctgggttgatgacaagaggacgtgtctgtcatgtcgaacggctgaacagccccaagctgaacaaccagaggccgggtaggctgaggaacctgtggctgagcaacttatggccgactagggtgaagaaccctcggtcgatcaggatagtgagtttgag

SEQ ID NO: 267961 - DNA, 611 bp, Cannabis indica
agatcctggtaaaataaattccaacagttgttgcgatctaaaactgatgcaagacgacgcgtgggatgtcaacttggacgccaatactgttgttggactcgagctggcatccaagttaagcctgggatgtctacatggcatcctcagcctcatggttcatcattttagggtcattacgacctatttggttgaatttattgaaagatagcacccaaaaatgacttcgcttgatcttgatgcctacctgggctccccctaatgtcaactagggcaccgacatagttcccagactcaagttgacattcctaattaatctcgagaggtaggggctagggttgcttttcttcttgccatgtgtcaaaagtggtgtctacatcatgaggtcaaatttttgggtaaacacttacaagggatgataaaagtttcctatataaggtaaaattattcacctctcaaattattatttttgagataaagaatataaatgatgtataaaattatatacatactatataattttaattaattagagaatagccacaacatctttaattaaataaaattatgtattattaatctcatttttcttttatctttaagagtaataaaat

SEQ ID NO: 267962 - DNA, 1019 bp, Cannabis indica
aaaagtaaaaaaaaaaaaaagagttatattattacacaaaatgtataaaaactcatcaaatttgtaatttctactataactattaatttactaatattacgtttatattatatgaataaatactttttacatataaaaacacaaatatgtaaacatcctaaaaataactaagacttctcactaagcattccaatctattaggattgggcttatattgggttgatttttattttgggctttgtttaggtttttaccactttgtataaataccactttttcttattttattgggtaatcagaaatatatttttcctaatatcctaatatggtatcagatgaaaccctgttctctctctcattctagaatctttttcaaaccctaaccctaaccatggttcatacgagaggtcgttcctctgcgtcggccgccgccaacaccgctgatcttccttccccggttgacgctcctcatcagactcctcgtgcgactccagctccctctccagcgttcttgccgactcctccctcgacgatcgcaccgtctgaagcttcgtcctccactgctcctcctccttcgacgattgcacctgttgacagctccctcgccgacgcctcttcttccccgattttatcttcgccacctgagatcgtgaccgagaatgctaccccgaacattctgctgccaacttcacgtccccctagacctctttcttcttcgccgatcttctcaaaaactcttccaacgggattcacacctatctcctcgattccctcgattttcccaactcctcctcctgtggctccgacggcctccccctcttttccacctggttttggtttctttgacactcctcgggtgaatcttgatattgaccttccattgatgaacgcaatccgtatcaccttggaactggagacaatcccaattttttcattgtccccttccaattgactggccaagataatttccagtcatggaagcgtgcttccacgattaatctggctgccaagaacaaaac

SEQ ID NO: 267963 - DNA, 518 bp, Cannabis indica
gtcaaaacaagtttacaaaaatccaagaccaaaagggaactagcactgcgagggcgctgcggcgggcccttacaaaggagatcccctatatttttggggctcatgggagctgcaatacctgggtttaaaaacccaaaacacccaaatttttaccatttcgaaaatacaccaattcaactaaactttcatacctattaccaaattggtttacaagtccaatgaaaatcattataggtaaaatttccttcaaaatatacatgcgtaaaacaaatatatcactaagctcaaaattaccaaaaactcatgctattaaactcaaagaaaatcaagtaaattcatgtttaaactcaccaaaatgacatgaataaagcaactagatattggcctaaatattctgatgtagcaaagctcaaacaatacaaaagtcccaagcttagcatctaagaccatttcatagaaaaccaaatcaagctcaccataattataccattcatgacaacctatgcaaattcaaatta

SEQ ID NO: 267964 - DNA, 769 bp, Cannabis indica
aaaaatggtgaataataatcagaacttgggataaataagtagaataacaacatgtgccagccagttggatgaaacatacaacgtgttcttctacctaattaaacatggaattaatatctcatacctgttcttctattgaaacaacttaccacacacacacctgttcaatatcaacatgtcacaaacttgtaattgacctgttattattatgttataatgggttaaaataagttaatttttctctcttccgattattagataatataaaatatatatattgggggttgttacaagaagacgatgtgcaaaataaacgagtttactgtataaaatgttctaatttcattgaacagatcttgtccggaatattacttcgtttgattggatactttaattgacaaaatggctttttttatattcataataatatcgtaaagactaaagaggaaattgtatcctcagtagacgtggtttggcgaagacttgctcgacatgtagggccctctcctccaccaccaccaagcataatagtcgttatgcaataatgaccactaatttctatggcctacccaacttttcttaatagatttagggtcccctctctatataaaacttgccctcatgaccaatgctttggccgctgattgttgactactcgtttcgaaaaatatctaatcataaaatcttattttattttatatttttttcgtggtgagtatttttttcttctctttctagtgtgtctcgctctcacaccattcaaattgat

SEQ ID NO: 267965 - DNA, 1701 bp, Cannabis indica
ctccaggtgaaaggaagaattatggccaacaggagcattcagaaaatcatagtgtttaaaataacgagctttgaggatagaatgaatgagggaatctgtatctgcccacactctccaagcttgcttggccagaagagcttgattatgaaaggagaaggtacgaaaacccaaaccaccaaagaacttagagactgaaattgtagaccaatttttccagtggactttgttagtaccctgagaaccccactaaaacctagctatggcactctggatttttaggcaaatagatttaggcaccttaaaacaggacatagcaaaagagggaatggcttgaaccacagcctttatcagagtttccttcccagctctaaagaataacttatcattccaagagttcaagcaggaggaaacactttggaggaggtaatgaaaaatggaattcgtaaccctgcccacacaatggggaacaccaagatatttgctaacaaaaccctccccagttagatgtaaagagtgtcgaaattgtttctgagattcagcagaggtgtttggggaaaaaagaatagagaacttgtccctattaaacagctggcccgtaactcgattatacatatgaagaatggcattgaaggcatcactagaacgaggagtgacttgggagaacaacaagctatcatctgcaaacaagagatgtgacaagggttgggctcccctacagatctggatgccaggaaagcttccattcgtttcatacaaacggatagcagcagaaagcccctcagcaatcaagagaaaaagataaggggataaaggatctccttgacgaatgccacgggtagattgaaaaggattagtgagggtaccatttatagataatcgaaaggagacagtagacaggcaattcagaataagagagatgaaaggtgctggaaaacctacatgaaaaagcaatcgatgaagaaagtgccattcgaccctatcaaatgccttctccatgtcaagtttaataacagcccaacctatcttgcctgaacgtctagagtggatagcatgaataagctcattggcaatgagaatattgtctgtaatatgacgaccctgaaagaaagcactttggttgatgcgaataatggagtgaaggacaagtttcaaacgattagcaagaacctttgagagacatttgtacagagtattacaaagactaatcggtctgaaatcacggaccagtttgggatttttctttttcggtatgagaacaataatcgtttcattgatcagagaaatgtcaccctgatggttgagaagttgaagcatagctcttgtgaaatctttcccaagggtggaccaattttttgggtagaaatgagagttaagaccatcggggccaggagccttatctcctgaaagaccaaataaggcttgcttaatctcaagctcagtgaaaggttcttcaagaaaagctacctgctgaggggaaagcctggtggagatcccatgaaggatagagtttatatccatatcactcactccttgagagttgaaaagagtagtgtaaaaattgagaaattgggagattatagtaggagtatcatgagagatggacccatcaggaagagtaatctgacgaatgaaattgttctctttacaaatagaagcgcaacgatggaaaaattttgtgtttttatccccagcacgcagcca

SEQ ID NO: 267966 - DNA, 564 bp, Cannabis indica
gttcgatatacactatgttctgcacatcaccataaaggttcaggcactagcagacttcatcgaaaggaacgaagcaaaggccaacaccagtacaccagcccagaagatgtcgacatggaaagtgtacgtcgataggacgtcaaatgaaagtggatctggcgccaaaatagttatgatatcactagatgggctatggatccaggccaccctacgcttcacattcctgacctccaactatgaagctgaatatgaagctctaatcgcagggctaaggcttgctaaagttgcaggggctgaaagagtagaagtttttagtgattctcagttagtggtcaaccaagtgtcgggagagtaccaaacacgaggagaaaaaatggctgcttatgtggcaattgtcagggaactgctccacgaatttaaagaatacaaagtggaaagaattccacgagagaagaatgctcaggcagactgcttggctaagctggcttcagacaacaaaatagaaaggctgggggcaatacttgttgagcatcttatggaaccaagcatcaaaatcaaagagac

SEQ ID NO: 267967 - DNA, 672 bp, Cannabis indica
tgatgttcagcaggaacatgttgaacaaggatttctttgttcagcactttgtcacgaacataatgaatgtcaacttctatatgctttgtgcgcgcatgaaggatgggattagctgagagttgcacaacactgaggttatcacaccaaataaccgggggagtggctggagattgatgcaactccgagagcaaggactggagccaactaatttcagtaacaacagcagcaaggctgcgatattccgcctcagtcgaagatcgagaaactgtttgttgctttttggattgccagccaacaagatttccaccaagaaaaatacaatagccagtagtagagcgtcgatcatcaagatcggaggcccaatcagcgtcacaaaaggcttcaatatgcatggttgtggggcatttcatgtgtaatccatagtcaagagtgccagccaagtatcggatgattcgtttgacagccacaagatgagactgaagaggggactgcataaattggcacactttgtttacactaaatgcgatatctggcctggttatagttgcatattgtaaggcaccaaccaaagatctgtaagttgttgcatcagctactggttcactcccaaagttagacaatcgaaggccactattcattggagaactttgtgtcttcactccctgcatctca

SEQ ID NO: 267968 - DNA, 501 bp, Cannabis indica
aaaaaaatttaaaagaaagaaaaagatgtcatgtattcactaatattaattaaagaatgtcctaattacaacctaaaaaaatgcgcacagtacactaatttatgtattttttaagtacttaatacaacaattaattgtgatgcaacgattataaagataaactgaatgtaatgttttactgaacaaaattcagtcctgtatatttagatgtaaaatgttatatgttgagaggtgtagtaaataccagttgtagcctccggcttcaaactcagaacggtaatgagttattggagatttcgaaagagacgcaaatgattcgattttaagcaagaagtgacttggcacaacatctcttcctgatagaaaatatataaaaattaaagggttaatgaggccataactatattgcacaacttttcaatgataatatagccaactaggtaaggctgtaatatagcagggcttttcaaaaattaactacatcatcatagcaattatgtt

SEQ ID NO: 267969 - DNA, 727 bp, Cannabis indica
ggatgggatatttttcataaatatagaaaaatgatttaaaatttacttttatataacgtaaataaataatgtaattgttgtgagattaaaaaaaattaaagtttaaattatgaaaaatcaaataaaagactataaataagtttgataaaatttctaataacaaacatcgctaaaaaagtcattagagaagatactgacaatgaaaaagtcatcgatgtcgaaaattgttgctagaaaagtcatcgtcactaaaaaaattatcagaaaagtcactggagttgtctcatcatcgaaaaaggcgcaagagttaaatatcttagatataaattaaaatataaccgattctataatataataaataaacatacacaataactcaaaccggttataattaaataataaaaaagaaattagttcataaaacactcaaacataatttaaaaacaaaactagttacacaacaaaatgagtaaaaatgaatcacacataatacctcataaaccggttataatttataaaaaaacaaggtggtcatttccaaaaatactaaaaggcataaatctaaacagaatcagtttcataaaaaaaataaataaaacaaataacacacaataactcaaaatataatataaagaaaccaattataattatcaactagttaaaaatttgagacaaagaaacggatttcgtaaagcaaccaagatataaaaacttacacacaaaaacc

SEQ ID NO: 267970 - DNA, 1947 bp, Cannabis indica
aaattaatttttaaataaaaaacaaaaatttaatgacctaaataaatcaagaatggcaattataactttaaatattattaccgtcaaaaattaaacttagttatttaagccgcaaattactctttttataataataaaaaaattaacaattatatttttataaaatatttttcaaaattaactaacttatatttaatatattttaaatatataaaatgtgacaaaccttatgccatgaccaggcccacaagtaatatctgtggctctaacatttttttgacccacttacaattgaaatgcagtcatcacctaaattaataataaaaataacaataattattaattaataaaataaatttgaatatttattaatttattaatactaattaattatgattaattacctgttctgataacagagttcataatctgaatatcttgtgtatcagtgatatgaattccatcagtattgggactatttccaggtgcaattactctcaaattcatagcttcaacattcacacattttttggaaaatttatatgcatttgttgtgcatttttagacctcaaattcatcactttcagatttttgcaatcataaaatgtcacagcctacatatatataataatttttaaaaattattaaataaataattaattaattaattaattactatttgtatttaattaataatattaattataaagggtaaagaaacttacagttggagcatgaatacaaggctgtgaatgaaaaaagacaccaccaaatagatatataaagaaaaacaacaaattattagaaaataatttttaatgagaggattaattattagggattattagaaaaaacaacaacaaaaaaaaaaaaaaaaacaaaaataatggtcgtacgaaatttcaaatatttttacggttttttagtattttatttacataaaacaaaatatgatcttttgatatatttttatgttgtaatcttattattttattgttggtattttttttttatgttttgatgttgcttgtatgttattttcatgtaattttagtattatttttatgaacaccgtaaaaatataaaaataaaatctttaaacataaaactgtaaaaaatttaacaaaaataataatttatgtaaattttcttaattattatgtatacaatgacagagatagaagccagaggggtgccatgtcccccaatgtttaaaaaatcatatgcaaaaaattattaaatttatagataaaataaaataaataattttttatatatgtatatatagttataaaatagaaaatgtaattaatattacttacaagagctttgttgattttgcaagagttaatccaccattttctaccattgccattgatagttccaccaccttcaactcttaaattttccacattattaaacacaatccaatatcttgtgtccttttggtaatctgatcttctaggtgaagctttaattgttccagatatctatatatatacatatataaacatgtatattagtatatagtatttatatatacattaatatccatgcacaaattaaaatgtacatacataccctaatagttatttgagaagatttgcaaggaccagaaaatgtgattggtttaaggtaataaactttgttcttaggtaccaaaactacgccgtttttcgatgaacaagcccgtttccatgccttgtaaaatgcctaaaaaaaccgagtatcgagtgtgtattttaacaaatatgaaaaaaaaaatagtattttgcaaatattatcgaaacaatgttggcgtacctgactatcgtcgtagcggtcactcctagcaccaaatcgtcgacattgaatatttgaggtgaggaagacgaaggagaaggcaatgatgatctagtgttcggctaaacctgtcatcagaccatgagtgttaccagtttttcgcga

SEQ ID NO: 267971 - DNA, 782 bp, Cannabis indica
atttatagaaaccgacagttgtctcaaacaatacgacagagatctttaaaaacgccaacgccttaagggtaatagaacaacattgaaaaacgacaactttggtttttattttagcataagaaacgacaattatctggaaacacaaacaaattaataaaaaaaaaacacattggtaaaacacgtaacttaaaaatagaaagaatatttccagccaaaaataaaaataatagaaagaataaagaaagaaaaggtttgggtgttaatgagaattaattaatgaataataaatatatatagttgattaagtaaagcagcaaattagcttaaatgaatgtgcacagtcggtcacgttaagtatactgttagtgctctaatataaatataatatatatgtgtatatatatattaaaccccaatacaatacaacacccaatttgtgtataaatatacatataatatacgtttgacacttgacataatttatatatgaaaaatgcaagttgtctaaccaaaatgtgtctagcttttacgtaaataatatacataaacataattaggtacacgtgtgcccaacatataaatgaataagtatatatatatatatagaagtatatatatgtgtttcattcatgaactacactaacttaattactgcatatattatttatatatatatatttgtgtttgctcatcaagtgataaccatgaacccaccagatactcgatggtcggtactccactccacaccacaccaatgcatcctatagtttcagcaccaccta

SEQ ID NO: 267972 - DNA, 1898 bp, Cannabis indica
tgtatataaatgaaaattgccttttttttccaattggacactttatttactccaaatgaagctacactatttagcctggctaggggtgtgcataaatgatccaatccaatgacaaccgaccgatctaattacaaccgaccgccaaacattgaatatccaattgtgatcggattggatgttattttttaatatccaattagatcggatcggatgttggatggggtgtccaaaaatccaatacatccaacatccaatcgaactaattagtattttcatttagtttggatgagtaaatacattttatattgtcatacgtaaaatatacatgtatatataataattaacatcaaaattttactctttttttttggattggatggatccaatccaatccaatacatactggacgtaaaatattggatggatctgatccgatcgaaaatactaggtcttaaatattaaataaatccaaattaaaccaataaatatatatgaaatacatccaacggatagaaccgatccaatccaataaccaatggatgttggatcgattggatgactttgattggatcggatcggatggtaaaatctaacgtccaatatataattagatcgaataaggataggtctaaaaatattggatgtgatccaatgaacacccctaaacctggttataataattttactgataagaccttggttagtcaaattcgttgtagcactagcaaattatatatatatatatattagattgatgttacgtgcaatacacatataattgattttcctttttagttaagtttaattaaatgatgttaagtgcaatacaatacatgtatgtttaatttttttaattatgtaatgtatttttattttttaatttttaaaataaggtttaaaattttaatctttgagaatttttttaactattctaactatattagtgtgctctttagatgtgattataaggagtacgaagatcgataattttcttatctaaatgaacatgtggcaaatcatataaatcaatgactattagtcatatatcttccaataaaaattaggtattaacaacccattattcaacctaaaatgaaaggaaatactaaattcaatagtcattgcatttatttttatacaacaaaaatttcattgttacttcaatgtatacggaatacattattttaattaatttacttaatagttttaactatctacataattaaaatttaaatttaataatgagatataaaatatctacataatttttatttttaaatatatgtaataatattgtaaaattaataaataatattttgttaagaaattgagatattctaataaagttaactttaaaaatcaaaaaacacattaaaccaaaaattcttttgcatagcactatatatgttttataagcaatttacaaatttacttatattattataatacttcaaaccccaacaaaataaaaaaactataaataaactttttcataaatactaagctactcaaaaatttaataggggtgaacaagccggagaaagttataaaaacaaaaattggctaaaaattagtgaatggctaagaaaacaaaaacaaatatctaacaacaaatactatgtttagaaaaaatatagactccataatgtggtgaagtagattcaactgctcaaattgtcaataattctagaaagagctgaataggttccaaagcttgatgacaccacacctactgtaatcacaacaatgcacattgctccctggcaaaaccacaatcaaataatcaaaataagagttatgatacaaagattaatgtttattagtgaaaaatatttgtcatggaatacacaaataaaaatatgtagttaatactactactaacctggactttagttatt

SEQ ID NO: 267973 - DNA, 595 bp, Cannabis indica
atatatatatataaagatagatacacacatttattttataatgattacatattttgatttggatcgtatgaatatgtatgattgaatttggtatccatatatttagttgacagttcaagattgcttcttatttatgtctttattataaagcttgtgtatacacatggaatgtttttagagaacatgttattgagtccacatccataaatatgaatgattgcatggttttaattatataagaaatttttattagtgatatttaggtatggaattggattagtactctttctttagtttcgaaaaatggaattatggaaggtacaaatttttgatgcacgtgttggctggccatacacgtgttttttgttcaaaaatatggtagataaaaacttatgagaaatgctaaagggtactagtggtgcctcatatatatggaatactttttaatgggtaatatcggaactaaaaaaaattaataagataatgatctaataaccttttttatgtcaagtttctaaaaattattttttttaaaaaaaattatatttatttttataaaattggaaaaataattacaactaataatttgaaaaaa

SEQ ID NO: 267974 - DNA, 1187 bp, Cannabis indica
aataactacatgatctaaaatcaatggtcgaaaaaagttccttacctgtagggaacttttgctgggtcctaccataattttaccctctctcattgaagaaatgataatgaattattatgataaagagagtttttgatcactaaaatttttaactgttgtttaacttgtatttaatttgataagcttaaattttagctctaattttttttttaaattattgaactagtaaagtgttattttattgttattatgaactgcttctgtgtatattcttgtacatattttattatgtgtattaatataaatgtgttatgtatattatacatagatagtttatattaacaattaattgtaaaaaatagatgatactttaaattaaatttaatagtattttgataatttagtagtttaaaatattttacggttaaattttaaatttaaaaaattaagtatgtagtaataattaagaagattttgacaaaaaaaaaaaaaaaaaaaaaacccccttataaagatgatatcgatttcacgatgtcatagttagtttgacttagatatgttcattattaattatcatttctaaagtggtggctagaactttccttgttttaattcattgtcgtttttcctttatttttctaagtttccatcaatatcaattctgttgttctatactatatcgtcgtttactaaaacttgtcggattattttgtactgtcgttttctccaataattgtcgttttatataaagctgtcgttttctggtgtttttctcgtttgttaaagtattgtcgtctaataccattttcgtagttttttgacattattgtcgttttatacagttcagtacttcagttttcaaacattactgctgcttgttaattaatgtcgtttttttccctagcatgcagttttgtcgttttatacttttatagttgttttgggcattaaaagcatgcacatatatgaataattaattacagttctataattaataatctcatgcttattattatttctattcgatctctcatgcatgaaattgagaccagttgtacgtacgtatacttatataaatatttatatgagtatatgtacatatatattcatgccaccatacaaaattttacttttagtcacaacaaattttttaattaaaagtaaaaaaattatgactaattataaat

SEQ ID NO: 267975 - DNA, 738 bp, Cannabis indica
tataaccatttttgtaattttttttgttatttttgtatttgtgaaataatcccttgatttatttcttactcaataaaatccataatattgtatttgtaaagcatattaaaaatttccacaaaacttttaaattaaactttaaaaataatctaaccaagcacacagctatttgcaatttccttttcactagtaaaacaatgcaatctagacaaatataatggcttaacaaaaaaaagaagaaaatactaacacaaacagaaaaccaactaggtaaaaaataaattaattaattaaaaacttaagttttttttccaaactaaaaattcacattgtccccaataactataagaataaagagacaatacttacctgagatacacgccaaaccaaattgtgcattttattattattattatttataagaacattacaatagaagaaaaccaaattgaaagagacgtagcctagctatatagctaattggatttcttacttctcaaagcaaatgccaagtccgagagtgctctcgtggaagaaccatcgtgactgagtgccttagcagccgcatctttaaactcattcatacgctctctaacttttttaccctcttcacaacttcgatccatcaccaccttcacaactctcgcaatttcatctcgtccaacaatcccattttcagcttcatttggcgcaacgcaactttcagcccatctacaagcataactgcattcatttttt

SEQ ID NO: 267976 - DNA, 643 bp, Cannabis indica
tgtcatatagagaggttggccagttctagggtttaacctagaatcctggctgattcttacatgggtcagggaccctaaccggcacataataatgccttgggaccctggccggcacatggcttcaatcccaaagtaatggccaattttttgtcctcttttgactcaagaaagaaactttattaaggccttatgagcttgttcaacccttgtcgaatactttgattcccttaggaactctgtataacacttcttggggtgagtctattgtagttaagtaatcaacttaagattcaattttcatccaagtggttgtactaggaacccatactttgctgattcccagctttgttcgatagaactgtctggctagtacttctaggtttcgttgaccagtatttcatctaagtcttgtcactttgttatgttgctcaccttcccttgtcttttgtatgcagatgatcccgcgtgacttttgagaaggtgacaatcgaatagacaaaaattttctcagccttctctttgaagaccatcgtcaagctagttcttcgagtagttccttgagtgatctcacagttagcagtggttccacaaagcatgaggtctagcatcaccgatattcggagtgaataggcaatgaatttta

SEQ ID NO: 267977 - DNA, 627 bp, Cannabis indica
taaaagtaagattttttgtagtccataagaacaaacttagccaacaaaatgagtttcgtttgttagcaaatctaaaaacatgagagatctatgctcgtggaaaatcaaacacaaaaaagtgaatatcattgagaatggcatgaaaagctgagagatcagtagctaacttcttcaaaccatgaacaactaaaagagaatcggtttcaattgaatgcactaaaggttgaagttgaagaagagttttgagactccaggctagctagagctaaagcttccatttcttctagtttaaaacaccctttttaattatgactaaattgattaagtaaggttgcatgaattatttcattaattaattattattattactcaattttgaaatattacttttttttttttaagtgtaaatacaagtatcaatcattgctcattactatatcttttgacctatattaattcaatataatatactgaaaatatataccaataataattagtggtgcataaataataaaaaaggagctttgatcaatcaatataattaaatattccaagcaaataaagcaactaattaaggtttattaattaattattatttgtttttatatgaatgaaaactttattgaa

SEQ ID NO: 267978 - DNA, 603 bp, Cannabis indica
tggatctttcctcttatcactaaagatgaagccttatctgctttcaagacttttcaaaatcaaatcgaaaaacaacttaatgtcaccatcaaaacagttcaaacggatcggggggagaatattgcacctttgaaccttgtctcaaaactataggtatcaagtttagacaccattatccacacactcaccaacaaaatggcaaggccgaacaaaaacatcgtcgcattgtcgaaataggcttgacccttttagctcactctagcatgcctcaacgattttggtgggaggcctttcaaacaacaaccttcttaattaacaaccttgctacacaagtttaatttgaactataagtgtcttatacaaaagctttttggtctcatgtcgaactataagttactcaaagcctttttgctactttccccttggttttcaaaatttaatctcagattcatctctgtttttttataaacaaggtgggtcgatttgtatctccttgtttatgctgacgacatccttctcacaggcagccattatcaaactctcaaaagtattatttgtaagctgtaatagtactttctcctaaaaatactcggttcaatgaca

SEQ ID NO: 267979 - DNA, 519 bp, Cannabis indica
gacctctaccacgtggtctccccctgcctctctttttgttaaccggttcagaacttgtcattggtggtgcatcaaaagttgtagcttgatccttgcttagtcccttgccttgttcacttcctcttccgttgcctcgtcttgtaggtgaagttggagttgttggctctttcatgagcggtgtcatgctgcatgaacaactgttatgaccaagttggttacattttttgcacctctttgtactagaaactggcttcacaaccctttcttctccagccactctctttctgcggtatttttttggcctacctggttggtttttaattattgggggcaacaaaggctcataatcataatcatttctaatccacatagattcatcaggtattggatgtatcattggttcgtaagtctttctccacatttcagttgtgaagtatatgctagaaaaattaatataaaccccaagatcaatttgtatataacatagaacacaataataagatataataattaggtatg

SEQ ID NO: 267980 - DNA, 911 bp, Cannabis indica
caatttagcgagcgggtgtgacttagaagtctaatttagatttttgagtcaacacatacatgacaaaccaattcaaaaactaataaaaacaacattattttagcaacatttcgcagttgggacctcgagtcaatttggctttcctattcaatttcggagggtgcttcgactgatgggaggatacaatttcagggggtgctttgactggtgggaggaagctttgatgtttggggtttgatgtcagggaagatgcatttctaaggtttgtgatctcaattgccaagggaagatgctatctgagtttttcttttatataagtatttgacttttagtttcttctaatttatttttttgttttagttttttttcttatattaatgttttggtttatttagtttgtataaattatattttatttaaaataattttgaaaaataaaaaacataaaatagtgttcaatctgaaggtacacgtggccaataaactaatgaaatagaatatgtatcaatagaagttttgaaagataagattttaagtatttatggtgcaatttttaagaattaaatatctattaataacaaaacaaattaggagtgggcatcatccaattccaatccaatccaattgaatcgaaccgatcaattccaatccaattacaaaaagttggatatccaattacaattagattggattggatgctaaaagttggattctaattggattagatcggttattggatgtcaatctcaaaatccaattaaaaaccggtccaatctaattacatttatatatattaaaaaattatttatatgataaaaaatattgaaaaatataataaatatttattatatttttattaaatttttttttgtatgttgaatttgtaacaattaattgtttagtgtatttat

SEQ ID NO: 267981 - DNA, 539 bp, Cannabis indica
acaagcttggtaattattgggtctaattaacaatataaatattttcatttggtcatttcaaagtgtttcacaattgtttctcttaatgccaggtatcttctcccatggctttacttattctgggcatccagtttcatgtgcagtagccattgaagtgcttaaaatattcaagtctgttcctttcttttctaatcatcaatgtcaaaatatttactcaactagattataacagaaaagaaattaagttaataagctattagtagtcgatgtctgtattctttttggtttctccctcataaatgatggcccagcttgtttttcagtatgtaaagttatatctacttgtattgtattgtagggagagaaatcttgttgaacaagtaaataacatttctccaaggtttcaagatggtttgaaggctttctccaacagcccaattattggagaggtatgcatttttttttactgaaatttcttttgttttctgttcaataagagtatccacaaagatgaagaatgctaatagtatatacatatg

SEQ ID NO: 267982 - DNA, 1174 bp, Cannabis indica
tttctctaaaccttctacttcaattgatagtgtaaggaatgctaatatggaagagattcttaagaggttggagtacttaaccaaacaaattggaaatttaaatcttaatgacaagaatgtttgtgaggtggaaccattaaaaagatcacgtgccaagacttctctgcctgatgaacctaaactttatggtagaaagactgacaaaaatgctttgatgaagttgctgatgtaggatgaagatagtaatgagaagatatgtgtcattccatagtgggaatgggtgggattggtaaaactacccttgctcaaattcttttcaacgatgaacgagtgaagaagaagtttgaatctagagtctaagtgtatgtttcagattaatttgattccacggctgtgacaaaaagcattcttcaacaagttgcttggggtgaagcttcaggtgacatggatttgattttggttcaggttaatttgacaaagaagctaacaggaaagaaatttttgattgttttaggcaatgtttgggaagagtattctgaagagtggaaagaagtgatgaagcctttcaacagtggggcaagaggaagacatgtcattttgttagagaaaaatgatgaaattgatagccttgagaagaacacacgttattttggatgtgttattgaactttttactaataacaaggtatctagctataatttcgaagcaatacgtctgcgaactttcttaacattaggttcaagatattctaaagccattatttctaactaagtagtgcagaatctgctatcgatgttgaaatgcttgagggttctatcttttcgtggtctacataataactgagttatctgattcgattgatgaactaaaacatctttgttatttaaatctttctaataccaagattgtgatgctacctgaatctatatgtgtattgtacaatttgtagacgttgaaattagaaaattgtgatcaccttgaaactttgcctaatgatatgcatcgcctcattaattagaacatgaataatattaattataataataaatattaaaaaccccttatgatataaaatagaatagtcaatgaatattgtaagcatttgccataattaacatatatgtttacacacgtacatgtatgagtatgtctggtcaaagtttctacatccaat

SEQ ID NO: 267983 - DNA, 1392 bp, Cannabis indica
cattgaggatgatattgctaaatcttgaaattgccaaaaggtgttaagagtgatgaagtgtctatggattgtgattgcattctcactaaaatcaccggcgaacaagttgaatggtctactagccaaagtgtctgcatcactcatcttacttatggccatgcctcactaatgcagtttgctcttagcaatttgcttccaaactccagcaagacaatagtgtatcaagatttggcttatcttctttttcgaataactactgggacaaccattaacttggcttcttttctcatggagaaaatttttttcttccgtcgaggtaaaaatgaaaccataagattaacttccctaacctaatctaaaaagttcttttttcttagaaggatgtggtcttttcgaatgagacacttgagtcggccctcactagaataatttttcaaccctcagagtattttgatggagtttaccccaagtgccccaaggcttatgttggtacaactccatctattggtgttgcaggttccagttatgcttttacagctgtgcatgaagtcaagcaagaagtgaccttgttaaataatcgcttgactttcgaggaggaggttcagcaagaaatgtccaaataattgtccaccttattgatcaaattttctgggacttaagttttgtgttctctttcctttacttttacttttttgatgatttttggttgacttgttttaattactttttgtcttttgtccttatagataaataaaaagggggagtaatggttttaatttcttgaattgtatactcaactctggtccctttttctggggggagatgaggtttgtgttgtgttaaactttggttaaagttagctcttactctttattatgctttaatgttgtactttttcgggagagttgttatgtttatttttgctaactttgtattgcaggttcttgttaattaaaaaaattgattatctaaaataccaaagggagaaattgtaaaatcttttttggcaaattagttgacaaaatattttctaaataaatagtgtttttatttgagaaattaaagtatttttattgtaatattttgtgtgcctttattgctcattttctttatggaaaattctactcataacttgctatgattgttcggaagcttttcttgccatagaagaatttctctatatggaaaagttacctatgtttggaaattttgatttttcttttttctttaatgatttcggttgtactttgataagattagatcgaatacattgtattttgctagtttgaagtccatatttatgatcgtggtcaattttagaaagtttcatgtttagttctgttttactgctgcagagtctgattctcatgctataaataaataatttttagg

SEQ ID NO: 267984 - DNA, 1857 bp, Cannabis indica
tgattatttattgttattattattacattgatattttttagttttttaattttttttctagtataactctatttagttataacctctcaattagaatataatttacttggtcttaagtatattcttggatagaggttctactgtattatctccgataagttatattgatataattaattaattatttaaaaaatttaaaaagtgaataaataaattaaaaataaataaataataaataaagtatttcagtcttttcaaaattacacaatttgtaaagaaaagactaaaattataattagggccattttcttactatgttaataattagagggctcttttaaaaatttatgagaacaaagggttcaaattagcatttaattaagaagaaattataatctatacccttttattatttatgaactataaaatgttattatctattttaagaattttattttacaaattatgaattacattaagtattttactttctatattattgattgattgttatgaatattaaattttacattaacttttataattgcacattaaaacataatattaaaaattgatataaaatatgttaaaaaaaaattgatgtaaatatatgacaaaattatttttttaccaaataaactacaattttgatatctcatgatttggtacttattttagggcaagtattgttattgagcatcggtagtacctagtacttcttgacatgtcgtcttgtaattagttagcgatactctttaaaaattattacattaatttatatgagactgaatacttaattggaacaataataataataaccgatcttaggtatttttcattttagggccttgttactatttttttagttaactatatgagttcatttcaaagacactattttttttgtttcgttctagtacagtatccttgggagcagcgttttggaagttctcgtacatttattagggaatccagattattttatttttaggctgtctttcttttctttttcctttccctcaaagatttagattatgttaatatttttggcctaacaaaacattcaaaagttaaatgctggtgacggtgacatttttaaaacggcatgaaaactgaaaaacgacaactaccagaattagacatcagcaaaatgaccaaaaagtttgcaagattatcatagagttaataatataataagggtattgttttgtgttaaaacaggtatttgaagattatgtttctttgttaccaaattaacttggagattttcattaattatattcagctgaagccaatcgaatttttttaattgcttaataattagacatacaaattaattaagccccactaaagttgtgcttattaatttttttgtttaaatatttattaaccactcaactaattaatttcttatttttttcctctgattgattgtgtttaactaaacagctaccaattcgaataataacaatgcggcttcaaagatgggtgtaggagcttggagctggaactaccttttcatctcagttcacttagtcctaattagcgttggtcttggtctatgagatgttaatttcctgctctcttttttgttcaaaaactattctactgcgtacagatctgagtagtaattgaaacgcagggtatattgtgtatgtactatgttaggttttttttctttttgatgttgagaaaaataatttatttctggagagaaaataaacatggcttttttttcgaatagaaaataataattttattaaccaacaaaatttgttactaaacaatgtaacaaatcggtaggaacagactctataccaaaatgacaatcagaaaataatatagaagctcgtgcaa

SEQ ID NO: 267985 - DNA, 1718 bp, Cannabis indica
tttatgtgtcactttaaaattgaagaaaaacccttttttatagtagtgtggcataaccaaatgcacatgcaatccacaacttccagccatttagaattcaaccagatatcaatgctaataagcacatcccacacatataatcgcatcaaaattattgttatgttacttttctagcatgcctcatacaagtagtaattaatcaaatacaaataaacacataacacttactataccacgagtcgacccgccttcacaacaaatgtacatatccaactaatcttctggactattaaaatcatggctgctcttataccaagttataatgtcctaattcttagggacaccacatgcgtgcttttaaaacatagttttataataggagattaacaatttaataaagtctgtgatgataataaaaacttcacttaaataaaaccataactatgaccatgatcacattgctaaaattttgttttgaggatcccctctgacaaaatttttacaaaagagctatatacaaaagtaagtcaaaatacacatcaggtctgcagcactaaacatctcttgaccattaataaaactttaaccctaggacatttggtcaaccacgagcaccttaaaatatctcggtaattctaaaaccaacttatctcaacaatctcactaagagtactaactaaaactattgtgacattttaaacttccaattaggtctccaaggacgccaaatttgaaaatatttttattttataaataacatacaccatacccatattttctaattaaatctccgtaattaatataaattacgcttactaatccacttatggaaaaattctataatttaggctgaattacattagtagaatcataatcctactcattcaccctacatatttatatataataaatcttaattattcataattatggtttagggtttaggtttcaatatttccaaggcaaaatactcaaatattgtttgtaattggaataatagattgtctttacacatttaattgatgaagtaatttttttattagctgttattggtagtggtacttgttatcccattctatatactatgggaaaggtgtagcctatacattggcaaagttcattacttgtcctttaggagttcgtgtatgtacagatgcatgacctaaaattttcgatgctcctttaacttttgttgaataaagtttttcatttttttttttaaaaaaaaaagtgattttagggtatacgaaacaaatatcatttatattctatttcaatatattgaaaatggtaaatggtgctataaatacttaatgtttcagattttatacacttagatattttagtttttatttttagaggcaaaaatacgtaatgttacaattctcttaattacacatgttactactaatgccattaactcataaatatggacacgtggagggtccaaatgcattacatttatttattttattttaaaatttaatattataatgtcagaaactaaatgttaacttgtttaaaaaaatagagagagatgcaatactaaattaccataactgagtgaaccagtgcagtatatggaacatggttatcgaatggaagtgccaatactatgtgaaaattgttacgagaattgttttttttttttttgtttgtaaacaattagcaataagtttctaacattaaaaatattaagttttaaaataaaaaataaa

SEQ ID NO: 267986 - DNA, 1560 bp, Cannabis indica
ctccacttcgtcttccccaaccctcacctacctttcaaaaacccaatcggcatttaacctccattgaaggcgttcccgaactcaacctccataaatccaggtattcccgaactcaacctccattccctcgcgttctctcgccacaaccaacctccgagaaccccaccacgctgaacccagtgaaattcgctcgaatccagtcgaaacaaccaccacgaaacccaagcgtcctcagtcgacaccaaaccgagtaaaaaaaggtacaatttttttgctagatttttgtggattacttgattacttgtgatttatcattgttcttgtggattctgtggcttgtttttggtaaaattatatttttacagagttatcgatggattatcgatgatgcatcgatatgataacgatatatttccccttgtttatgtgaacggtttcaatggtattttccaaaaacaaagaagatgctcaaacgtgttctcaaaaaacttcatttaaaatggcctaggttgaaaaaatgtcaccttgggcgcagggccagccctaggtgtcaacttggacattgagccctattttttgcaccaaggaagtgttatttcttcttcgaaaggcatatttccctatttttgatgaagatgaagaagatgcaaaagtcggatatctgatctgatacttgcaaggtgctcagattgatatattatcaacctgggtgatgggtgctcgggccctggggctctaggtgctcaaaaatgagcttgctccgattctaattctgatacctcaaatatgtctgtggtttgcctagttgatgtgccaatgaaagttttgactcttttggactaagacggtctaaaaactgaaaccctagttggatacgggtgccaagtgaaaccctaggtgtccaggttggcttctgggttgtaggtttgtgtaattttagctcccgaagcttggattagattgctccatgtcttcatggtataaaatactaaaagatagtaagttggaaataagttattaaagtctaaacttccatcccgaagatcccgaagtcatcttgggtgtaggactagggtcccctcccaggtcgattgctatgacttagtctactcaactccgtaatgtcatccttcatgccaggtgttaaatattgatgtccacgtcaccacggaaaatttctgggttaacaagtactgaacctggatctcgttctttaacctaaaaagtgaaagtttttaataatcttccataaaggtctgagtattaccttgaatagtgtgggctaatactcaactcatatttagaacatacttttgtgagtgagagttcaaattctatggtgacatggtgaattcaaaattttgtgaatgaaagagaaaaggaagattagacattagtgttttctatcttcttctcttttttttttatgttaggcattcaattaggactaggttagatgggcttaaattcattatagggtcaaattccacttaagggccatagagttagattttcgccacgtctatttcatttaaatgaaatagtgtgcctttttttttt

SEQ ID NO: 267987 - DNA, 2497 bp, Cannabis indica
actttgtcaacttgacttttcaaccaaacttaaatctagtttttattctttgacaactagtagatgagagagttccatctagagtgattttagcctccttcattgttcttcacattcgaacccttagtgaaagagtgtcatgcccacacatagcaagtcaagtactcaatcatagtgagtaagatggtggtaaccaaacctgaaggagagaaagagattcaggtttagatcttgataatgctttgtgacagaaaggaatcaagggctagagatctgaatagaaggagtcattatattctgttgcaaccaatgtaaggttttctaatctcttatgtgtttaatttcattgttttagagatattcatatttaggatgctaattcaacatacttgttaataaatctagatcctggtaaaatatccccaacagatgaatccaccattgagtatttcatctctatcctcaatactattgaatcaaatcaagaagattccataggaaaacatacctactttatccaccttctcttttcataaacaccttacaaagccttcgagcacacagagagggggattagccccaagaacatagccactaaagaagaattccaaaaggagatttcctctttaatatcctccacgatgattttgattttgttatccttttttgagtttccaaaagaagattacaggttcctcaccacatttccagatttaagaactggaggagtagtttgcagaccctttcacaacaaattagagcaattttgattagctaccagaaagaaattaaaatcagacctgataccttcttgttgctatttctagtgaggactttggtgatagagattcctagagcacacctcgtaagccagatgcctcaccatgctcaaaatatccatcatcatctgtgaactcaagaggatcaacaccgagaatttcctccatagatttagtttttttttcacatcagctgtagaattagggccttttttcttctttttcgcagaaactttcagttttccctgaactcgtgatcttgtttttgccatggcaccagctcgcgagagctgcaagaaactaggagagaaaaaaaataaaaaatactattttttctgttttatttatttaaatgttaattttatctatttaataattataaatgattatcaaacaaaattactatttaaatatatttattaattagacccacaaagtgccttaattaataaataaactcttacaactcttttcttatcaaatatgcccttgcttagtgaaattcataaataagacataatcttctttagaattctaattgatttaataaatcagttaattaggtgtacaaggaaatattatcccaaatactgtggggaccatggacctatgtaactaagctcccaataaacaattttcgaaatttatgaataaatttttgacttgttaattcatcttgactccactatagatttagaattgcactcttgattacatatacgctctatatactaaatatagatacgcttatgaattatctattatttcaatctaaataattaataatcatctatagacggtttatatcgagtatggacaaatttattgtttaacccttcgatgtattttttccttaaaacatttgtctacttataaatgatattttagtaaagtaatatacttaccgaaataagatctattccattaataccattttatttaagctttaaggaaacaattacttcaattctataagtagttataaaaattatagattctatatctatgattaatgctttatctcaattgcactatcgaattcccaagatataagtatgggctagtcctatgggtaagctggtaacaaacaagtcaaagaacctgtacagcacaattaagctagaacctaatcatctcaagattgaaatcaattgacctaagatcaactaagtgacatcgacttagaaaagacatgacgataagtttataatatcttaattttctattgtcaatgtcggtacaatccgatgtacacctgatacaagtttactttgataatatcctagaaaggacattccacttataaagtgtaagtaaaccacatcgttgattatcacgtcagtgtaaatctaatatactgataaatcattgaactaaatgattttgaagcatataatcatgattattttccaccgtgtaggtaacactataatcacaatatgtttgggatttaacagaatttatatattaaacatataatcataaaagtaacatgtgaaccaaataacataacacgatttttgatcttttattaattagtaaataagattatagtgaaatgagtttatttaaggcataaaatccctaagagggatcccctatggaggttctctcaaagaaaatcgacaattcccactatttgcgttacaactcgagccctagattgtggcaaatatgtaatatacatacgttggtccttgttgaaaaataatgcttac

SEQ ID NO: 267988 - DNA, 541 bp, Cannabis indica
gtgagtagatctaagattctggtaaaataaattccaacacttggtctgtatacttttggagttgttaacatgcttgccagaggaagaatagatggtgtagttgactgcagattttgtgttgtagtagtgctggtggtttgtggtggaagtacaccataagcctgggcataagcgtcttccatattaatgaatccttgggccctggataaaaagtcggatagagaacttgctcttttcatttaaagttctcccgataacagagatccagttgttattcttgatgttaaagccaccatctttatagcatcagtaacctttgcctttgcagcaacatccattattcgctgaatgtacttcttaaggctttctcttggttgtttcttgatattctttaacgaactaacttccaggttgtaatcttttcctgctatgaattgtttcttggacattatctatagatctttccaattacgaacatattttgaagataatcttttttaccagtcttctacaaacttagacagaatcagtgaaaaacaaa

SEQ ID NO: 267989 - DNA, 547 bp, Cannabis indica
aataaccgatccttccacatcaaacgcagcatcaacattaattttgtaagaactagctgcaggtgcaagccatttaacttgtggtgtggtgctggtcccaaccgaatttggagaagcagatttggaacacctggttttatccgttgaagcattcaaaggaagcacattcgcaatatgaaattgatcaatgtaggcatctgtgaaggtacaagtaataagcgctggtttgggtttagttccatgtaattccttgtttctttccgtccatatgcaccacattaggcaaagaattttctccaagtcagtattgttatgaaccgctgctaaagaggagtagatatcatggccattgaggttgctgatgtttggaaaacaaacccgaaaatgagttagattccaaacagcttctgctctagtacaccgaaataaagcatgtccaatcgattcccaacccccattacacaaggttagcagtaggattattttgattgtgtgtattccaggaagaattgatcacatggaaatttttttaaaagtttttatcact

SEQ ID NO: 267990 - DNA, 935 bp, Cannabis indica
tttgattagaatggtaaataacacagcacaaattatctccaggctaccaacagcctgaggagctactgaaaccagagcattaattaataaagaaaatgatcttaaatgccccagcaaaatccatgtactttttctagaatagctaataggaacatagcacaacacaacatcacatatcacaacatttatttattttatttttgtatatgatcctgctgaaccttacaatctttggagccaagactgctagatcactacattacatagcatatattagcattgattcacctagtaaatttggatgctttcacaagatatgctttaagggataataacaaggacatatgtagtaggatttaaaaaaaggaagcagaatatatattctatcctcaagaacagctcttaaaattccagctgagatgtatggtcacttttttctcttctagtacaaagtgaaaagatgacagagatggtatagtatctacctctttccatcaggatgtgtcataacaatatccatatctccacaggaagctttcccacgtctaaatgatcctccacatatgattactacctgcaagcagaaactcacatcatttgattaacaagtcacgtgctagaataaagatttatacttgcaatctgtaggcaaagctttacattgtagcttacaggttataaattttaactttatttacattatttcttattggtagtcataggatatgtgtgtaaaggcaaaactctgatttggctcagtaagattcaagcttacaggtgccgctgtttaaacattagtattcattgaaaaataaaacaccaatgaaggaaaatacaatcatagccttgtaaaattataatagctaattgaccaatagactagaggaatccaacggctaaacaaatataacgagtttataagcaaaatgacacta

SEQ ID NO: 267991 - DNA, 419 bp, Cannabis indica
attatttaaaattttatttttattactataaactattcaaaatcttttaaaaatatataaataattctaaatactatacaatcatataaagaattaaattaattattttttctaaatattaaaataaataaataacttattattagaactaccctttaaaaggtctatttagattctaaggatctcaacataaactctcaaaagtaattttattagttacacaaaatataagattttttttttaatattgaaaaatacacctaattcaaaaagagaaatatgttatataatattaataaggttgtaacgcaagtacataatttatatttatatatatattctataaatataacgtagcacagttctcaatgttttgtcagcgtaacagatatatttaacgttatgtgtggaattatatt

SEQ ID NO: 267992 - DNA, 1509 bp, Cannabis indica
atcaataaaaaaaatttggtggtattccagaactagagtagagccaaagattatatcgatatatcagacttgaatcagtatatatcttagtgttgattttattatttttctgctttaatcatttctagttgtttatactctattaatctctacttttctttacaattattgtttgtgttttgtcaatcttgtcattgctaaaagcttgattattttaagtttagttgatttgattctacactactagttgtaatttttccacaaatcagagcttggtaatcgatcaagaatgcataatcagaattctttccactataattcttgaagaaactttaatgtcatcaatgacgggatttaaattggagaaattcaatagaacaagagactttgcgcaatggaaagaaagcttgaaagaaatcctagtgcaccaaaaggtttccaagtttcttggagatgagaaacttttagccaagaagaaaggaaaaagcagaaatggaggagatggcgtattacacaatcatcatgtatttgtcaaacagtgtttgaagaaaactcatcacaaagaagacgacgaaaagagtctagaacaagttggaagagttatatttaatccatcaacaactagcaagatcaattttctagaaaggttatacaggtttaaaatgattgctttcctttctttagatgataatattgatagattcaatgagattattgtaggattagctaatataaatcacaaggttgataaagaaagtcaaactatcatttttctcatgagatcactcccaattgcatatcaagaagtaaaggctgctatcaagtatggcagagacgtgattgcattggagaatgttcttgtcgcacttaagtcaaaaaaatttgaattataattggaaaaggaaacgaaggaagaagaagtgtatctggcaagaggaagatcacccaagaaagtgagttcgaagagtaaaaaccatcactctcaatcaagatcaaagttcagagagaatgaaactcaaaagtgttacttctatgaaaggtttggacacttgcaaagatttttcaagaagtacaaggagcaaccttcaacaaatctcccaatgaagataggaaggacaatcgacatcatcaccatgggaagaattctgctgcaatcgtgaaggatagtgatgactgctccactgagggagaactgttctctatctcgaagtcatcaatgagcaaagagtgaattcttgactctagatgcatttatcacatgtgttcgagtcaagagttatttgtttattatagatcagttgatggaggtaatgttctaatgggaaatgatcattcacgtagggtgatcagaatcggaaaggttgccatcaagtagtatgatggcagaatcaaggtgctaacgaacgtaaggcacatcccagagcttagatgaaacctcatatccctgtgtgtgcttgaagatgaaagatacagatacaagtccatgcacagaaacttgaggatcacaaa

SEQ ID NO: 267993 - DNA, 923 bp, Cannabis indica
ttaatagaaagaatttggaagatttcgacatcatataattaaataatattttataacaagttattatttttttgaagccttgctatgaggcataatgtccaatatgactttatttatatttgggtaaatatcagtataagtacccaaagttttgagtttgtaagcggtataaattcaatgatttttttagtggcataagtaccgaatatttgtaaaactgtaatttttctttattttcgtcagtacagactccgttttaaatttattaaaaaagatttggaaataactgatagtacatattttttgtccagaccaaataatctaaaatttagatcttatatgtttcatgtttataagacaataacagaatatgtacttataaaacaagaaaaaaattacaattttataaatattatgtacttaattatgccactatttaacctttatattttgtttggggtttgatgaatatattgtaatgtgtcattgttttggtatctatttttcttttgatgaaaggtaatatatgtgtaatattgtctccctcttaaagatttgtccaccttaattttacttatacttgttggaatgttttattttttgttggaatgttttattttttgatcaatatacttgttggaatgttaaaccattaattgaatgattggataagatatagttatccatctcatcaatccaattgctcatcacactcatcactcatcagaagctatgtcaacgtgggtgggccctcactattaatgggggtagttgggccaattacagcttatttgttttaaatgttaaaaatagaaaatttcatacatatctacaaactaagttgatgttatcataatatctatttgagttttgttaagcgatctgctaatagggttgtgtattgtttggcgcggtcctctctt

SEQ ID NO: 267994 - DNA, 670 bp, Cannabis indica
tgttaatgaaacatacttggtagtaaatctagatcctggtaaaatatttccaacatgggtttataagggatggctgattctgtaggaaactcaaattctaaatcttcaggacgataaatttctgaaccggattgggatattactttaagaagaaagcaatcccaatcggtagaaagaattttatcaaacctgaagatggtgagttgagggttttgaaaaaacctacatattgcctgaaccgtattgttgacccaaacacaattcaaccttaaaaattaataaaaccaaatgagatggcaatgatagaaacaaatgattaaacccagaagtgtaacgtaacaagcatttaagatattaagaagagaagttacttactgtttgaagttagggcttgggacgatatacaactcttcagcctgtgaacctttgaatacagtaaggatctcttcgaaaatatgaagttgggagaaactcgcagaaaaaatgtcaaagtcagagatggcatgcgaattctagagaaaactcgatgctctttcttaacaaagaagcttaagagtttctaaggatttctaaaatggaggaaatagtgcaaatgtggttcctttttcttactttatactcttgatatcaatttcgtcggattagaaagatgtttgatcctacggataga

SEQ ID NO: 267995 - DNA, 1105 bp, Cannabis indica
ccttcggaaaaattgagcctcctatcctattgtctatagccgaacctctctctccctcttttcttcttactgaagagaaggacattcgggctgagatcttggtgatactctgcgacagaaaggatacaatggttagagatctgagtggaaggagacatattattccgctgcacccaatgtaaggtttcctaaactttatatgtgttcaatttcattgttttaaaaattcatattagggtgttaatgaaacatacttgttagtaaatctagatcctggtaaaacaaattctaacagttatagcatttagaaatatgtgtgtatatttttctccaaattacatctatagtgcttcgttcatataatattattaatttgataatttattagagaaaataaaaagggtatgccaacatgtctgatactgacacaagagaggttagtaatatagggacttatttttaaactttaatgatgtgatataattttttcaaaagatctatgtagatttaaattatatgggtcataattagaactgaagtgcaagttttaaattggatttgagttgtaattgttaacttttagaaattgtaaaggtgcttcactttcttgtgtccttaggacctaatttttttttttttttttactatatatagtggttgaaagattttatcggtgagctatgacactgtgtttggctgcttagaaagctctgttacttggaaatttattttattatgacaattccaaggtagttcaagactttgacaagaaggacattaaccttatccagaaaaatttgcatgttctattcacaaagttcaatagcttggtgaattatttaaggtccccagattaagtaacttcttggctcataacatcgccaagtggtctagattgaacaagcgcatatgaatgtggagtaagtggttcttcaatttatttatttcttatcttatttagtagttttaaggattgcaggatttgttcctgccctagttgcgactgaggttgttgtgtttggtttttgactttttctaataaattgggtgtccttgacaccctccattccatcaatataaatatataaattattttttaaaatta

SEQ ID NO: 267996 - DNA, 1092 bp, Cannabis indica
ggtgcacgagagagagggaagagggaagagagagagagagaaatacactttcagatttttagtactttttttttttttttttaaaaaaaaaaaaggtaaaatgggaagttcatgtaattaatggactaaatttgtacaaattataaaggggtataaattttgatataggttgtattattagggtcaaaaattgaaatttccctaataaaattaagcttgggccctatattattaatttgacttatcagttcatcaataagacaaatgtagaggcatcacttattatttagttattattagccttacacacccctcccacaactgcccccacatccccaccatttacatcttattcagtatccattttgggaccatttttacttaaatagagacacacacccatatatataaatatagatatatttatatagaaactatagatgaaaattaggcgattaatgtacagggagcgtaattcctattcctgctaccaatttatgtatctattctcgctctatccctgtttagtaatcagcagatttggggtaagggaatacacattagttgttgtgggaaactcattgggtacccactaaagcaaaataaaatatatatatatatataataatttaaaataattagaaaaaacttttaaatttaaataaaattaatatcctcacaagtatttattatgtcttcataattcatagaagattaaagacaatataacacataaaaaataaatttgtctcaaaatttaatttaagtaatattatgttggattattgcttaagatacttttagattattttttttttcttaataacatttaaattaccttaaatctttgagaattaagaataacattatcttcaccgaagaagattatcgtaatcaaaagcttacatattagtttctttaatattttattaagagataaaacaaacaaactttacacattgttctttctttttgttatgtggagtctaattatttagctttagattctcttgttcaaaagtgctctttcttttgacatgagctaggtttttttagttttttttgctactttgctttccagttttcctaagg

SEQ ID NO: 267997 - DNA, 1215 bp, Cannabis indica
attttatgtatttgaaatatataattgaattgtattagatttaattttttatgaatatttaaattaataatcaagtattagtaactctaatataaccctaaacaaatatgcatttttttaacaaatacctagtatatatatataaatacttgttaaattaagtatggccttatgatgctgtgtttataagtcaaaactatctacataaaacacatttatgttcaataatgtaatatgaattttagtccaatttactattgagatcaagtaatcagcgaccacgggtccccataatgttggactaacataaggaatatatagggatggcgccccatttcaaaattaacaaaatttattttaatgactttgttggcaaacacttgaaaattaacattggcagatactatttctaagagatgagtgatataacatttataaatatagtaacatacttgccttaatttgacaaattctagtcttctctttttcaaacctaacttgctaaaccacatgcaattaagtttgttataataataatagtattcttacaactatgagaatcctattttctatattaaatatacatatatgtgtgtatcaaagagttaagttgtttataatttgctctgtcaattatttatctctgtataataataccaagaacacttttacaaatatgatgccattaaagaatgatgggttgttagtagagataattaagaattgtttagtaatttttgtgcatttaaatttgatttttgatcatggtgagagctcatattcaagcgcaggcaattcataccatgaacaaataagacgtttgtcattgatcaaagcttcccatctgaaccacaatggagtccctcgtcaatttccgagcttctcaattacaccttcggtatgtaataattataataataattattataatttcaattaggtagcttgattcataaatatttaattaatttcaataatgaggtagcctttgatcatggaagatttgaaatttaatttgatattaactaagctactagattgatctagcgatagattaaaaatggggatgatatgtttggtacggtgaagaagaataaaatggatggagagttattaattaagaggggatggataatataatagatgaagaagagagtataattcttctaaatgtttgtaagtaggagataaaagattgaatgatgatagatatac

SEQ ID NO: 267998 - DNA, 950 bp, Cannabis indica
cgagagatatatatagagtagatatgaatttagagagagttttttttttctttttgggtagttttaaacagtttgtagttgtctttatggttggtttaatatttatatagagataataattaaagaatgaaggtgatatgtttgaaaatgtgtctttaattacccacctgatacctagctttcatttgagacatatactactagtacattttacaatcaagaattgctaaatataatatggaatatcacatttcaatttataatatatataagaaatcaaatcacatgagcaacgttctacaccttaaaaattcatgaatataataacaatactatttgtataattagctatatgaatatatgatatttgttaatgcaaaagagagagagagaaaagataaccatttcccaatgagagtttcttagaaataaagtaaatataaatgtcataattaaaattgtcaaaccttgaatcatgtctgtttgattatgttggtaatgcttaataattatttaaatatatatagtagaagaatgtaatgtatattgaaactgtcaaactttctctctgtctctctctttccattaatggttggaaggaagatccgtactttgtttttgagtgaattgcaacttaatgatagagtggggaatatgcaatctacgttttctatggacaaagcatccatgaatagttgagacgaaataagtgaggtgagggccaaatcatatacttttttaagaagtggacattaatttcctaattccattttcctttcctttgcatttatgagatggtagtttataattggttatcaattttttattatttttattaaattaaaataagtaaaaaataggagcatttcatttttatatttttaatttttttttttttatttttacggtaattttatataaaaacttctattgtaactagtgctgcaact

SEQ ID NO: 267999 - DNA, 1255 bp, Cannabis indica
tttttcttaattttttatttaaactatactttcgacactttctcttaatttttctacgttttgccccttacagtgttattctacagcgagtaattgtacatttgatttatcctctttgatgtattgtaggcgaccccccatttatgcttatcacgtcacttttgtttttttcgatactattttcttttagagatgtaccaaaagtcaggttgaatttgattcgatccaagtatctgatctagcgaggcaagacagaacatgatatatccttacatgatctggatcaggtcggatcagatctgacccgacccatttacactcaggcgatacacttttggtatatctctaaaaaaaatgtaatcgaagaaaataaagtgatgcgataaaactttaatgttaaccaattacattcatctaaaccgtaacatattgttttaaacaaatagtgttacattattaggtttactattttagtgcataaatatatattaacaatgaacaattctttcaaaaaattacatcatagagataagatgagaaattatccatctaatctaatttgtcatccacgcgtgaatatacaaactgttaattcatgtgtaagacgaacctgatgaatcataatagttctaaatattggataacaaactagtaataccctttaagaaagatcataaatcattacaaaatggggatctcttagagaatgcaaaaatcaaagatatataattaaaaatatatgtatctataattagtaccaattaatttcaagtgtaaattttagggctaattgtatacttttttttttttaatcttttggtcgtatacatggtacacccccaaacccataagcataagacaactcttacccatagattttttaattttctttatataataatgttaatatctgtaaacactcatattttgatttaaaagcactgaattaattaataattacccaggaataatatataattaatttgaagaaaaaatatatggacgcgtttatgcatgtgtatatatacaactcacacgtatttttacatagttaaatatattattaattaatgccaacgtagtgggattgaccccaactcattattacttattaattaattaacatttaattattatattttagagtagaaaatgaaaaacgtctaaccataatatcctaggttggcaaagaaactactgtttaattatatctctaatttatggaaacttgcctttttaattaatataatttttt

SEQ ID NO: 268000 - DNA, 695 bp, Cannabis indica
taaatataataaaagtgattataattttgtaatttgaaatagaaaattgtaacttttatgttttttatgctagttaattatttaattaccaaaaaaacatagtctttatgtgtttagaaaaatgggaattgaacaatgaaaagtgttatgaatatataataaggcaggccaagaaagatgagagattctcattaggttttagggtttgactatgtcttgggagactgtggaggtaatgcctccaagaaccgcacgcccactaaacaatacaaaaatcttatatattattattcaacaattaattaattttgtttaattagaaaaattctataatatggtcttttaaaaaaataaagagtacattagtgcattatatatttttaaaatgatatattgtaaaatcaaccaataatttatatgttaagaaataacaaaaaacaagtggtgatttgatttaagatgttaaagatatatattttatattatacctacactttcctagattctttgttccccaactccggccttctatacgccttgaagtgctacctactctattcaaacacattttcattatatatttatatatattccatgcaaacaaaaagaccatagcttataaattaatatattattaatacaaactataattattataataattaaatatacttaattatttttgtctatatttt

SEQ ID NO: 268001 - DNA, 1019 bp, Cannabis indica
gcgtgtgttggaggtttcgagtcccaaattatgcatgattgtaatataaaaaacgacttaaaataaaaaaaataaaaaataaaaaacaagcagaagtgctagaaaaatagagttctttttcatatttgcttactttttattttttggagtatacttaatttttctattcctctattttctttttcacgtctctctcctttttttcgcccttccacccatagtcgccattaaattttactttaaataattgaaagcttaaagttgagaaaagatagggtcacaactagtcaataatcacataaactcaattttctcatttttaggtttgggattgggggatagtaggtataattgacatgggcctcaattttccatttcaaggggaaatttagtatggaccttatgactatttgggccctcttactcttaccagttatttggagggcccatattttgtaccaccatttttcattgaattttgaggataccgcactttttaaaaatattttaactaataattataattgcttgtcataaatatacatgattttttttttttttttaaaaaaagatctttaatacatgattagcttattaaaatttaaactgtaaatctaatgagtttcatcattttagaagggtgattatatttgcattccatctttaagaaaatatattaaactaatttaggtttttaattgattcttgaaactcttttcaatttttttaaacattattaatttattttttgtattaaaattaaagattatattttactctttttgtaatttttaataaataatgaacaattttttattatttttattttcacatgcaaaaatttctatttttgatttgttttacttttttttgagttcaaaatattaaatcttattaaatcaaatcagctaccaagatagcttccaaaccagcagagacaaaacccccacgggaaacacagccaggaatagaaccagaagaacgagccaaaaagttagccgcctggttcccggattgtt

SEQ ID NO: 268002 - DNA, 767 bp, Cannabis indica
atggtttgattgcaaaaattgtaacccttcatcccaatttgtagctttctctaagcaatttggttccaatcctagtgtctctgagattcccctcattaacactccacatatttctcttgttcttttgctatactcttttgccacctcactaatcataattattcaaaaaggaaaattataaagtttttatttataaaatacatttttaaagttttaaaattataaaaaaaaatagagtttgttcaacaaaaagtaagaaaataactagaaattgaactcatgacaactataaataaattaaaataactaaaaaaaatagcatcatgacaactataaataaattataaaacaaaaaaaaaaacgatgtattattttcactaaaatatgtctgaaatgtattgaaatatatgataagtaagcaattttaaagacttggtcaagataatcattttcaattgtgatttagaacatgtttggtataattggttctgtcttttattttctaaaaatgagaacaaaaatcaattttttaagttttcaaaatataagtagtgtttggttgttttctaaaaataatttttcattttattttatttaaaaagaatacactttaatactttgagacctctgtatgaataagacccgacccagacctcggacactagcttttgtcactgatctcagatctagacccaaactcaaatccaaacctagacttcagcatctgggcccagcactgggtctgaacctcaattctagttttagac

SEQ ID NO: 268003 - DNA, 1357 bp, Cannabis indica
cagcaaaaaactttatgcacgcgagagccatgttatattttatgtggtagacttcggctcacgcgagggaaggctaaagttgcactaaaatccaagcgatgacttttctttaaatgactagagggtgcaacatcagtgggcgtgtgacagaatccaaaaagtccttctcttttgggaaggagggttgaagacgtatcgactccccagtgatatttcgcacacaaaaaaccacatgcatgcgagagccatgtcgaatttaatgcagcagacttaggcttccacgaaggaaggctaaagttgcactaaaattcaagcgattactttgctttaaaagaccaaagggtgatacataactgggcgtgtgatagactccaagcagttcttctcttcttacaggaaggagggttgaagacgtatcaaacaaccaatgatctataacactcgaaaaaccacgtgcgtgcgagagccatattgaattttatgtggtagacttctgcttgtatgaggaaagactaaagttccaattactttcaagcaatggcttcgctttaaaagacaaaatggtaaaatatcattgggcgtgtaaaagacttcaagcagcccttttcttctaggaaggatggttgaagacatactgaacccctagtgatcttacaaggcaaaaagatatgtacatgcaagagccaagttgaatttatagcagcagacttcggctcctgcgagggaaggctaaagttgccctaaattacaagcgatgacttcgctttaaaggaccaaagggtgaaacatcactggtcgtgtgacagacttcaagcagtccatctctttcgggaaggagggttgaagatatatcgaaccaccagggacctttcatgcacgagaaactttgtgcacacaagagccatgttgaattttgtggtagactttggctcctggagggaagactgaggttgcattaaaatcaaagtgatgacttcactttaatagaccagatggtgcaacatcaatgtgcgtgtgacagaatccaagcagtccttctcttccatgaaggaggattgaagacgtatcgaatcctcagttatctttcacacacaagaaataatgtgcatgcgagagccattttgaatttatgtgatagacctttgcatccgcgacggaaggctaaagttgcactgaaattcaagcaatgacttcccttcaaaagactaaagggtgaaacatcacttggcgtgtgacatactccaagcagtacttctcttctaggaaggacgaatgaagatgtatcgaacccccagtgctctttcacgcacgagaaaccacatgcatgcgagagccatgatgaattttatgtggcaca

SEQ ID NO: 268004 - DNA, 2161 bp, Cannabis indica
tttttttttttttttaagtaattgagatattattatttacaaatatgttccaatttgttccataaatcacaatctcaaaattcttaaaatcagattgtcctcaaatttctgctactatattcagacccaaaacacacatatccaaaactattcttgaaataaatgatccaaaaattaagaatcatcttgttaacaccagccaagatgaaacctctagtcgctacaggcgattcttacaagagataattgagggtaggccccacttttcgcgagaagctgcttggcctaaacctttgaatttaattgatattctcttagtgagactattatttttacctccagtcattgttgctttttcaccaggtgacttaaattttgaaattatagcccaaaaagcacgcaaatcaaagacccctcaagaccctacgatcaccttcaaggctgaactgatcgagtgtgaagttagatccataggatcttatgttggtgaagtgttaaaattatgtggcatcaaatatgaacaaggattatgagttaggtctgttgctaagggggagttcaattggtttttccctgaatgagtggttcgagaagaaggctgtaacactagtgagccatctagaataggcgcttggggccttaaacacataagagctggagcaataatccctcttaaagattattttaaggagttttgcaactaccttggcattgttccattccaactggtaccaaattcgtacagaatactggccagtctaaaatctttatatcatattctgaagtgggagtgcccgaccccactagaaattctttatttgtactctgtgaaggcctgtcccgcaaggaagtgaggagcaggtggtttttactatcttgagacccatgccaatgatcaaagaattattgtgaggttacccaatttaggaacttcaggtctctcccccatcaacacaactacattccaactcatacataagtattgcctttctcaaaaacttggttttgagttttaattttaataaatgtaggctttatcgtactaattttatttgtgatgtattgatagcgatcaatagaaaaaaatgcacacgattcttcttggtcatccttttagattgcgagcagctgatttcttgttgcacgagaacaacttgaaagcatgtgctcttcttggaagcaaacaatctactggagactttaaggtcccaaaattctcaaattggcaacaagttccagttcctacagacgaggaggatagagattatgtggctcacacccactatttgaagaacacaacccctcgggaagctgaagacgaagcccgaggtaataaatttggagtttgtggatggtctcctactgtacttagagccgagcatacaaccttagttaagtttagggatagttagtgcaatttttatatttggaactgtgtagatcgcatcgttcataggtttgatagttggtatcccgagcctcacgttcaactaggttgtaatagttcatacttcgggattgccaaataatatggccctaactttgatagggcgagccatctagattaggacatatctcctctaaacacctttgaccttttcatgattacttgttctagggagtctagttgttattatagttcttcttccttgtcagatgactatggtaattttctaaagtgggcaattatctcaccataattttcttgtttattttgtacaagtgttgacactttattgcagatatggactttgaaaatctcttgtccacctcgggttccaagaaaggcatgaagcaagccgttgtgttagaaacctcttctgggacaaacccagaaccattgaagagattgaaaaaaatcaactgccaacaaagatgcgcctcgacccatatggttatcaagccagaggcacctcaagtgacctcctcggttcctgctgctgagagcactgatgaacatactttagggtctgttcattaggttaaattcttaggttcacaacctgagatggtgctcttagagccttcttgccccttgcctagttctgcagacattaagggttcggaagttttcttgtagtatgccaccgcatgttggcgtcattacaaatccttccaataggatgattgggatttggtaaataatgacgattttgaaagt

SEQ ID NO: 268005 - DNA, 806 bp, Cannabis indica
tacaacaatttcttgttcatttgtcttttcactgttaactatcttctaccaataacaaaactagtgtatattatttatatcttgaatttatatttatatatacattaatgtgttatggaggaagatatctcagacaatcatataatacctctccaaccatgattttttgtttttaatttaaatctgagtattttgaaactctagattgtgaaaagggaattaattatgttagaaatacatagttttgtgatattaaaattagaatgtttcattgttttttgggggaatcagataattattattttgtttgacttaatattcggaattttttaataatttaattattatgttaatattggtttttgaatagacaattaatctaactaaaaagccaagcaacaacaaaggagaactcaagaactcaagagaccttgttggttggattttatcatttcagtttatagagttgggttatacataaaaaaagttttgaatgggttagaaatttctaggatcagatctcaaaattatgttcattttacttttttgaaggaacaagttcattttattttatgtttctgttaagatatgaattgtcagtaaaatcatctcaattttacatggtaaactgtttactcattatctgtaacttattatactttattgagaattttactcaaaatttgggagcggttaacaggtttgattgaactgaactgaagccctaaccatggaaaccctggaaccaacaaccccttctccttcgtcgaaagcagtaaataaagtatcaaggctgtggaggccag

SEQ ID NO: 268006 - DNA, 1235 bp, Cannabis indica
aaattcactcgacaacacatatatatgttcggtcggttttccatagacactaaaaccaaccatgttaaggcggttttaagcgaaggtggtttttttcgattttttagttttttcggtgttcgaacaatcagtgtatttagtttggttagttttttggatttttcgctcacccctaggccgaaagtccttaactcttaaggctaccttgatctttgggataagaacgaggatagtctcattgatgagagcgatgttagcatcagagtttagaatatgaaggacaacgtggcaaaggtctctgccaatagtgtgccagttcttttgatagaagaagggatttagcccatcaggaccaagagctttgtccccggcaagttgaaaaagaatctgattaacttcagcaaaatcaaaattatgggccagatagtcataatgttggctaggaacatgcttattgacccctttaaggacaatgttaatggactcctgatcaatgcctttggatgtgaagagatcaaaatagaattgaatgaaagtgttggtaatatctctgaggctggtgatagaagagttgtcatccaaggtgagcgcctctatgaaattatttcttttttgagcagaggcccgattgtggaagtatttggtgttcttgtcaccagcttgaagccaattagcacgagacctttgtttccaaaaaacttcttctttaaataggtgtttatcaagagaagattggagttggttggcagcattgacatcattcgaagaaatgggggattgggagtaaattttatcaatgttctgttgtaatatctttatactgttcttgaaaatattcttctccttcccccaagagatcatgtggttaatgcaattattctgtatacttaaaaaaaatgtcaagaatagaggtgggattgttatggttcctattgacagcccaagtgttttgaaccaagttatagaaatcgggctcagtgagccaatcattctcaaaatgaaattgtggtgtacttttcttgaaagcatgattaccatcgtgaataagtttgatggccctatgattgaaaccataaaaaggaagatgctgaagagtagcatgggggagaagggaatcccaagccttattggtgatacccccaaatccaaaattctcatgaagagtgccatgtttccatgtgaagtcggttaccagtaaatggcgaacagtgaaagattatacttggaaacaaagt

SEQ ID NO: 268007 - DNA, 1094 bp, Cannabis indica
gttattttatagtttattgatagctatcatgaggttgatttttcgttatttttaagttacctttttgctttttgttgagaataatatatttttataattttaaaactttaaaaatatttttataaataaaaattttaagtcgtaaaattataaataaaatgttaaaaatgatagttttaaaaatttcactatcaaatacacctcttgtctaatctatataaaaaaagataaatatttagaaatatgtcacataaaaaagagcccaaaaattcaatgaagattcgattgaattgactttgttaccctcgaagaccggcaaggtgtaattgatttaaaagacaaagagggtgttgtccactaccaaacatgtcacaatttcttctcctactctatctattaccctatctaatattaaactacttgcttcccattaactaaattaagtattaaatatatctaatttttcctaatttacaatataataataaaggagtaagttacaccataactttttgttttttttaattggttaaataatctatttttttcaattaaaaaatatgtcaaaatttatagttctcacaccactacaaaaagaaaaatactttatgtgacaattttttaattacaatataaattttttgtgatttaaatgtgatttttcattacaataaaaaatttacctataactaaaatatattatttagatacaagttatcactaatgtagttttagtcacaataagtattgtgattaaaaatacgtttaaaaattagagatatttgcaacaaaaattcatgtataatttactttgttacatttaaatggttatgtaaattttttgctggtacttaaattcctatgaaaatattttattagtaaaattcttatataatttatatttgacttcaaaaaatcacaattattacatttaatataacattagtccttagttgataataacaaaggaactaatattataaataaaatgactatacaaatttttgccactaaaaatttatacaacaatttaattgtaacgaaatgaattatataattatttttgttcctaaaaaaattacataaatatttaa

SEQ ID NO: 268008 - DNA, 853 bp, Cannabis indica
aaccccatcagttcagatctggcttctacaaggaagaataatgaagacaaagattcggcataaaagagaaataaataaggagataaaggacatccctatcgtaaccctcttgtcagaatcactcggcctttagggtgcccattgattaagaaagtctactctggggtcatcacacagtccatgataaccctaacacaaccctcagtaaagctaaattatcgcatcatactggctgagaacccccattccactcggtcatatgttttactcatgtcaagcttgagtgccataaatccccttctcccgttatttcttttaaataatgagtgaagtagctcaaaactgaccataatattgtcacgtatgatatgagggggcgaagaacacttcatcctcagtgatagcactttggcaaattttatacattacattacacaaagcaataggtcgatactctttaaccaatcttggtttttgtacttttggtatcaacaccacgtttggcttattaaactatcgcaccgaagctccttcatttaagattacaaggcatacttggctaaccctttctcccacaatatcccaaaatctctagaaaaagaaagcatgatattcgtttggtcgcagagcttttgtggcaccaacgaccttaacagcctggtgaatatcttcttgagtgaatggtgccattagacgctcattattgaccaccaaaattttaacaagtttcacattagattttctcatttgtcggattggctgtttgaaaaatatctgtaaaataccgctccacttcactaaaaatctcatcctcaacacacagtttatggccaatttttgtcataatctcagt

SEQ ID NO: 268009 - DNA, 762 bp, Cannabis indica
agtaaattcattttaccagcgcaatactaacttttgccagcacaaaaatatgctggcaaaagtgacattttttgtagtgttgtctggcccctgtacctctcacgccactctgtttatgcatgatgacacggtgggggatttgagcctgaggatatcggtagttggtcttgcctccggagagttggctggccagatttgagcttctaaggacgaacatcgatgaagcaggcattttagggtctcacgcacccattttttccacctttctcgagtagactgaggcatcaacattttttttgggtaacacctcggatctgcgcatttttggcctttggccagacctcgacgaatcgtcaggaggtctaccttcttttcttgcacagaccttctttcagatggacgtgtgccagtagtcgccatgcatatctctttcttcagctctcaatgaaagcaccaaaatatttactaagtaactactacaaaaaaggctttttatcccagtttttaagggcattttatgccggtttcgctaaaataaaaaccggaatatgataaaaagtcatataaaaatcgagataaaaagaggtcttttatcctaatttttatgtaaaaactgagataaaagcctacttttcatcctggttattacatagaaaccgggataaaaagaggctttttatcccaatttttatgtaaaaaccaaaattaaatagtcaaaaatataataaaaaaaataaacccaaaaaaaattatattagttcc

SEQ ID NO: 268010 - DNA, 1228 bp, Cannabis indica
tatgtaagtttagctaagtttaggctttgcctagacttgctaaacatcctcaattgctaagtaaggattcaagaccagttcaacccttatcttcattcattttcttctattaatgaccaaggtggataattgatatgtttggccactaatagaagaatattcatctttggacaaggacattttaactactctaacgactttaacagctttacctaactgtcagttatgacagttatgatcgggtcctgaaacaaggctataaatagccaactgttgcagcattcgagaagtaatgctttaggaaattttgagagctagtttagtgtttgtaaaagagagattcttagtgagataagttgttatgtaattgaagcttttattcattagtgaatgtgtcaaagaacaccttgtaaacaacttgtaatattctcttctagcatcaataaagacaaagccattggggctgttctgaccgaggagtaggcaagtgattcttaatcacttgttcaaacctcgttaattgattgtgtttcatttccttctactacttctattgcttttaattaattatttactcttgttcatttctggttcttattactggttttgctactggttttattgcactttgttcatagttgcattgtttaattttaattgttcagttctgttcttgattaaattctttgtattgtgttgtttgcgaggtgagtgatcatgtattgatcacatcagtaacaaaacaaatcttatgaataatgtaatgcttaaattaataattatcaataagatgacaattaatttttttcgtaattaatttagttagttttaagatatttaagattatgtaatcgtacataagattatattttattattaattagtttgttaaatcaaattcataaaaactgtttaatgatagttctatgtttattttgggttaataatgaaaagatgtaaaatagaataaaaatattattattttaagttacaaattaactataaatttatttttactattattattttcacaataactgcccaatgtgtaccatgcttcttccactagtatgacaaaatatattaaaatatataggaacgcatataatcaattcaaatcaaagaatataaatatatatatttactagatagatgttacgtgccaagtcacgtatgataattttattttaatttttaatttttttttaatattataattttacaatta

SEQ ID NO: 268011 - DNA, 614 bp, Cannabis indica
ttttaagtatattctgttaaaccaagaaatgtcgttagatagacacttttaatatataaagatatatatatagaaaataacctcaaagaaaaaaaactcccaaaaagggccaacgaccaaagaattcatagatagctagcattagccaaaataatattctgaatacaagatgaataactagggcaccaaactatactagaagtagtttgcaaagcatatttagttagtgtatcaactactacattaatagatttgtgacaaaaataaaaaatcacaacagtaaaattggagcattataaatatctaatatcatcaagaagtaaatccaaagaagaatcccagaccattgaagaattgagtttacgaatcaaactttgacaatcagattccatctaaatactgagcataccaaaggagacgcattgggagagggtgtgtaacgtaactgattacaagagcttcggtccactacgaaggaggactgtcgtgacctttccaagtagtagaagcaaaaatattgccatcatggtccttgacaaccataccaagaccaaagtcccagtgagggggccgattactgcaaggtggttaagggacggaaggtaagtgaccat

SEQ ID NO: 268012 - DNA, 701 bp, Cannabis indica
taagtgtttatataagaaaagaaccaagtgcccattgaagaaagcaaagtttttgtgaaattttacaactttccgctctttttcttttatttttgctttacgtattgaaaatacagactgatttgggaattttcctagtcttctatgtttcattgatacgaaatttgtaaaatattttctcttccaccgataatattgttattatgaggagaatatgttatattccagactctttactatcttctgtcctttggacgcttgtccatttgtaatgttatatacttatcatatgtttccattcttaatttttttaatgaatattatctttgtttgggtaaagtcttctacggcagctaggcatttatttggaggatatttttcagtttacatattatacagagttggtttaatgttgttctctttacaggaaattttgataacttctctttcatattacatccaaacaggggcggacccacatagaagcgaggtgggacagtcgcccaccctaaaaaaaaatacgaaaaaaaatatatatgcattttagttagttacaacgtatatttataaataaaagtaatatatatacacataaaataagttttggtataatggtaaagtcatttcatacatttaaaggaagtcatgagttctaatttcaataaaagcatgtttactttaatatttttattttacttttt

SEQ ID NO: 268013 - DNA, 813 bp, Cannabis indica
tttgatcaccgcgtacaaaaaaaaaaaaaataaggcccaagcaccctaaactattcaaatttctattgaaaatcttttatgttatttggtatataaagaaaaagtgaaaagaactatatattcatttgtttggtattagaagggaaatagaaaggatggtgtctccccctccacttctcctttctcttctcctctcccttctaccaaacaatggataacactcatccttccactactctccttccttccctctccatccctcctcaaatccactctaccaaacatacactaagtgtttgttcaactaagaagaagagtcacttacactagccaaaaatatatgaataggaaggcatttatttacataacattgtatagattatattaatcataatcatataataattaactcttgtggaagaaaatagcttggaacaaactgctatgctatctcagcaatatttttatcattaacacctaaccatttgatagcagtaaggccaaacctttggctatttttcacattcattaatcctccaatggtgccaattcgacctcttggatcgctcttagttttgctcgtcccccatactcttctggcaaggtttcttctccaacttcttctacaaaagctcttctttcctcgttgttggtcacaatcacaatctgcatttcgaaatcccaccaaatactatgaaactttgttttgtctaaacaacttgttgatcacataaatcaagttaggcaactatgagaaaatcactgtagggccgaccttatacgtaggcaggctagatccgtgcttagagccca

SEQ ID NO: 268014 - DNA, 1628 bp, Cannabis indica
ctagacacactctttgttagttcctaaagcttcttgagccaagttatgcactaaagtattatctgatcttaggataaacctggttgaaacacctggaaaagaaaacaaagaggaagctatatcagctatatccatactaacacctctaagagcagagcgatcatagaccttcttctgaatttttgtgatcaaattctgccagtttgacaagatgagttgtattgggaatctaacagcttgacgccaacataaagcacgtcagagagcttccgcttcagcaaagataggaggcaggccagaaggggctgaagaggaaaattccgcaatgattgagttgcctgagtcttggactactgcaccataaccatgaagattcgattgagaacgagctgctacgtcaacactaattttaaacattcctagtgaaggcagcaagggggtgtcttcaagaaaatgattttcttgtgaaggatttatctttttttttttttttttttgcatttttgtattcatgcaaaaaagaaataacagaggactccatatctacctccatagtcttgttatgttcaaaaataattttcttatgttgattccaaattgaccacagaagatcgaagaaaacagttaagtcatctttggcaaaagcttcgaaacctcttaacaaaaattctttcatgtcatagaatttaattttagagaaaaaaggttggaacttagactgcttccacaacttacttgccctagaacaatgcaatagggagtgggtgttagagtcgatatggttaagaaaaatggagcagtaagggttatcgaggattttcttggttaagaggttaagtttggaggggagaagatgatggccgaaagctttctaaataaagtgtatgattttaggggggatattagaagggttgtgagaattcgcaaggtgataagctgagttaacagtgaggctaccagaagggtcatgcctccaaataagacagtccccgttgaaaggatcaatggggacattaagaacaaaattaacagagctaccatccaagtaatgggtaagcttattcgtatcctattgtttatcctccttgataaaatattccacataattttaggtggataacaaccatttttaaaagataatttcctacaatccggtaaccaatttgagctagtgatgtcaaccgacttaccatcctcgatttttcaaaccagacctttggaaagaatgtttctaccccaaagaagacttctccagcagaaagaagggttatgaccaatggaagcttgaaggaagtcattgtgtttgaagtatcttgctttcaaaagagaagcaaccaaagaatcagggttagtgaaaatctgtcaagcctgcttggccaacatggctcgattatggtgacttatttgacgaaacctaagacccccaaagaattttgacctacagagctgttccaatcgtttctagtaaatcttgtgcctatttcccaaagatccccaccaaaaatcagccatgagactcctaaagtgcttacagatagaaatagggagttggtaacaagacatggcataagagggaaaagctttaataatcgatttgagcaggagttctttgccagctttggagaaaa

SEQ ID NO: 268015 - DNA, 967 bp, Cannabis indica
gtaagtggtattattgtaataaaacaaagatggtaagtaaaaatattgatataggcatgtagggataaaaccgtaataaaatgtgcaaaataaatttttggtgtaaaaatttctaaaatatttgttactaattaaataaaattaactatttatgccttaaaaaaataacaacttacaaatttgttgagatgatttattgaattgttgcacttgcatgatatacctacaaaaatatatagtaaaataaaattaaataataaaagaaagctcataattttttgaaagagagtgaaattaatgtgatagagaactaaatgtgatatgtttcactctcataaaaaagattaaaggcttccaatgcatgcaaaagaaaaatagacagaagaatattaatattgaaccaataacattaagatttataagcaaaaataaatttaaagaaggaaaacatacacaattatatataacaaacctgatgagtctttgttctccttcaccatagccagtgtttctttcaagcttaaaatctcataaaatatctcaaaaatctcaaatgaaacccatctcaaactaagccataaatgaaaaagaaaagcttcaattatgttgacaatacaagcaataccaatgattaagagttagttaaggtctattgtattctgttaagtctgttattgtctgttgtatttggttgttaggattggttaagtgttttcactactaaagaggtatatatatatatgaacctctcccttgtataattattatcagagaataaaagatttactctcttctctgcttctttctctgtttctagctttctaaaaattcaaattggtatcagaggcatatccctaacgggctttcgatccacacctatcaaagagttagccagccgcaagcgagcaaaatggtactcccagccgcgaacaagaataagcgagcaaatggaactcccagccgcaaa

SEQ ID NO: 268016 - DNA, 2124 bp, Cannabis indica
gttactattatctcaccagctaatgtatacatcaaaattaaaatataatattgtagtaaaaatagaaaagactataaaaaatacacaaaaattaaaaaattcataattatcaaatttattaaagaagaaattcattttaatttcttcactctttttttccatagttaataatgtagttggagaaaaggaaaagaaaaaacttgtcttgtccccactttatcattcctttattacatttcaaatgagaaaaagaaaaacaatttctaaagtaaaattcttgacttattttttctttttcctttttttcctttttctttccctttatttacattttttcaaagaaaaaaagaaatagagagttagtgacttatttaattttttagattttttatgattatgaaattagatagaggttaagaattaaccccaaaataatcttttgtactttgtacaaattaattaaagaatcatttatttttggctagttataagaaaggaatgattatttgtacgtgaacatattaatcaacttgtcatgttaaaaggtaaagattttccaaaaataacaataagacaaatttaaaataagtatgactttgaagtgccattactcttaaatacataaataattttatgacagtcataatgagaacataaaataattaaagtatttttaatggagttttaaatttgtgatatattgtaatatttttatattttcgtaaaaattatttcttccttagagtggtaaaaaataggataaatttgatacattctaaaaattatactaaatttaacataataaatatatattttaatttacagtcatcctaaacattccattgtaatatataatcttaatttattaagaattatttttttttagcttaaaaaaagatatatttttgtttaacaatttgcggtttgattttttttttcaagaaagtgtgcaatttaattcataataattgctaaaataataacatgaaattaaattaagatatctctagaaacataattaggattagggtaaaaaaataattcaaccaatcaatcgcctgatttgtagatcaaatgaaaaaatttaaattaaatgaaaaatattacaacatcacagttaataaccttaagaatacttatataatttttttcaccattcataaaataccaagattattatagtgtattgaacttaattataaaaattatgtcaaatataacatttgtatatttactcattttcaaataatttttttagagagaataccgattacaaccttttattataattttttagtgaattttcgcgatccaaatcacatgtaggaatatttttttttcataataatatttgttatagttacaatatcatgtctgtaaatgtttgaaaatttttgaatactttacagcactgaaaatagagtttctaatgtttaatttaccacgcgtgttcaaaaaatttatgatatatttttgtacactttaaattactcgaaaattttcaaaaatatatttcaacatgtgtttttagacaaagaaattgactaaaaaattataataggagattcgagatggtttaaagtaagaatcttttcatccaattaaatttgtctaatacattatttgggacacgattttgtcccgtgatgtactttaacggaatgtattacgtggtacattagatgagtatcatgttacattagatggatctcagttggtacgttaccattttttaccataatacccctagatcacccaacccttagatcaataacttctcatctaacggctgccgtacatgacgaaatatattatctgaaagtaaatcgtgtacatacattatttatgtacatatcattatttaaagaatcttaagattaagaacaaataattgctacagtattatttttgtatatatatacacacacatacctgacctaaacaaaatctccttctagggagaagcgcttttacatagagaccataaaacctaaacttgttcctttccccaactcctcaaaatactcactttcactctaacctgagctgaatagagcttctcaacttcatcatcaatggcgattcttcaaagatctgtatcactcactctcattttattccctc

SEQ ID NO: 268017 - DNA, 791 bp, Cannabis indica
taaaagtcttaatttataaattaagatattgttttgacaaataatttagataaaagctgaaattgtatgctaaaggcaaaaatacaccatttttttaatcacaacacacaccactcattcattcaatgtaaaatcttttcaagatgtactttttccaagttactttttgagaaagttaatgatattttagtattcatatttcatacttgtttgaccaaaaagacaagaaaaagttaccattttgtttttatagtacccaatgtgtctcaatttagcattttaatttaatttaataaaataaagttaaatactattcaataattgtaatttgaatcttggagttaaacaagtgaatatgtatgttaatataaaagtgaattattacattgctaactaaataaatggaatcagtttgtaatcataattaatttatgctatgctaagtagagtggattagattaacaaaataacattattaatgaacaagactcccaccacaaattactcacaaatgagcaaataaaatcattaattgtatatattgctcggagctcttgttctttttctaatcgtattattagaagccatgctctcccttctaatctgattttgcttttgaaccaagatttgttgagttaatcaaattggctccttttattcaaaatagaacacccttagtaatatgtaattatatagtaattatagagagataatcatatatgggcacaaattaaattttgtgatcaaatagattacgtatagataaactacattactagaagaataaccaa

SEQ ID NO: 268018 - DNA, 876 bp, Cannabis indica
aaccaaataataatcaaaatgtagtttatgtaaatataatacaatacatatgcatatatcttaaaatatatatatatatatcaagaaaaaagagacatgattttatatatgtagaattgaaattttgagttttaaaattaattgctagttagcatgagggtatatttatatttatatatatagaaatatcgagtattaatataaccttggcagcccttgtcctagctcttgaccatctggaaattgcagtttctggcttatctgagtcaaaaaatgacacagagcttctcctaagggcagcaaaatctaatgccttccaccttcatccattattatataatataattaacaaaagttacatataattatatatatacagaatttttctggcaaagtgaacttacttttagtcctcactggtgtggaattaaattcagtaatatcattggtgagatgttaaatgttatggtagtgtctggaatatctttctaattggttttctgtttttaaaattgaagtgaaaatattttttcaaaaatattttttcaaaaatatgtttcataaaactgttctcactttttaattttttagttgagaaataaaattttaaaaacaaaaaaaaagcactttcaatatttttttaaacaattttttttcttaattaatattttgtcactgatcagacccgattcaaatctccccctccccaccgccttggcgttgaatttggcctctgacccgaattcgagcctggacctagactagacttaaataaaatcaaaaaatgaaaatgaatatgaattctacagaacaaacttttattttctgtttttaaaattaaaaaataaaagtagttatataacgtatttttgtttt

SEQ ID NO: 268019 - DNA, 815 bp, Cannabis indica
ctacctacgactaggagacgcttagagttatgatatgagttcattattgtattctttagtatactaaaagtttggtattacctgactagtaaagtgaaagtttggtactttggttgcaattttctcttattgtatttaggatttttagcgcatatatccatgagttccactttgtttggtaattcaatgcttagaaataacaaaatgttatcgaaaaaaaaaaactgacaatcaaaattttgagttctacataacaaagttcttaatttttgagtaattttttttaacaatatgtgaaagtatatttgtaaatctattatatttagaaaaatatcaaaattattcataaaaaaatcaaaatgtttagatataatttttctttttaagctaaaataacttgattagtattgttttttctaatgtttgttatgaggttttttcgtttttaagtctgaaaatattaataacattacccttatagggtgttgctcaatcctttcaaaaacttgaactctaaatatcctcgtcaatcttaatacaataaacttataaataaataattttaaatttatttttcacaacaatttatcaaattcttaaatatgattcaatcaaaagtaaatctagagtaaaaaaaaactatgcaatcacattctccactgtaatattctaattaatcggattattttaagttgctcatcccaaatgaacttataaaaattaagtcatttatgctaataatcctaattatgagcttattgggagtggtataatattttgtgaataataagcgatttttcataataattgattaa

SEQ ID NO: 268020 - DNA, 1387 bp, Cannabis indica
taaataatttgtaaatataaataacttaacaaattttaaaatctaaccataataataatttatctggacaaattaattttcaaatttctaaacctccaaatatcaataaaaacaagttatattatttaaaataaataaaaacaattttttattctgatatttcagttttccaaattgaaaatttgaaatctacataaaaatctaataaattttggcaaatttttgatcaaaagatgcatgaaaatcggacaccatgcaaactgccctacttcagcatgcacacgggctgcatggtccgaaaaacacgcacatggtcggagaaaaaatagaggaaaacaggggacgttggagggcccccatgcgcgcccgagtccaagcagcatccgttgagaaaacttggctcttgggcacacttctgcgtgcggaaggaagggctgatcgagggatctcgcccatgattgacacctcctttcttgattttcaaaaattcatatctccttcattttttatcggaatttagttccctaaaaaccaaaattgcttatttttcacaaggaatccaaataaattgttttcagaatgaaaataaaaatattttcatggaaaaattttgtaattcacaaacattcatcaaataacacataaaccaacttgaacacatccaaatcagcacaataaaaaaatatcatcgttttaaatccatattacatgaaattaaatcattaccatggctctgaggccagttgttgagaatttttaccaggatctagatttactaacaagaatgttgaattaacatcctaaatatgaattctctaaaacaataaaataaacacataagggtataagagaatgttacattgattgcagcagaacataatgactccttccgttcaagatctctagcccttaattcatttctgtcgccgagcattatcaagatctaaacctagatctctttctctccttcaggtttggttaccaccgtcttactcactatgattgagtacttcacttgctatgtgtgggcatggcactctttcactcaaggttcgaatatattgaagaacaatgaaggaggctgaagtcgctaaggaaggaactctctcatctactagatctaagagaatgaaaactaaatttggtaagttgaatagtcaaattgacgagaggatgaggtgagagcatcatgttccttttacagtgtttcaactagggcttgaggtgagagcatcatgttccttttacagtgtttcaactagggtgtaacgccccaatattttgccttattttacaaaatactatttttgatgcattaattaaaaagattcaaagatgtttggaaatacacggtgggttttacaatgaatatgcaaaaatgtgaatg

SEQ ID NO: 268021 - DNA, 785 bp, Cannabis indica
tattagttgtacacagattagaaattgcaattaatttccatatcattaaataatttccatccaaataaattgaaattacaattataacatttattaaagggccacgtcatcaattttaggccccaaaaaaacacagagtataatgaaagaatgaggtttctttactaaaaattgttagaagagtattattaacaagcagaatattataaggagcaaaattcagtcgtataaactgttcaaggcaaaattactaattattttataatttatattatattatgtattgagttttgaagtatttatatattttatatcttattttgttattgttttattattttgtgttaagatctttagttatattgtttctgaatgaattatatgatgtaattttattaatgtttataaaatttttaaattaatttgcaattattgcaaatcttccatctcgcaattttgtagtgcgctttgtgtgattttgaggtccatgtggtgtggttcaaaaaattagctaaaattgcattacctgtactaaatgcctctaatgtaccaccactcgtagaatcaagaaattacactcaatttatcaatccttgttatatgtggacatagtaaattttcacaagttaaatcaaattaggtgacatgcttcacttctgatggttgtttttcgtctaaattttttaagttttaactttgcaatcttagggctaaaaaaatttaatttttcataaaatgttggtaaagtcctaaaagcaacatatatcatttgtgattgagattat

SEQ ID NO: 268022 - DNA, 961 bp, Cannabis indica
  modified_base (945)..(945): a, c, t, g, unknown or other
taaaattatatgtggactaatgagaatatattatgtgtacaattgtaataaatatcaataatacacaataggacataactttggttcactaacagaatagtaaatacaaaaacaaaagttaggtttggagggttttacactcaaaaaatttagtttataggactaagagttataatttagataatttaagtagtattactgtcaatatcttatgatttattgtgttttccatatatttttatgagagactttttgttttcaatacataaatttttcttagtaaaaaaaaatacataaatttatcattcaattaaaatgaaaaagtataacaatattttttttttgttgtgactgtgtgaataatttgtgactaacaaaaatatttttaaatatattggttataaaaaaaagtttgtccctccatttatcaaacaaagaacatatctaataaaataaataaataaataaaaagtttgtggttaaaatattagttagaaaattacaatttgatatgacttgattgctatatatatatacagtaagttatgactaaaactatacattagtaacaatttgtaattacatgcgaccgtttgttacaagaattttttatggtgactaaatttctaaaatgccatttagtaacaagtaatcaatattgtgactaattacaatgctagcactcttttttattttttattttattatttatttatttattttatgaatgattggttaaattaatatgtttttagaacaagtcatcatagatagatttaccatcgaagggccccttgcttttgtcttcaataatatccttagctacaataaggaatcagatcagcatataaataaactttaaagttaaatttgaagagatataaaataagataaataaaaaaattacatattagtgggtagtttttttttttttatttttttttnttttttttttgttttt

SEQ ID NO: 268023 - DNA, 600 bp, Cannabis indica
atgagaaaacaatttaagcacaaaaaatgaggtttttatagatagatgttttcaagctttcaaaacataaataaacgacctctgatgaatgaaataaactgtgacaataataatgaatctatgattttataggtgacatacactttgaactatataaatatagtggaaattacagaaagagaataaagtgtttaattgattaagaatggacaagtataaatgtcttctactaaatatacttattattacataatagaatatggttgctatatactagaggtatgttattagacctaaaaaaattttattaattaaaatattaatttaaagtcaaattgatcatttctaatgaatcttaactacgaagaatattaagatattgactttatagactttaagtattttaaaaatatttatattcttgagatgtttgatattgttggagaactattttttacataattattttttgcttattttaaaaatagtcgcgtataatacaataggatcattattatagaactttaattaagttttttttttttactaatagttttgaattgatataattcttactaattatttaataaattaattatt

SEQ ID NO: 268024 - DNA, 597 bp, Cannabis indica
atatataaacattcggttttattaactatataggagattgaagttcatatgtagagcttactaagaaaaattacaagtaaaatttttgttctgaaaaatttgtcaaacacttgtggtgtttccttttattatcaatcaggtgtttcccgacttgcaacatacatgtattatcctttatttatttcaatttgcctatattaatttctagtaatggtacactatttcaagtaatgcttagttgaaggaatgaatgcaatgcaatgctaatttggctatattaattatgtcgtatgggtgaacactcaacactatttaattaatttagtctctcttttcaaaacccaaaggctcctctgttttagctcatcatgactctcactctctctatattatgtacacaagattttcaataatcccttgacataatgttatagtgctaagcagaagaaagtgtctatttttatctttattattgtgttaaacagctaataaaccttcttctctgagaaaaaattaacaatgtctacagtaagtgtgtgttgttcttagtatattattttacttgtatttgttatctttttctctcagtaactactg

SEQ ID NO: 268025 - DNA, 732 bp, Cannabis indica
taaaaattaatacattatattatataaaactcgatacttaattatactaatagccaacaatataaaacgttgaagagtgttaaacagtaccactaacttttagcatttctattatgtgtgtgggacacacaacacaacatttatgttcaagaaaactccctttttacattttttttcaacgtttttgtatttttaattagagtaaattactagccaagatttatatatgataataggtatgtgtgaaaagaaccaaataatataatatatgaccacaccacaacacaactatccacgcaaaccgaataaattcaacattagttttttttttttttttttttgaaaagaacatagtttgatttacattataagttacaatttttattattatttccaattcagaattcaattcatatcagatatcttcactaccaaagttggtacttatacatacacacttttctatatacacacatatatatatttcaaaataccttttccttttacatttttttttttgggagcagccaaaattgacatttagttaattttttatacttttttttttaaaaaaatatgatatatcatatccctcttaattttttttgaaacagatatataaatataggaaagacaaagtctaaatatatggtgataaaacacagtatacactattaggtgattctacaatgcactctcttaaaaagattgtattgatgcacccttaactta

SEQ ID NO: 268026 - DNA, 1632 bp, Cannabis indica
agtgttacttttaactagttttttttttaattaaagcaatgttataagatacacacctagtaccacgatgaagtatcggctttataagtggaccccaatattaaattacatcaataaggatattaaactttgggagttccttttcgtatttttcatattattattgtttgtccaagacaacccacacagcagcacaagaccagtagtagagtagtagtactaattggtattggaaatcagaaaaagtaaagcgataggcatagcctaacatgcacgtgacaagtccgtgccataccctttgtcttgtcttttaccataaatacattagggaaggctcaaactttttaccatttgccatgttttactttttttggttgcaacttggaagcttttgtacattctataagagaaaaaggggaaatattgaaattgtgaattttagtgggttatttgtcaattttctaaaaacatgtgtttttttgaaatgacatgttgaatttataagaaataagaatatacaataatgaattaaatgttgtagtttcaaaagaaataaagaaaaacaaaattgttttcaacacaacaagtaaggagaacttaaagtcaattttgatacaaaacctaacatcacactcaaaaatccaactagaaaagattaatttacgaaaaaaatattcaaatttaatttttaacggtaataatacttaatttataattttaaaatttctgtaagtacttaaatattaagtgttaagtaaattgtcacgtgacaatttctaattggtctaaatcattaaataagataaaaaaaaaaaattggttttagaaaatgtatcattggattaagtgagaggaagagagagaaagagaggaagcaaacaaatggatccttgcaatctctagatgtcttttagtgtagaaaaaaacctccacttccctacaaatattcttatttaatttaattttttaaatctttagtgctttgacatcaactctcttctctttctctttctctttcttagtttaattttttattttcatgtttgttaattgtgtcagaaatgttgatacaataacattattacaaccaatctcctctctgtaatacaagttatgatcttctactaccatgaccagagataccaacatagtattcccttctagtgtttgacagctcatccatttgacacgtgtcttactatgattgaatcatgaagacatatgtatttaccattcttgtagtgtaaaatatgagaatattagttgattctctcatcctattaatagaagccctgaaaattagggagtagatcatctactttctaattttcttttcttttaccaatgacactaatatgtaaaattcagcacacactaataataattattattattatattattacactttataatactcatcattccttcctcttttcttgtttggggtaatcacttgttttttctttttttaaattgaaatcttattaacaagtttaatacatatcaataagaaaatatgtataattcttaatctaaattaatttatcatccacattaaatgcatatacaactaattcatgaaaaacaaatatgaactaaaaatgctttaaaaaaactaaaaaacaaacta

SEQ ID NO: 268027 - DNA, 1046 bp, Cannabis indica
gtcaaaaagcagtatttttgtaaaattccctactaattaagctcatagtatggtgatatattattgaattatgctgctgtatctattgctttccttttatttaattttttaagttacaacaacaatataataggaaaactaaatggtgcatatagtaaactgacccatcataataatgaattatgttcaacatttttagatcgttttaattctataaaaaaaaattatatgacaatatataatgtaaatatttaagatatatatgattaaaaataagattcaagcaatttaattattttttctatgttctatactgtaaaataaattatttgaaatctatttttatatggtaaattattttaaatttattttacaatatgttataaataatatatcatcctatcaaaaaaaggaatttttttatttttacatttcaaaacagttttttttacatttttataaaattctacatagaaattcctaactagcgctgcaacttaaattgtaaaaaaaaaaaaaaaaaaactcattgagaaactcctattgcaattagcgcggcaaccactttaaaaattcaaaccataattttttttaaaaaaaaagaattaaaagaataatatataagataattcccgtaaaaaaaaattatgatgatttataaatacaataaaatgcaacagtacccttatttttcttctttttagattgcaccacaggagcacctatatatataataatgttaatatgagagggtcttcaataatcataaaccaaagcatttagagggtaattaagcacaactgctagctggtgcataaaggtagcggtccccatatatactataattaaatcacaatatataaatatataaaattatttattattattattataaataaataaattgtaaaaagaggatataatgatacattttgctttggtacaactgtgatatgtgtcagcaaacactgctctcactaattaaagcagtactgtgtgtcattacatatttttgatcccccatatgtaaactcactgtgacagtc

SEQ ID NO: 268028 - DNA, 1513 bp, Cannabis indica
gggttcattaggagatcctaactcttgattttgagcattataccaatcaacaaagtttagttttgccaatactaacacttcctcggatgtaggctgtttagcattccaaatcacctcatttttaacgctccaaatcaaccataatatcataccagcttccaaacattctgtcaagttccaggctctcaaaccatcttctcaccagttacaaaaaatcatagcagcaactcttacagcagaaacccgaacctgcctccaatagctttgagcaaactcgcaccgaactaagacatgtagagtcgtttctggtgcggccatgcataatgggcagtcagagttaataggtacatgtttggttgtaagctgaaattgagtaggtagactgtttgtgcacactcgccataagaaatcttttacttttgggggaagtttaagctgccataatttcatccaaacacaagaattatttggttgctcattgctggttttttcctgctgcaataaagcatatgcgcttcgaacagtatacaaaccagatgattcctttctcaaataccagtcatcactctcaacatcagtagccaatggaattttccacaccaggtcttgcacatcatttataacatcctcatcccactcacgcacatcaactttcattaaagacttcaccattctaccaacaaggcacagctgttgagattcaacaaaagggtatacatcatcaacaagccaaggatcgttaaggatattaatttgtgaaccattaccaaccaatcttctagctccagcccgaaccaacacttaggattccaaaacacttctccatataaagcttgggttacttcctaaagttgcagaaagaaagttaccatttgcataatatcttgctttaaaaaattttccaaccaaactatcctcacaagtaagcaacctccatccttgtttggctagaagagcaaggttaaagtcatgaaaatccatccctcccatactcttgtgcatcgagagcttatcgcaactcaaccaatgtatgcctttgttgctattagatcgccaccaaaacgtgcttattgatctttcaatatcttgacaaataccaactgaaattagaaagatattcatagtgtatccagggagagcttgaaccacagacttgatgagggcttcttttcctgctcttgaaagaaacttgttatcccagttttgaattctcttctgaactatttctatcaagtaactaaagatcgcttttttatttcctctaatggtgcttggcaacccgaactacttgctacgctcatccgcttcatgaatacccaacctttgacaaatagcatgcctcattgtttgagtagtgttattgctgtagaaaacagtggacttctcaaagttcacccgctgccctgatgcattagcaaagctctccaaaagtttaataatgtaagacactttctcattcgtaactttacaagacaaaaacctatcatataatcttctcacttcaataagaatt

SEQ ID NO: 268029 - DNA, 483 bp, Cannabis indica
atatatggttgatgccaattttcagtgaattcgcgtccttggcccgggatcaggcttttctttaagaaaaaaaaaaaagaaaaaaaagaaaaaaaaaataatttctttgcattggatcccctaattaaagccaagtttacgggtgcaagcatatcatggaatattatcataaaaaataatattaaaaattttgtaattattatttttatctatatcttaatcatttgttagttattccttagcttatatatatatgcactgattatttcatatttaaacacaaataaagaaacatggcaaaggagaccaccaaatatttttccaatgaagaaaataataatggcgatgaatcactagaatcgattatatctcagctacctaaagccaatagttggtcaaaatatggtataaccttataccaaaattgttggtttccatccaatatgatgcccaacatcatctctgtaggaattttattcctaa

SEQ ID NO: 268030 - DNA, 1006 bp, Cannabis indica
acatcatttatccttttttttttcaatctaatttatatctttgctttcattattgcatccctttcattatttggtatttcttttttgatggtgtcattatttgagttattttgtttttcgttctttcattccttttattctaatgtctagaactctgtctagaacattattttaaacctaaaatagatactctttataaagttgtttctaatttcttctgaggaatattccagtaacccctcgattgttagtggagaaaatatccattcaatcatatagctgcaagataagagttaatataaataaacaaataattattttgattgttattataagaacgagaaagagaaaacacaacacaataagaggtgtaactattaaattgatgtggttgtaaaaaagtttattgtcttatttaataaaatcgacaaaattaattactatagcatttttgaaatctgaatttgcttttgttttggtgtgaaaagtttcaattaaattttttatattttatatatgtataaaacaaataaatattttttatataagtatataatatcttaatatttatatttattaatatatataattttttatttaattgattgtaattgtatgacatggaattttctttcctaatttatttaaggatattttgtttaaaaattgttcagattgattcattgaatctatttcaacagattcatagtttgtttgaaaaaattctgaattttcttttcatgaatattttgtatttactttctcattgtttcccttactcttttccactatctaaagtgtatttagggtgtattatgtatatatacatctgttaggttatttttagtattaattttagattaagtttagtatatttttaattgagttttaatcatgtttggagtatttttacgcttgttatcttttatttttgcagatttaaaatgaaaaaagattagaaaaatatcagagaaaaagatgggataaagataaaaatatcatgata

SEQ ID NO: 268031 - DNA, 538 bp, Cannabis indica
aaaaaataaaaaaaaaacacatttttgactcttattttcaagataataaattatttaaaattttcaaaaattgataaaaattctactataactatttttttgaagagaaattctactataactataatacaaatggttattaaaaaaaaatataaaaaggcactagtggtacctaataccctcctcagtatcatatcgatattagtatgattaaatatcgaatctcatataacttaagagatagccaattatagtgcatcactgtaggtgatactagacattactgatgttcaataataatgctcaaaagaaaataatgttataactttcctcatattgaacacaaatataaagccaccaatagtgatgttgattttctatccttattaactcctcttgttcaagttgctcttaaatggtgtgcaagtagtcacaatttgaagagtggcattatgtttttaatgtaataaagctgtttagattcgtgttattaacaatttcaatgtatttttttgtagcatctgtttttttttttttt

SEQ ID NO: 268032 - DNA, 1091 bp, Cannabis indica
caagaattttgttatatagccacactttatatagaatagatattaattgaaaaaaaaaacatgtcaccaagtaattctctcagagaaagttgattgaacaaacgaattgatcaaacaataataataacagacaaataattgaatataattcaaactcttaataattaagtggcataaatgaataccataaaaagaacagcaacagtctatttttgttcatcaaaactacttataatagaaattgatggggaattagtgtttaaactattagatatattgcctacaataactgctatggaatgttctttgttttgttgtaaaaatccattaagtctgaacctaatcaactcatgtaaaatacttgtttacagtttttagtaattagtcatcattattaaaatttaggttataagagctcgttcgataccttgtattacattgtattagattatattaatattatttaatacaatactatgtttgatagtaatctgtattaataatatgtgtaaaattatattatctttactataaactcgaccctaactctgacccctattaaggaccaagccaaggttcgaattcgagattgagttcaaggtccaaattcaggattcagagattgaatttaggatccatgtctggggttagggttcgagtttggatccaagatcaggtccgaatctagatatgggttggggtatgggatcgggtccgaagttcgaaaccaagatttccaattcagatcctttttaaatattataatacaagcacatacatatcatttattatatgatttctcactcaaatctctctgaaattgaaattgtgaaagatattcaacgggtaaaactctatataaagagagaaaccttgtagcctctacgagaaaactcataaaacttataatgatttggatttgatgcttaaataattggattagatgattatttttaaaaataattattatttttttcttattccttttaagaaattatgcaattttcttagtaccaatcaattaaaatacaattatttaattattggattagactagtaaaaaaaagtaaaatttaaatcggactagtgca

SEQ ID NO: 268033 - DNA, 912 bp, Cannabis indica
taaaaccttgagcaatcacaaattatgaaattggggtaaactcagaattcatgagacctcaccttcttaaccgatgcagaccacgaaagtgtaagaccaagaaacacaatgaagaagaaaggaccccaaagatcccaatccctcaatgcctttccgggatcctcgcgatacggattcggaaacacaaccaacttcaaattgctcacgatcctcgacagatccctcttcaccgtatcccaaacaggctctgtcagcgtgttaggagccgaaccaaacccggtagaggcaatgctagggttcccattggtcgaggtgggaagcggaggcgcaatggggacagttggcggcttcttattggtggaagaagacggaggagctggcgtaggcggaagattggattgtatgaatggggatgaagagaccgggatcgaagccctaggagggcttggtggtctggctgggagaacggtggcggaactcgattggacgctggcgtggattagattctcgatctcgtcgatgtcggattgagacgatgggtgaagcggtaccgtgtcgccgtgtgacatctctttttctctttttccgggaaaatgtttacggttttcgttgtgggaattttcccgggaaagtgacaggaaattggattggatctaaatgagatcagtgagaagaaagagaggacttggagagaaaggggaagaagaaaagggtgtgtttgggtatggcgattacgggaatccccaaacagcgttggcttagtggatcctgtgtttggatagactcgcctactgtttggcattgatgttgactaacttcaatattttttttttggttaattagaatttttttatcccgaactttgacatgtaccaaattatgtcctctaattttttttggctgttaaaaaat

SEQ ID NO: 268034 - DNA, 958 bp, Cannabis indica
atactactctagagtcaatagaattctgctgcaactagaacattctagttaatggccttttgttgctaaagtgtaaacccatctcaacacaagtgcaagtcaatgtcaagctatgtgcaaaaaaaaattgtcaagctatgtgctcatgaccttgaagatggagcaatgtaccgacaactagttggtagtctactttgactaacattgactagacatgataactcatatgttcgatttatgcaacacccaataaaacctcatttggaagcattgtgatgaatgcttatttatgtcaatgataccactgactacagttatggttttgcttattttgtgaatatactatctggtagttgcttaggggaatgatgaaatttctgctagagcataaaggggtatgtgagagaaaggagtagaatcatctctgtttgtaaagttttcagctttacccttgaagatttttagattcttgggtatctaacacaattcctcccaacattcaaaaccaccaggcagctatgacatggatgcatattggctcaaacttaaaaataacatttcatgagtaacttttttttatcagtgttcatcagcttggtgtgaacaattattttttgctcataaagaggtgtaatatggtttggagtgtggtagaagttgacatgggctggaagtgttttgctattgtgcagtgttctttctttcaccggtgcaagtagttgcataagcttgaactcatggttgaaaccaagtgatcttctgatactatcaactatggattcaccgggcactacttgtgtttgatatagcttatctaatcattgtgagcaaccctgtgctaggggtgtagatgagattttggaatctgatgggtttatggtcttgctgtaggactcggaagctgctcaaaatgttttacatagaacctactactccatattaagctgtcaaccttagt

SEQ ID NO: 268035 - DNA, 678 bp, Cannabis indica
tcatctcacacatctaaaaacgaatcaagattgagacagcttatatcagaagcatataaagctaacattattccacaattatcaaaggaaagtagaaaataactatcaagaaagaaagaaagaaagatagataaaaatgccctattagattagataactctaaatagtgtaatggtgctatttgaaaatgacatttaagtgggcatatttgatactataagaaagaaaaaaacttgttcaatgaaatgaatatgtacttttccgtaatttgaattattattattgagttgcaaatattttgatagcaacttcttctatatgggcattctcttttgacttggtcaatatatccttggctaaaatgtaactcaatcatcggacaaattcctttgaagaagtgtgttatggcctaattattggtcccaaattttgtaattttttcagagaagaaaaatcagttcataatcaccagattttgaacctttttcaagtatcccatttgaaagaaaaagttctagagccaaaaagacaattaaaaaaaactacaaaatataaacttcatgagcacttgactcttcaactttatacaaaggccttttcttttcttttcaatctcagcattcacataataataataaaataaaacacaagaaagcaaacatatataatatataataa

SEQ ID NO: 268036 - DNA, 2626 bp, Cannabis indica
ttgtgaggtcaatttgcaaggacccaacttacttagtgttgattgatttctagctaactagaggtatacattcactatctcttgttattaattaattatgaatgcttagaagagtttgaatatcttaaatatttatttgtagtgaagtaggttttgcggtatattatattgtggtcggatggatagaataatattcatgttagtatagtttaaaggtcttaaatattcatccatagtgaagtaagttctacgattagatgggtggaataatatgccatggtattcacaccttttatttgggtcccatttttacttttcacctttgtacattagcgaaggcctcttatagtggaccatattgtaggttactttatacacattctctcgagtatcaatcaaaattgtgtactcagagtatattggttcatgagttcttccttctttgcagatttgcttcagcttggagggtttaaattcttttgccatgagaatcgcttatgtttgattctggagctttctgttgttggtttgtcttctcgggagtgacatatattcaatttgtacaacccaaagctggagaaacttgcatgtctagttagctgtacagaagtatcaggcccataaacgataggtgttgtgaacgtagatgctgaggaaatatggccagagcagttgtctaagttgtaaattatttactgatggtgtaagaagtactccatatgcctgagcataagcgtcttccaagttaatgaatccttaggccgtggataagaaatcagataatgaatccaccctctttctttgaaggtcgccccataataaggatctagtggatatacctgatgttaaagtcaccatcttcatatcatcattaatcttcatttttccaacaacatccatcatacgctaaatgtattttttgaggctttctcctggtcattgtttgatattagtcaaggaactaaattctatgtccaagtcctttgctgtaataaattgcttctacagattttttcagagttagtgaaaagcaaagacactttgcatcatcactagtcttagaaacttgcatcattcaattgtatttggataaatggtccatgtgatccgttcttccttcaattctatttgaggcattctgaagtgctccgatagtggtacatctataattctcttcacacatggttatgtatcctcttcttttgaattagacacagttccattttacctcagggagatcttctatgtgagctttgttaaatcttttactttgcgctccaagcactgagttttatcatctgaagattctcttccgcgaactcaatcattgttatgatttctcaaagattctctttagttttatcatctaaagatcatttgtagagagacttccactgttgttgtctgatactagatgcacttcttcaacatcatcaatttggctggagtcattgcaacaatttggctggagtcattgcagtaatgcgtatccttctgggtagtagtctttttggctttagcattatatttatctttctgtgcagctctgtctcttgaataagtttggttaccctaccttgaggcatggtttcctttctttttttgttaagttggctgacagatttagatttcttttgttattcaacaagaggaggcctcttcaaagtttcacccacttttacttttcctttgtccttatgtggatcataagttccaagatttttaagatcaatttttctaatggtgttattctctagagttgtttgtttggttttgtttccagaggtcattattattaatacaacttccattctcaatactttctcaagcatgtaaagaaaattcctcttgctaagttaatttgctttcaatcatttgcaacttcttcaccataatgaccacatagtctgactcgtctagattgttattctttttagagacaccatcatgaggcatgtcttagtaatcatctttcgatatatcttggtgatcattttcaaaatcatcaaaactattctcccttgattcatcgttttcgattataggatcgtcaagattttggtctttaccgcgttgatccttgtggcgactggtcacctcattcaaatcttctgtatctcctacttagcattaggattagtataatgaagactagatttttttttgagtgagtaccatgattactaaatgtaacctcgagatggtatcactgcttcctttagctttcaatgaaagcaccaaagtatttatgtaataattataattaattatcaaataaaattgccatttgtattatttattaattagatctaacaaagtctattaattaacaaataaatcctaaaacttcttttcttcacaatcaagctctagcttagtgaaaattcataaataagacatagtctaattttagaattataattgattaattaaaaccaattaactgagtctgcaagcaatattaccttaactagggtggggaccatgggtatatataatcaagcttccaataagtagaactggaattcacaaagtaaattctataacttattaattcctcattgcgccactatagattcagaattgcactcttaattatatagaatgctctatatgtaccaagata

SEQ ID NO: 268037 - DNA, 1095 bp, Cannabis indica
acaaacgccagtaattgtggaaattgggaggaatggatggactggttttgaagcaatagaaacagaccaaccactctcagctttgatgactttatgacgggtgctctgtgtattttcgaagtcatttggaaagtgcggaatgaagttactcacggcggccagctccttcaaatatcgatggcaatgcggaatgcgagtacgcgcctcaacgatcacttggcttgcaaagctgatcgtccgtgtaaagttccaacggttcctttgcctggatggatgacctgctgcacagacgtgaccattgactcgaattattctttcggtgcagaagttttcagagactcgaagaatcgcatctgtagcgtcgttgcagatcgcttctcagtgacagaccctacactagctgaagcttccattctgctgtccgcagctaggcatgcagctcacttgaattttaattctgtgaattttttctgtgataacgattctgcagtgtccagcatccgcgaagctcacggtattcagagtaacttaaacttagatggagtttccactcattttaaaactctctctgcccagtttgtgaattggaatgttaaaaagatcaacaggaatgagaatttcatggctcataatgctgcgaaatgggctaaactcaactctacttttggggacattcagatcacttccatggatccaaaggtgtttgaagactataaggaatggtggccggatccagggtagaattttggcttctaattgctccacctgctgccctcattgcttctgctctgctgggagcttttggtgcctgggaagtcttttattgttttccttgtctgtagtgtgtgttccttacctgtctgtttctttgtttgctcttttagtttgtcttttgtttgtttcagtagttctggagggttttgtccctgaggctacttagactcctgttgttctgtttttttcgttttatcaatgaatgggtgctttgcacccctctttcaccaaaaagaaagagttaaaatttatatagattagtgataattaaaaaagaaaaaagaaatactttaatgaattaaaataaatagataaaaaatg

SEQ ID NO: 268038 - DNA, 1455 bp, Cannabis indica
agaatgagaatcttagatctgaactctagcaagatagttcgagaatggttgttgaattatttttttttgatcagtgtaaaactaacgcaaatagcgtaaaaatatttttaacaatatttccatcaatttcaaattgatagtactcctcagatgcatcgatggggaactgacaaataattttaagtttgtgttgatggaatatgcgtagattttgtcagccgacacaaaagagcaacattttttttatgaatcagcaaattgcatattaccttaaaaacatcaactcattaaaaactagataacacctaaggcctaaatatgaactagtatacgaatatatcatctttatttacaaacatgtaatccaatctaaatatttctttttcattttccttggtaatttgtatcctagttctcatttcctgttgaatacatgaaattaatacatataaagtaaaagctttctacgaccaaaaatttctattttgattgctccatatttgataaactagcaaagttaaagtcatggatagtacttgcttcttaaatggagaaaaacttgcctgggatatacctctcaaaagaggcattagcttgataggtaatattgcagcagtgaacggtaaaatagaaaatgagctgcctataaataaacaccattaatggatgtgaaatatgtaacaaaattaccgatttctccttacacctaacagataacacaaatcaggtatcaaggtcaatttctacctttactaaggcaaacaaaccagttgactccaatcaaaactacttcgttttgatcaatatcgaaaccctttagaacaatcaataacaactcattttctcaaacacacaccaaagaaaccctaacagagttgagagttttctcttcagaaactcgaagtttgcatcagcccaaatctagccaaacaattctacccaaattaaagttaatccacacacaaacgcacacatacggaattctaaaaaaataaacaaagagaacaccaaatttatataggttcccaaaaattgtcaggtacttccactttcaagctcgccttaaaagattttcttgattccactattagatcttctatgatcaacacattacaacaaatggattgcaaatcaaaggtgaaaaaatggtaatcctttatttattttaggtatttcgctctcatttttatctctctctgtttctctaactttctctttttctttgtatatgtatactcttaggtatggacctccgagccctaaccctagcgctccaagactcaattttcaagcctcttccttcttctcttcaatctcatatttatgtttattcttctaaatatttatagatgtacgtagttgagaggatgagtttgagttagttgcaattagactttgtaactaactttggttataagtgagagttagttaaggccgaaggccacttgtttttgt

SEQ ID NO: 268039 - DNA, 2569 bp, Cannabis indica
aattcatatatataaatatatatattttctacttacacaaatatatatttatatataagagcacatgtaacaaagtatatcttatcaagataattatcattcattaaataataaattaagatgacttcttctaatactatcattatcataagttttatgtgcattacattgctgttggtctctggtaagctttcagccttattttttttttgttactttattaaaatttaatatatttataaagaatatattatatgtatttttttttaatttaataatctaataaatatgggagcttcattggtaggggcattatttttttcctattgataaataacttttatgaagttttttttctttaatatttttttaaataacacattgtagttataatagatacctattaatttttgaaaaattataaataatttacaatatcaaaatcataatacaaacagtcaattatatgtatgctgttcttagaacaatttatttttttttatctacatttatatatttaatattattaattatgtttatattaacataatggataaatgaataacagagccgggaagtgcaataaacctaccaacaatttgcgtgggtgaatgcacttattctgagggcgtctgcaatgagatatgtattcagagttcctataaaaatggaggaaaatgtgtatacaaccttggcgggggaccgaatggaaaatgttgttgttataataattaaaattcaaaatgtatgcttcaccatcaaataaataaaaaatatcattatagtgattgattttatgtacgttaattcttttcttacatgaaagtgtaaaatgtaagttaaggccgggactttgcacaatttaaagaaaaataaaatagtttataatgttgaaatcataattcattcgaaataatcttacaaaaaattatgtataataattcattcaaaataataaaataaataaaactagtgataaaataataagataacatatctagtatttaatggtgataaattatgataataataaataagtaaaagagtatagcatttattctatcatgctataagaattaaagtttgaaatttatatttaaatatatatttgatattcatgctctttacacctttcgaacatctataaacaatcatcttcaacctctatttaaaatatccaacaatattcgatcaagccatgtaaaataataatgagcaaaataaaaaagttcaaaaaacattgtagatttcaacattaattcaaaacctagatttcatcaacacaatcacggtgaaacttttgtcattccaaacatatgaatactatgaaatgtgagattcatcatgatatgcttttgcttaaccttgttatcaattgaaatactaactattatttctattgcaatcatccaattaattaattttgaaaaaattttcattgtgcgaactccaaattgttcttttatgttctgttcacatcggttcatcttactatactatcttaattcattctaataagttagattgtaggatgctagctgctaatcaatctcctaattaaaatttgactaattaagatttttgtcttctgaactatttgagattgttagatttaagaactttttttctaattttagtaaaaaagtctaacatagatgaaagtttaggggccataatttagtacatatcaaagttcaaggggcatgatttgttagatatcaaaatctgaggaccatggtttagtacataagcaatcaccgaaatagtaaaattgaatgaaattagacaaaagtccttaaatccaacaatctcaatagtttagggggcattttcaacaactttaaaaattcaagggtgatttggtacatgttaaagttcagaggcaaaaatcctaattagccttaaaattttgtcccgcacatgcactagtcatattttatactaactttaagaagatctattccaattcgtatatatacaactcgaatttttttgacttagggtagttgtcaccttatttactttctcagggtagtaaagaatcttacagatcctttactaacttaaactttcagtgacatgaccaagtacttaagacatttagggttaattatttctactttccaaagtattactagggatgctaatacaaaattaataaggaggacattattcttacaatcatatttttttttaaccgaaaaatctgtattttttatttctcttttttttttttttttactattcccgtacagtttaaaaccgtcgcctataccctgttataggtgacggttttaaaccgtcaggaagtccacattagcgatggtttttaaccgttgcctattttgtctgttttgcgacggtcgtataagcgatggttatagaaaccggcagaaatactttaaacgactgtttaaaaacatcgaaaaaaattatttttgtagtagtgtatctatactagttagcttatttctgtactgcttcttttgttgtttgactcctacattcttgctatttttttaatgaattggtgccttgagcatctcccctttatcaaaaaaaaaataaa

SEQ ID NO: 268040 - DNA, 574 bp, Cannabis indica
acttagatttaataatataaaatttatgtggtactatttgttattaatcgaatttgtaatgtacaggataaatggtcaaatatattttccatcgccacctccaccaccgcaagtgaacatcccaactgatgatcttccttctactaatgcaccgaccgtccttaatggtcacaccgttcttgatggtcagctttatacaatgaagactgagacatgattaaaaaaaacataagatcactcttaaacctaatctccccttaacatatatttgcttgtattgagattagacataatcccaaagtgatgtcttgtatcttttgtttttgtttatttaatattatttatcatgactatcaataaaagttatgggaaatagttgtttgttattaagcataagtatgcctaatatgatattgtgcatttaaatatcatatgttgtatcttatttaaaaaaaaaatattaaaaggcacccgtaataattagtaatatagttaaatgtcactattaatgcaattaaaatgcaaaaatactaaaggatagtgttcaataaaacattactacaccatatcgatg

SEQ ID NO: 268041 - DNA, 1452 bp, Cannabis indica
ttttttttttttttcattttggtgatattaaactaatttttggttaaagctgttaatctattttgtggtgtaatatgcataattaattatgttaacgcgatttttcattaattactaattgagtcttatttgacaattaaataatattgaaagatgactgtaaataatacacaatgaagtttgtaaataatacacaatgaagttttatgtagttttgaaattaaatttttatagtcaatgagtatcttatttctgtgttttttgtttataaagaggacaagtattacacaagtattgactgtaaagatctttgtattctcttctaatttcctttcatttgttcagtggtttctgctactatttataaagatccaagaatgatagttattacatttgttcttatagataatttccacatttattcaactgctactatgtataattgccaaataacctcttatttggccttatcctatagacgattattttaccgagataccaacttgtaaggtgctgctcgtaaataaacttttatgcatattcgcctccattcatctcgcagtatacatgttctttgtaataactcgtcttctttttacataacttcgtatttcttattaggatgcatatatcatgtatcgccttgcgttatacagtggtgagaggacacatgcaagacacatgtttagacattcttctcgcattgatcattcatgatgaaattttagataattcttatataaacttttaagtaagcttttcaaattgtatcatttatgattcttagttcgaattcttttatgctgtcttgttcgaccaacaaaatcttttgtcttgttgattatgcgttcgctcaagacagttggaggaaagcttttggtgttgcttgtgcaagtgtggaaggctcctttgttggttggttcgaaaatgcttttaagcactggaaaaataacaaaaaagaagcagcagtgatgctctgttggagcatttggagatgctgtaatgatctcatctttcaaaaagctatacctgtggttgataaagtgatctcatttgcaaaactcactttagatcaatgaatatctgctcaatacttttcttgtcgtttttctcctaataatcatgatgtttgtgagaaagataagcactgggctaaactaagttttaacatgatcaaagttaatgtagatggtaccaagggcggagccagaattagatagtaaggggggccaatattggccgacacatacgacaatagtgaattttgataacttttttagtggtgcgtgtccattaaaaaaaaatatcataattttttattttcataaatattttatacattactcagaaaatataaaccaagaactaccctcaaaagttgataacaaaattacactcaaaaaatttgagtggtgccttaagctcaatttttttttgacattatgggcgggg

SEQ ID NO: 268042 - DNA, 783 bp, Cannabis indica
aagtcactttcacacctgataacattgtatcctaggtagtgtactcgacatcctaagttatactaaaaatgctcctttcattttgtacattggatgaaatgaactttgtccctattaacactcattgtgccatcgtcatctcgtctaacacttccttgcttagactgtttgtgttaggaggaaaaagaatatcgacaggagtgtaggaggctgggtgcacgggtgcgggcgcgggcagtgtgcaggtgcggacgggcgtggggcgcagacgggcatgctagcgggcacaggcgcgtggagctccccttggcaaacattcaggcataacactaatgactccaaatattacacttagtaatttttgggagggaatagttaagtacctatggaaattctaaaaatataacttaggtattattacgccaaaaattaaacttatgtatttatctacaactgagagttaaactaaggtatttacgcctcaaattactctataaaaaatatattagaaatttaatttttataaaatgtaaatttcacggggacaagttttattctatttttttttccaaaaatctatatatgtttaagtaaacataatatttttagtttaatttatattttttaaaattaataatttttatttttattaaattttttaataattattttagtttttaaaatatgagtttgtaaatataataagcttaatttttcttcacaaattttagtttgcctaaattattattgaatttttaataatttggtttaacttttttaaga

SEQ ID NO: 268043 - DNA, 512 bp, Cannabis indica
ttatattttcgtatatataattgaaatttgcaaaaactcggtttttcaaattgtgtattaagcgtgtcaattttatatttgtgtcattacatgtttattaattatgttatcgtgttatgtcgtgatactattgagaatttagaaggattcttatgattcttaataatactataatggagtatgaacacatacaaagataaacaatatagggataataataaagggtttaaatcaataataatagagtaagaactaaggctaaatatcaggcagtcttaccgagttttgagtctacaggttatgagttaaagaaaacatcacccaaacccgcctgtggacttgatcgagttaaccaagttttgggtcaacgaatgtgagtttgaccggtttgggcagttttttttaacacattttttagctatggaggaggtggcgccgacaaggagtcaaagagaagagaagagacatagtgggggatcgatgacgaccgaggctaggtgggggtggtgttg

SEQ ID NO: 268044 - DNA, 720 bp, Cannabis indica
aaaattatttaaatgtgagaccggatctattgtcctatcatatgacgagatgtgagggttattgaatccctggggaaattcagtattcataatgtgtggatgaaaaggtttgaattcattgtccgagtcatatccggactgttttccatatatcctaacttaatacttcctgaatttgtcctccaactcatcaaattgcaattggataggatcctcttgcttttgacttagttgttggcgaaggtcaggttttttctagttcaagtgattttgaagatctggttgtcgctggtcatatttactagtggacctcgtccgattcatggaccttgtcctactcatggacctcatccttgaataactttcagttctacttatgcctgtactctctcgatcagtattgcgacgagttccgtcccccctcgcgttgatcgactatgggttcttgtatgtcccgagctgacacttgtctcgtcacgtcccgaccttttcccttgggtatgggttgttgtatgccccctgttggggtttgtacgtgccccttccctgttggttcgagaaggacgttggcgatgtctcggtggcaacccacctgtcccaagttgagtcccaggattttcccctcgttcgtcacgggggattttccctgttccctagtcctgggccgccttctgttctaatttctatgagaaggctccagttggtcatttgttgttcatt

SEQ ID NO: 268045 - DNA, 915 bp, Cannabis indica
aacattttcttaagtttttttattggacaaaactttaggtgaaaattaagggctgcgttcttattgttattcatttatattctttcaaatagccatctagatatgtcatgtattccaaaaaaattatttgatttttgtaattattaacataattttggttttatatataatgtgatgtgatagcaatttgaataattgtgtttcgcccaattttcatcatgaaatgctgtttaattttattgttgacacaaaaatgttgtttaattttattgtgatatttttgtttttgaaaaccaaatatcaatttcattaaaatagtttagtattctgagtacaaaatgttctcgagttcagctgaaataggaaaatttaaaatgctacaactagcataaaatcgagagtgcctagtaacatagtgtgctactcgatttgctgatcgtttaataaaatataaaaatgaacattgagcaaagaagataaaagtacttgacaatcatgaataatcaaagcaaatgtagagcccattgagtgagtgcttcggattgcttgcatcggaccaaactatttgtttcgatctcaacatgatcctaatgtttagttttgatccagttaagggcctcctttatacccaaggctttaataactgcaccatagtaagtaccaccgaaatagcctgcccgtgctgctataagattgccagaattatcttgtgcaacaatgccaaaatcatatttttcctccctttcgaaaaacgcaacatccacatttaacttgattatatttgtgttaacaaaatattaagcaaaagtcttttcattattaggttttggcatttaacatcgagttatattagccccgcttctctctatctatatatctatctatctatctatctatctatctatctctctctct

SEQ ID NO: 268046 - DNA, 569 bp, Cannabis indica
aaatgtattaaataattacaacaattatataaaaaaaaaatagattaaaattatcttagatactaaaacaaatagaaaatacattcctcattatatattgagttaggtgacatgtgaacatatttttataattgacattttcttggtgtagtagtaaaagagaatgcttttttaggatttttttttaatgtgcatttctaggaattaataaactatattttcaagtgaagctttcatgtttttttttttaaaaaaaaaaaataataagaaaaattaaattatcatgttggtacatacattgacatcataaataattactctttagtctttactttatctttttgaaagaaaattactccaatttctatttttatcttttggatggagaacaaggaccacatgcattttgtttcatttcatatgtcttgttatgtttcaactttcaactaaagtaccttaccataaaaaataacaactttcaactaaagtattaaaatgatactaagagtgattggcggcaaattaactcacttacctttataatttgctttctttcttttttttttttt

SEQ ID NO: 268047 - DNA, 1398 bp, Cannabis indica
tgcaagatttcctccaagtaatcccaatccagtgtatcataagccttctgaatgtcaagtttaatcacacatcctggtttggtaactttcctcccaaaatgtctaactaaatcctggcaaagcattatattatgagctatgaacctccaagaaacaaagccctcttggttctgagctataagatcaggcaatatttgtttgagtctagtacaaatcatctttgttgctactttgtaaatgatattgcagcaagcaataggtctataatcactcaccgtgtttggacatttcatcttggggacaagtgtgataacagtggagtttatttccttgagaagttgaccagtctgaagaaaggatgaaatagctccaaaaagttcttctccaatagttttccagttgtcttgaaagaagaaacttgagtaaccatctgtcccaggagccttggttcaagggatcccaaacaaggcctccttgacatcttctctagtgaaatctctaagtagcatctcagcctgttgacttgttaccagtggtccctgctccataatggaacttttcacttgcttcctattctccattttactcccaagaagacttttgtagaaatcaagaaaggcctttgttacttgctctggatcttcatatcttgtaccttcttttgattctatagagagtattctattttgcctccttctatctttaatgctagtatgaaaaaatgttgtattgtcatttcctcccttgagctaattaacttttgcctttcgttgcaagaaggaaaataaatccttttgcacttgtatgtaggcctccctggtgtctttctcctttttttgcagttcatcattaaaaggatcttcctgaagatttccttgaagaacaataagcagatctttcaactcggtttcctttgcttctatgtcagaaaaagcttccttgttcagtttcttcaactcagactttagcatcttcagtttagtcacaagctgaaacattctagtgcctttgacctgccaaattcttgccaaaatgttaggaaaaagtttgtgcaatgaccacattctgaagtacttaaatggttttttgccactaagaatttctggatagatagtcataacaactggagtgtgatcgaaggtgccttcagtgagaaagacagcttctgaattgggcatcttctccagccatagatcattaactagcaccctatcaatcttcgagtaaatttgctctttgccttgtcttttgttggaccaagtaaagaagctacacttgacttgagatcttctaattgacactcttcaatgcatctaacaaagtcacccgcttccttgtatttcaccttgtctcctgttgcccctgattttgcccaatatacgtggaccaaccagataa

SEQ ID NO: 268048 - DNA, 980 bp, Cannabis indica
atgaagaactttgtttggagagtctgccatagttgggttccctcaaagagtgagcttgcaaagagaggtataaagatggatagaacttgtacaggttgctggaaccatgttgagactatcagacatgctatatggcattgccctcgactaagacatgtttggaaagaggcgggtttctggcacctctttcccaaagccttggtttgatgtcggatttaatagagtttcttatgtttatggctagtaaatgctctaagcaggaatttgaaatgtttttgggcatgagttggatggtttggagtcaacggaataaacgaattttccaaaacaaggatactcctttgaagagttggaccccttaggctcttgattttgtcaatcatgctcttacgcagtctactatcatcaaggaaaagaagaaggacaagggtgttaacagatggaagactcctccgattggcacaatttttgatcaattgcgatgttgctctgtgtacagaccagttggagagtggagtggttgctgtcatcagagattctatggggtgtttggttgctgcagaggctatatatcatcaaggttgtgtttcggttctaatggctgagagcatggctattagattgggtttgaagttgggtcaaagaatgaacaccaaaccgttttatctcaactcagataaccaaactgctataaaccagctgttgtctaggaaagctcctcgggcagattgggggctgccgttgatggacattttctcttctaatctgctagatggttgtgtggatattcaatatgttagtagagattgcaataattttgctcactccttagctaagtgggcctttaatctcaaatgtaattctttttggtcagaggtgttaccctcttgtgctgctgccattttagatgcagagaagcctgaccttgtgtagtttctttgttgttgaataaagtactttcctttcaaaaaaaaaaaaaa

SEQ ID NO: 268049 - DNA, 848 bp, Cannabis indica
gaaataggttgaattactatatatgttagaattgtcacctatatggtagtttagggacttcaaccaacataaagggaatatgtgtttatagaaataatttatcaataattagttgtggagatctagatcaatgtagggttcgatataatgcattgtgagaggatgttagtaaatcttagtaagtccaatgcattttaaaacagagacagcctgcttgaaggatgactgtacaacttaaatggacggtgcaggaggagttggaaactctattaggtgattctgggcatttacggacacttgctttcctatatgcaagtagaggaatgagctctaaggcacttgctatttggcgtattcttgctcgaaattatacttcaggcctttggaaagataattctctgaagagcggcttagatgatagcggtagccatgttcttgctggtaaggagactgctgctgctgaggcatccaagattcttgaggagtcatctgatgcagaccttgttcttcaacatcttggatgggtacatattttgaaattctcttatgttatattggtattatgattcacaagcaaaaggggctaaccttgtgcttgttttgtcttgttagatcgcagatatcaatcaggttttcgcagttacaagattttaaacgtcagaaaaacgagaaaaccaacttcctccaggttgaaatcattctccaaaattacacatgacctacccttgtagattttggttcacgtgcatataatgttgaacttgttttcgtgcctgaaacctagtaaattatatgctcatattttttcttgtatgcagatgaagttattgctagctattgatccgtcg

SEQ ID NO: 268050 - DNA, 1973 bp, Cannabis indica
ttaattttaattaaaattatgatttagactaatgaaaaattaacacgtggaatcttattagtatttaacagatttgttgaaaatataactaatagacttacaaaaaaacgtaatcttgaagactattaccactaatttataaaatttaaatttatctgcctcaaacataaattttttgggagaatttttcaataataaaagatgcttagtattaagaaaataaaataaggggtatttacctaaatatgagaaaaataaagctagtttacataaatatggtaaggaaacttaatagaaaaaaatatcgtatttaaaataaaaattaacatatatgagatataccactttaaattcccataaaaaatattaaaatttccttcatagttttttttttttaaataaaaaataaatgaacctatagtgatcgtcggaattgttattggtgccgaaaaacttgctggactttgctgtcggtgccagaaaagtcgtcggacttgctgtcggcgccgagaaagttgtcagaatcggccttgtcaccaaaaaaatcactggaaaattaccaagaaactggtttcttggtattttcagtttcttgatgaagaaaccggtttcttagtatttttccagtgatttttcgacactgacaactactctgacgactttttcggcaccgacaacaaatctcaaaaaagtcgtcagaattggcattgtcgccagaaaaatcaccaaaaaattagtttcttgatgatttttacagcaacaatgtcaatttcaacgacttttctgaagtttactctcggagtcgaaaaagtcgtcagagtagttactggtagtcaaaaaaaaatcaaccgaaaaataccaagaaaccaatttcttggtattttttcggtgttttccgatgacaataccaatttcgacaacttttctaatgtcggcagcaaactccgacgactttttcgacactagtgataaataaaactgcctaaataaataaaaatattaaatataggctttgaaaacctaatttacatatatatgggtgcattcttaatgggtattacccatgaatgggtaaaaatagaaaaaattgagtttttatgcttaatttttctatctgaataaaaaaatctctcacttacatcatatgggctaagattgctctatcggttgaaaaaaaaattaaaaaagtttttggcaaaaaaagaaaagagaagtaaaagttgagtttcacttaaatatttttatatgaatatatttttgatatagtataaaaaatgatattttttgatattttttttaagaaagtagttaaactaagcataaaaattcaaatttttcttttgttattcgttattagatcaaaatttgatgatttaatatttttgaaattaatatttatagttaaatttgtttaataaccagataatatccattaaaaaatgatccatatatgtatagcatatcaaatactataaaaatacctaaaattagaaaaaatgctatataagttaatcaaagtatcatatttaagtaaagaatttttaaaatactctaatttcctcattaaacaaaggggcgcgggagattaatgcctaaaaacattgaatgtgatacaatgaacacccctagactgataaatatctgaaatgagtggtcatcttacatttatttatttatatttggtctctcctcttctccaaataactcatatatatcatatcccacaaacttatctctctctcttagctaaaactgtcttctgctctctttttttattttatttattttttttcatgttggcaagcgtttttcttcctttttctttttaagttgtgatttcagaaccatttctttgttgttaatttttttttcataaaattatataaatataaaaaagaaaaaaaattagttctgtagtttatttctctgctcccttaacttttagtgtaagaaagttactttttttttttttt

SEQ ID NO: 268051 - DNA, 985 bp, Cannabis indica
ttatgttgcgagggttaaaagtgctctcatctactttgggattaatgtcgaatgaagcaaaactaataatgtactgtgatggtatggccgatgaagaagttaaatgagtgcttaaagtctcttttttctctcgaagtcaactccccttcaagtatctcagaattccaattttctcttaaaaaattaactaatgattgtaatagtatcttggagaaagtgactcataaagttaaaatctggagctcgagaaacatatatggggagagtataatattaattaattcagttctaatctcaatacactcttattggccgcaaattatcatttttcccaaaaaattgcttagagaggttgaagtaatttttagagctttttttataaagggggtttcatattatttagctcatggcttagctgcttggaaattagaataatatatgtcttcctaaaaaaaacaggtagcttgggatttagaaaaattcaagattagaatccagctgcaatgagaaaatatgtctgggtaattccaagaaaaaaaacaacttgttgattaaatgaataaatagtgtttatttggtgggagtatagtactcatccaaactggagctggtattggaaacgctaagtagctgtgaaaaatgtttttagagagaagatgagttaggattgttttatctcccaacaatatacaacattcgagttgggtattagaagttattaatttgaataggaagaaaaagtaccttggaaaaaaattatttgggatagattaatcattcccaaacacagatttatcatgttgttagtaatatgacagagacttcgcactatagagttgtgaagtttgaactcactatagctcaaaattgcttgttgtgtggagaacaaaagggggatattgatcatgccattatagcaagagatgcctagaatgtattaaagagtgcctcatttaaaaaaggaaggctatgaacctgtcaaagc

SEQ ID NO: 268052 - DNA, 617 bp, Cannabis indica
aaccatgcaacataaaatgttatttttgatctttattagtaaatctgattatattgaaatgaaatttagggcacaaacccaacactgccatgaccggcaagatccctgtatggatgcccaaggccagcctgtcacatgtaagcaacaacatggccagtcagcttatacaatgccaaaaagatgaacaaagcttagagtataactcaccagagaaaggtcccgaagtccagtagagtacaacctatcagacacgccatgacctaacttctgcaatgcatcatccaagaaagggatagccctctctatgaaccgagtgattgactcactagccttcctaccagtagctggccttgctcctttaccgggcctcctggtaccttggctggcaggctgaactataggctgcccagcaggtgtaggacctagtggaggggaaggcagtgatggtccactagcatcttctgcatcagccacactagtagttgtcactctcacaaccccaagagtaggagggtacaagccatgcctctcgaagtacattggtcaaccgaataatatttctctgttcagtcgacaaagaaaggatgtgattcgttctatcccatatctccaaagta

SEQ ID NO: 268053 - DNA, 1942 bp, Cannabis indica
cattcggtttggtccaggcctggtgcaaacactataaagtcaatattgatgctgcaatttttgacagcaatggcacttatagctttgtttgtgtggcagagatgcaaatggtcattttgttgaggctattacaaggtgtcgggcagggattgtaactcctgaattggcggaggcaatggggttcgggaggccttaagttggataaaacaacgagattggcaagaggcggttgttgaaacggattgtttatctgtggttcaagcaattaggagtgatcttcctttattgtcatattttggaagtattgtttctgattgtaaaatgtttttagaacaattgaggggtgtttctgttatttttatttagacggtctgcaaatagagttgctcatgcgttagctcgagcttcctattttgtcgctgatcgtactcttttgagcaatgaggtgtctaccgatttgctttttgtaatcatgaatgattgcacttaaataaagttggatgattttatttcaaaaaaaaaaaataaataaacatatatgcacagtttaaaaacacttttgtgagaaattggaatctttatggtaaaagtatatctttctagaattgaaaactgtaaggaacataacattgttagtaaaatcattattatctcaaccgaacggtgctctttgtctttttttttttttctttttcttttttattaaacacttctactgttctatacataaagaaagaaacagaaaaagttctctttaatacaaattatttaaacctaagactaaccaacaaccaaaaatagaaccaaaaactagaaccaagctctcttaggcaacatacttgagagcaatactaattaatttatagactaactaatatatattagctagggaatatacagtagcaaaaaaagttcaaccaaacttttctagtcttaattctttaagtactcattcccatatagcatgcatgcactataatatcttcccatttaattaaattagagattctcaacaaagaagacaactattaattgcctacgtacgtgatgagaaaaaaaaatacataatttttatataaatatatggcttgccagatcatatataatataaatacctttaataacacttttctagtcatggacccttgacatatatataagctgctgttagctgactttcttaagttgttcctcaaaacaaaatcaatgacagctaaaattgttggagcaaatttgatgtattatcattaaattcagttccagatatgttcgactcttattcacttctcgatcaatatttaactcgaacatagtttgcaatgtatattttagcatatagtctatatatatacatatacccacgcaacatataaagtgttatatatcatgatgtaattactcttttaaaaattattaattatttgtaagcttaattatatatatcctaaatatatatctaaataatatttcctttttaaagaaatgtactaattaataagatggatcatcaatatcccatttaatatattataataattgtatttacaacgtgaatattttatttttttgaagagaaaagaatattatataatttatatgtgatttcaaataataagatggatcgatcgtcaaactcatataatttgtaaagtcctttttggcaagttagttgacaaaatatttttttcttttatggtaagattcttgtgcattcataaccgatttcttaccttgtttattcggtttgtagttgctcttttccttgttaggaaagttgcacttttcagctgaactttcctttgtttggaaacttcttaaaagagaagcaattctcttttggaaagttgtcttttttagggaaactttgattattgccttttccttattgatttcgattgtatcttgatacaatcagaatatctaatctgtttttggcaggaat

SEQ ID NO: 268054 - DNA, 1393 bp, Cannabis indica
aggaaaatctagataggtgatatttttgattgaagtatttttctagtgtatttaattaaaatatcatagaaaatcaaccataaccttaacaactttggaaaactaaccctaattcactattgaattaagtatctgagtaactaaggagtggtgcaaaatttccttaaaatatcatttctgagctctatattgcttgaaacacaaacttgagtttatagcgtaacatcccataatctaattccaagcttatccctgagctattctgctaggactttcttatgggctttccctaggtttaatatccattaacttagcatttttgttttatcaagtaaacctggttaaagtgttaacgtaatgagttcgcctaacacgatctctaatcttaacttcgactatgacatctaccaactgagatatttcctgcttaagacttctgccactgcattgaccctcctggggtaataaatggttatgtagtaccaatcttgagctagtttcaaccaccacttccaatctataacccaatctttctgagtaactaattactttaaattttccccatagagatagcttaaccagatcttaagtacataacctctgttcacatgtcccaggtaatgatttgggtagtactacttatactccttcagttgacaagaagaataaacagtaaccctattaactactttagaacactctccaaatcctttctgaatgcctcacaatagaccaagtacttctcttgatttaatagcctagctatcactaaggtggtaaccaattgtaactttgactcttttgaaatcagtttaacgtttgcctgtctatataattcactacttcctcttaattagctttgttttaagcttgaaatcttgaaataacccttccaaatcataacaccataactaatctatcacagaaaacttcagttccaacatcagcgtctgaccttggtcaaagcttgatcaattcaaccttaccccatgtcaattatgatcccattatcactatagaaccatccatagatgttacccttatgttatcccaaaattggcactctgacgtggcatctacttagagcacctggtcggatcaacatgccgagcaggatgcctcgctggcatgtccatgatggaatactcaacgagccgtgcagaatgagcaacacttagcgaattcaaccaagcactttgtgagtcaccagctcaatccctataactcagggatcatcttgtgtgggtgtggcatacacacgattccactatcggtgtatacagcctcaatcccacgatcctagcattcagcaatgatcccacgatctttgtgtttatgcgctttgtaacgagagaggaagctcttcctcctcaagtttcctgccctataaata

SEQ ID NO: 268055 - DNA, 2069 bp, Cannabis indica
aaattgaaaaagaaaaaccagctgctaacaaaacaactacttacaaaataaatactctataaattttctctcatgtctattcaagctctctcttttaactattgttaatctataaaacatgatttttttaatatcctgtacaatgctagtgactgtgcttgagtaaccgttgaaaacacaatcatttctgtttaaccacaatctataaatcatagcagccatgacagcaataaaaattctataagttctgttttggctgataaccaccaaccagtttttccaagcttgatactccttcggccaaaccccaactcctagccaagtctgtgctagatttgccaccttttgagagagtctactcaaagaaaagatgttcatttgattcagcaacttcagcacaaatcggacactctgtgttatctaatacgacccgaaattgaagcattttatcccttgttaacagctgagcatttacagcttgccacaagatgaaccgatgctttggaacattaatcgaactccatatactcttgctgtaaatgaaaggcacctgggacagtttactattatacaatagatgcaatttaaacttacccgaggcccttgcaatgtgtatctccatgctgtcaaaattgtctctcacatggcaaagcttccgccaataccaactcgagtcaagctttaaaacataggtccatattgaagtgttctttagatatatgttgttgatccatttcacccaaagagaatcacttttgtttgaaatggcccaaatatatttcgccagaacagcttgattccatttgacaccatctttgaaccccaaaccaccatagttcttcgaaagacaaacttttttccaactagccacatgaagcttactcctatttctactccaaccccaaaaaaaacctctatagagtttttcaatctccttcgttatactttaagggagaataaagatgctcatccagtagttacggagacaaaatgaataagttgcgatcttcctgcaaaggacagatgtctacttgcctaactatggagtctttgcttgattttctttaggatcacattacagtcttccgctttccattttattggtctcaacgggactcccaaatattttagtgggaacttgcattcagaaaggtttatatctctcaggatttcatgtttagccttgttatcaacccctcccaaataaatttgggacttcttggtgttaatagctaggcccgaagtagcataaaattcattcatgatatccttgagaatctgaattgactgaatattacctttactaaacaagatatcaaatcatcagcaaagcagagatttacaattttgagacttttgcataagggggtgatacctgaatctggtatatattactggctgccatggagagtctccttgttagatactccattatcaacacaaagaggggggtccccttgtgttagacccttttgaccttagaagttgtcttgcactcttccattaatagaataagaagtggctttcaaacaagtcatcatctggcttatgaatctggacggcaccctaaaagcattgagcaaagccttattagaaaatctcaattcatcgtatcataggctttactaatgtcaactttgatgatgcacctttgggagaggtttttcttgttgttattcttcaaaagatcttgatatatacatgcaatttttttatatatatatgcgcatttaattattttaaattttatgttcttaaattttttaaacttttgtaagatttattataacttcaatatactacaatgaacatataatttttctaaattaaggtcaaaatagaaaatattatggcaaaagtaatcccttattagagtagaatattattttaatattgttcttaattttagtcacaacaaaatttgtgcctaaaagtaaaaaaaatatgataaattataaatcatgattcctatgttgtgaataaaaatgtctatggctaaaagtattaatcacatgtttattgtgaataaatatgtttttagtcacatcaaaatatttgttgtgactaaa

SEQ ID NO: 268056 - DNA, 597 bp, Cannabis indica
taatttaatgtttatatatatatgtatgtaccgttttggtaactatagatgtgcccattggagatggtgtaatactaataataataatctgtacctataaaattgcttgcgtatctaactctcctcatttttaatagacaatactttcttattgaaagtcaatattttcttaaaattataatgtttccttatcgaaagatatatatgcaaaaggtcggtggacaaacactagtacttacaactcttattgtggttggctcatcacctctaatacttgaatttaaaacctaatcttttgtattattacttagtttacctaactcttttttgtctcttctccaataagtgttaaaaatgtttatgacgttctacaaagagaatttagcttcctttcagctcttttattggtgcatatgaatatgattagagagaaatactaagggcacttttcctgggagtatggccactgacggagccacattatctgtagccctcccaaaacctttttattgcatgtatttatacacattaattatgtaaaaataaaataaaattatatagtgttataaaataatataaaataatataaagtagatg

SEQ ID NO: 268057 - DNA, 1119 bp, Cannabis indica
attgcattgatgcagagagttgcttagttaagggcatgcgctaacaaaagttgggaatagactcaacatcacttgtggtatcgatccttggactacccaatcataatgtaaatttaaactgctatgctacattaggccacctatattaattgtgcacatttcattaaggacattcggaaatggaaagttgctttactaaatactcattttgctccaattaatgttgataggatcattacaataccattgagttatttccaaacttaagacatactcatttgtcatcatacgacaacgagtgtctatacgatcaagtccagttttcatttggccgactctattgctgaagtagatgattcttccacatctaatactcagagtaattggtagaaaaacttttggaacttaaatttgcctctcaagataaaaaatgttgcctggaaggttatccaaagtgaattacctgttgttgttacacttaaaaaggaggaaagttattgactcgatgacatgttcactatgtaataatgcttacgaatccatatgacatgtttgtttacttgtctgtatgcaaaatcagtttggaaagcttcaacttttgtgattgattgccagaaagctcatcatatgcaagacgaatattatgtgatccatctatccacgatgtactctaaaactaaatttcaaactttgatttgtattatgtgtgctatttggacagaaagaaatagattttttcatggtggatctagacgtgatggctcctgtgttgcttcttatggcatatcctactatgataactccatccttgctaaacacccactactacaaaattgacaattcgcgacggtcctaaagacaattttttttgaggaccgtcgctaaaaaaattgagcaactatttaaaaccattggaaaaaatgagcattcacgatgatttggaaccgtgcctacataaataggcgacgattttttgtttaaaaaaaagaaaaaaaattaaatcccatatacccgacagttttaaacttgtagggtatagcccccctcccttttttttattactgaatatataaaacctaaggcagccccaatattataccatttcagcaaaaaacctaa

SEQ ID NO: 268058 - DNA, 1015 bp, Cannabis indica
acaaacaaatttaagtgagatattgtaaatcgttgtgtgtctaattgagcgaaattgtcttttattttaattcaaacataaactaatgaaattaaaaatatgattaaaatatttatattttacatttaaattatttttttaattatatacatatatacatatatttttttttttgtattaattcaaagttaaaccaataaaattaaaattatctacaatattttaagtattttaaatttaagttaaaatttctttatataaaatatctacataattttttttaaatatatagtaaagttaaaatttatttatataaaatatcgatataatttttatttttaaatatatatgataatattataaaaattaataaagaacatcctattaagtaatagtgtattgtgttaaagttaaataaaaaattaaaaaaatacttacattaacaaattttatatagaatgtatatatattggttggagtatgttaattaagttccactcatttgtatttgcctaattaatgtggacatgattgttacccatgaaattctaatttgtttaatcacacctccatttcttttggacaaccaaactctaaaatactcacaacaggccacgtcatcattactaatttattattatagagccaaatttaaataaaatatattcaaggcatgatagtcatgtaggttgtcctatccattctctaccattcacatgtctatttcaacatttttctccatctctctcactctcactatatggttacacatcttcaactcttcaagtgtagattattaatcacatttaccaaatattagtaaaataaaaaatttcttaaatccccatttagtcaacactcatcaaattaaatcactaaaatatatacttacaaaatgataagagttcatatttgtttgttttgatggatttaaattgagtttttccgtttcttaaaaaagtaggaacatatatacaaagatgagatcggttaatttgctaaaaagaatgagacc

SEQ ID NO: 268059 - DNA, 774 bp, Cannabis indica
acatatttatttcttttatgttttatacagtaataattaaaaccccatcacttcaaatattcttttaggtattgtgatacatataatagtgtataataatatataattttaagcagtaaatgcgaaatatatttactaattaagctccaatattgaccatatatataaatataggaaatttttgttcggtacacccttgtggtgctggtagattttttatctatttcaatatttagatttttttttaatctaattattatttttatgattattaattatgttgtagctatttattatataatttataaatttttagaaaattttaaataatttataatgttgaaatttaagtttaaacaattactttactacgtgtatatatataagaaaaaattgtcacgcatatatatgtaaacacattatataatttttgttgacattgtaaattacttaatttttttttaaaatttacaagttgtcataaataactataacgtatacgataaaaaaataattaaaaaaagttcttctatataccgaaacacaaataagagatctaccaaaatagttatttaaaaagtgtactgtagacttatccataaataaatgagagaaatgataaaaggccttttaatttaatatcgttattggtctaactaagtatttaaatcccatgtaatttaatattataaattttaaaaaatatcgctaactaatcaacagacaacatatctaaaatgtgctaaatacccaatagtaatactctaaacatat

SEQ ID NO: 268060 - DNA, 563 bp, Cannabis indica
gcaatatgtcttctccaggtggtgccagctaaatgttttgtgcttttgtcctattattatgtgtccattgttgcaccaatgctctcaagcatatgttataactggtagctcccttgctgttaaatttgtggtgttcagtgattttgatatgtttgaggtcatggttgaatacctcttgtttttgttgtgaatccttgactatttttcataactgactttattcaagtacggtcgtttgcgtttgtccaatccatctggttcagccatgtgggattcgaattgcttttctgtataggcttttactgctccaaagaaatgcaggctgtacttggtagcatgttgtttgaaggttattttgaggttgctcaacaagtgatacccgcagtatctgtgtgtaatttttgaacatatttctcttgctgctttgatgaggctctcattcttgtctgaaattagacactaattttctcggaatccatacgtttcttttaattttttgaaaaaccatttccaagattggtcattctcagaatcggcgaaacaaaacgctagtggaaaaatat

SEQ ID NO: 268061 - DNA, 1367 bp, Cannabis indica
tctctgtttttttttcttttttactgtgatcgaataatgcatccattgttatatatgttcagtgtaattaatgaatgaacaagtgcaagtatgtatagctgcagctgtataataaatttatataaatggtcaactaaactaacgagacaaacacacaacaaccacaaatgaaactgagtagctacaaagagagccttcattaattccatcactctatctctatacttgccgaatagaaacttagaaggtcaaagcctcatcagttacgtaagccatacatcatttatacgtctttgtttttttcttgcatatgatgatgactcacgccccagtattgtcctttatttggtacaatagtaatatcaatacatggtatatagcacaaaaagctaataatcattaatcatgatcatgtaaatttattgtaattgaaaagatataatttggatggtgtgatacgtgtccacatgtaaagacaaatttttggcatatagggttattggctacgtagtttgaataccatcgtgtagctagccgaccatagtacacaaaaataagacatagacgaccagaccattttccaaccctctctttccttatcgaccgcccaaagaaaaagcccttcattgttttgaatatatgtagtaaactcttaaaagtgagtttatgtctctgcgtgcctatccattattttttttcctcctctttatatatattccatataattattagtccatgttttctttaattatctccatacatttctgagattatgataacgccgtactatttattgtctatatgaaaattaaaactactggaaaaatatgtgcactcatcaaacgcgaaattgttaattaattatgagcgaattgggcctgatattcctgacaattttagtttgaaaagtgatctgcaaaatttacttgaaaatataaaattatatttgtatgaattgcatgtcattatatattgccttgtcacggattgtggctacatatgtccaatttatattttggttttaaatgaaaactgtcggtgcggtgggagaaattaacaaaatattgaaatttaatatgtaaaatagtcacactcagtctagctactctatgctgcgactatgatcatcgcataatataaatttatggttgcataatttttagttgctttgtgcaatcattcataattattttgcaaagaaatttttttataaagttattttattaataaaaaatttaatattacaaaatactctccactcatgagtgggtaaaagcagaaaacaagcggtcatttgtaaccttaacacagtttatctttgaaattaggatggagacacatctcctcttactgactctgtatagcat

SEQ ID NO: 268062 - DNA, 995 bp, Cannabis indica
tactttcacatgttaaggctactttgtgtctcatgtatgcagtttatctaacctattgaatcatgttagatatggttttcttctgtcggagaatgttgcatcacaggatccacttagtgtttctgttgcaattcttcatcagttcgacattctgcctgagatgtttcaagttggctacacaaaattgtttttccgaactggacaggtacgaatgttggtgaggaatataaagtttttaatgtatgaatcttgttaaactcacttagttaatgtaggatccttatatttgagctgtgaaattggaaattgtaatttaactttatattgcatcaattttagctcatgtgtttttgacatttaaaatgggagggaaagaatgtattcagatacttagaggtcaaagttggtctcttgactttgtatatttctcattattaacacaaagaagtatttttggaaaaaaatgggagggaaagagaggatcttatcgaagccgtaattatgctgtgtcaatcaacctttttatgtgtgtaatgtacagttaagagattaaactattaagaagagaaattctcagcagaaagcattttttatgtgacagtttaaatataatttacaaatgttgataaatattttgctaattattgaatgccgtgaacttctattttttgcacattcttatgttctgagtaaatatttcatattcttagaatgcgtaaattttagtgactttaaatggtaagcatattcaatgcagattggggtgctagaggacacaagaaaccgaaccctacatggtgttctgcgtgttcaaagctgttttagagggcaccaagctcgccgttatctgaaggagcttaggagtggaatagacacacttcaatcatgtatgtatttatgattgtgttttcttttttagcagatagtatttgcaaagaagacgagttaatgacacatatatatttcacatttgttacagttgtacgtggagagaa

SEQ ID NO: 268063 - DNA, 770 bp, Cannabis indica
taaataatttgtttttgtattttgactcggaattttgacaattccttatttttcttgcttgaatttcactcaatcaatatttactagtttttacattagctgctcaaattactttgttagatttttaaaagctttgtcattttctcatctaagttgttctcctaatctcctaatataaattgttttagtttccaaaagttcattttcattgaagaagtgaatttaccatctacattggatagggatgcacgagtggattttaatgggttttggggttttcaggttcgagttttagaattttgagaccgaactcgccggtatagagaccaggtttttcaagtttcaggactgggtggattgggtttgggttgggacgtgtttgggtgggttaggtcgggtttcgggttagactaagctttttttttccttaaaaaaataacaattttttaacaaaaaactacaaaataatataattatacaatatattattatatatacatattacataaactaacacattaataatttaacacactctacaaatttacaattaaaaatatatataatataattatatgatatatacataaaaaataaaaaaaatagtaaaaaatgctaaccgaattttgaattttcaaaaatattaaatctgaactcgacctaatacaaaatcaagttacacttatacccgatctactaaaattgaaatccatttttttcgagtttcgggccgagtgagtttgccaagtgggtgggttttcgggtgtaaa

SEQ ID NO: 268064 - DNA, 1056 bp, Cannabis indica
gtctgtcttagttggtggatgtgattttcctgaaatacttttaaagttctctagtttatatgctttattttatactctgcagcatcgtagagtatgcttgttcaattcaaaccttgtccattgtattagtacacttcctgtaataaatttatgaatggtattttttatatttatatgtgcctgtttttcattattgaaatcttcaaagaattatgttaacatatttctctgggtgtagtatgtcaaggagagctttcatctttggcaaaaccagatgctctccaaatagaaagtttatatagtgttgactttctgttgtacatgtaacattctatacagatggggaggtccattgccacaaagttggcttgatcaacagcttttactacagaagaagatacttcgaaggatgtacgaacttggaatgactcctggtacatatagatacaaccactgaataatatagttttgtatatttaatactatcttaatctttcgttatgctctgtgcctgcagaaggaagttaccagcattaccattctaggataaaatctttttcttttctagggtggaaataagaattgtactgaatatttattttttaatagggtcttctcctcctgataaattatattaccatgtttttatatttctgcttcagtacttccggccttctctggtaatgttcctgctgcactgaaaagtagatttccatttgcaaagataacacgcttgggaaattggtgagtcttgttatctgatatttggattttgatactttctggttaagcataaagtttgaaagatgtgaaaattgtaaactactttattgtttttgtaattgttaggccttgggattagtatggtgggctagcatatattaaataaaagggtatttgagtctttgttttgagggtaatgtttaggagggaatacactggtatatataggtgagtaagatagtagagaaggtatgcaatgtattgagtaaatctctaattgcttcaaaggggcctaagggctcccttactctgtaattgagtttctcctacttt

SEQ ID NO: 268065 - DNA, 794 bp, Cannabis indica
tttgtttttttttttttaggaaagcatttcggtatactattgtttctctagcaaattggtaattattcacattaaaatacaatgcataaaataaaaccatcaaatatattgcaacgtatttcgttaattaatactaatattttggtatactattagagttagtctcatatttttaatgtgtaaaaataaattgtcaaataaatggactactcatctcattaccaattaatttttaaataaaacttttttcaccttatcccaatttcaaacatatactattgtttctgttaatgtactttaataaaaagatttgacttaacaaaaatacatatgaaaacttacagtggagtcggatgactttattttttttttcattttatttcttataacagtcacttcatgttttgtccctaaatattttagtaaaactgtaaagacgcaggaaaaaaattcacatatttaggccaaatagtgttagagtggcttgtttacactaaaaactttggagccaaattgtctgtcccaattcatgacccaacctcttacattttgacacctcaattaaaataccacatatacacaacacattttaccataaatcacaccctttaacaccaccgttaagttatacacttttttttaaaaaaaaaaactctctttttattttctatatatataaacaaatatataatatgtattaattttattttagtcaccgtttggtactttggcttctatgaaaaacagagcttgaatttcataattttttttttttttttttatttttgctgaag

SEQ ID NO: 268066 - DNA, 767 bp, Cannabis indica
aacttttacaaaacacaaggtccaaaatggtatttacccttaaatatattattatttgacaaaaaacttggtgctcgaaatttccactttaataatggttttttttttttaaaagaacaataagttcaattagacaagaaataaagattagggattcacaggcccaatccctccccaaaaacattgaagtggagagcatgacccttctacttctaaccttttgggcaaggtcatttacaatagaaagatgctctcttttaacgaaatgaaaattgttgatgggtaaaaagagagaaacaaaaaactgtgtgataaaataaaataatgataacaaaaaaagtaaaatagtaaataactgtgcataaaaatatgaatagtaatcgcacaaaatttgatataaatatacatttggatttaggtgtaaatgcataaatgtaaaagcaactcctacctaattttttttacaaagattaggtttattttgaggaggcacgacaagctacctctataaatatattcacccaagttattagctagggacgacagagataaggtaagaggaaaaaaggtcgtctagtcctattaaacgtgtctcatcaatctataaataattatcatttcttcctctttctctacacaggttgcttgtaagcctcaaagcataacaatatgcttgtatacaaactaccaacttcattaaatttattgaatcctccacctcaaatccttcagaaagacaaacttcaaaccagtgtgcttacatgcac

SEQ ID NO: 268067 - DNA, 1122 bp, Cannabis indica
aattaaaaataaaaaaatattaattatggtgtaattttcaagaattaatttaagtcattagtttaaatcaatggctataaattattaaccctattgataagtaaaatactccatccctaatgtaatagcacctaatatttatatatatatttatatatatatatatatatatataactccttgtatggtttgcttctccactcaagtctaattgtatctaatctaataacaatgtccatatataattgttgtgcctgtgtatcaattactacacttcagtatttcatcatacaataatgacttcctcaatcgtaaagcaaaatcaaaaggctcaacgggccaatggttgtgcagccatacttgcaattggaactgccactccccctaattgtatgattcaagctgattaccccgactactactttcgtgtcacaaaaagtgaccacatgactgaactcaaaaaaaagttcaaacgaatatgtatgggccagacccatctcctatcacaaattattagatgcacataatattaatcaattaaatatcacataaaattaacatataattattattgcaggtgaaagttccaaaataaagaagcgttacatgcacttgacggaagatatcctaaagcagcacccaaatataggtgagtacatggctccctccctagacgccagacaagacatgttggtcgttgaggttcctaaacttgaaaaaggaggctgccatgaaggccatcaaagaatggggtcagcccaagtctaaaatcactcatttagtcttctgcaccacctccagtattgacatgcctagtgctgactaccaatgcgccaaacttcttggcctcaacacctccgtgaagcgtgtgatgttgcaccaactaggctgttacggtggtacagttcttcgggtggctaaagatttggcggaaaacaacaagggcgctcgtgttctcgcggtgtgcacagagatcacaacttccacattccacgggccctccgaatccaatttggaatgcttggtgggacaggctctatttggagatggggcttcgtgtctcattgtgggggctgatccggatgcctcagcaggagaaaaaccgatctttgagttggtgtc

SEQ ID NO: 268068 - DNA, 648 bp, Cannabis indica
actaaatgtttttagtcaaaatacttgttgtgattaaaattaaattagtgataacttatatttagtcacaaaaaatttatgtgaataactaaaaagttatcaataaaggtatcagttttttttgtagtgagtgctttggagctacatacttatacatatatgtctcataatagtgaactatcacacattactaaaagagtgcttctagagttgacatttgtcactaaaatattaccatgaagagagtttgggaggatttcagtgagatagtaggtgagagaaaaagcttgacttcaccactccatgaggtatatgagaagaacaaagaagtatgctatagggggttagctaaaagtaactaattttttaaaagtaacatgatgtgtgtattaattaatgtggtgatgttacgatccttgatgctgtgacatgcatttagtcaaggatatatgatcacccgactcagtattgcgtgcttaatgacaacttatcatgtttctttatggctaaatacttaatgtcgatatactagcctcaaccaatactcttattgtgacagtcagtagttccgtgtttcgtaagatgaaataccgggtaagttgtgcaatcccacattgcctggggaaggtcaagtgtaatgattctgag

SEQ ID NO: 268069 - DNA, 859 bp, Cannabis indica
ttgtaaaaataaaaaaaattaaatataaaaattcatcgttagtaatacacactacaagactttagctaaaatttttatgttaataagattgaaaacatatattgcattttaattgcgctgaaattaaaaagtttaattaattacaggaccctatataattgattcaattatacacactacaactagtctcaaattaatttaggacgatcgacttatcaaatttatttaaaaaaaaagatgatatagtatatactatgaatcatcattacaaaactcaaatgcctcataagtccatcgagctgcaaatggagtggttgcgtacttaaccgtaccaacatcgtctttagagagaacattaataatgaagggctacatattctgcctcagacacgacccatcacgagggcttcgattagtctctcattctaaggactcatctttatagatgtcccacaatttatttatcaacatcttaatatcatctctctgcatattctcctctttacacctccatggctttgaaccaacactatcaatatagtcatatgtaatgtgtaatattgaaattaaagactaaagaccaaatttttgaaaggttcaaaaatgtatttaaataaatattaaaggtaaaagttttgttaatcatcttaacgtatctttggcttcatatatcgttgatcatcctccaaaaacataactaaaaatttctttagaatgtataataaagcataataaatcaacctatcatgcctttataatatatagttataagtgagatagagatggagagagagaataaatggaaatttattgataatattgaaaaaaaaaaaataaataattaagatgactcatacaa

SEQ ID NO: 268070 - DNA, 1368 bp, Cannabis indica
tggtggaccttcagaggagccttcgggtcgtctaagggccaaggtggcccagaacactcatgctagaaatgctgctggatcatctcttcctcctccttcaccagggcctgcccctatcaggcaacccatgatggatgaccctctagcaaggagggaacgacctttagtaggggcgccccgaagcctagtcagggagaaacctcagcatagggtagagagccatggaggtggctcataggcgtttagagagagcctttccttctgtggatgattagctttaggagcttgatgacattgagccagatagactctcttctgctggccctcgagatttggctgcaatgagttgcacacttaactttactcagttttctagcattattataggatggctgactattatgactgttaaatggagttggccaaccaatgtcgtgtctttaaggggttagttggccttagcagctttgtggaagggccaactggctagtgttgtcttctgacactaattttgaccttattttgttttcaagccttcatgaagttcagcctttcaattgacaactctaatgggtcgtcgagtgctcttcatgagcagataaagaccttggaagcatatctcttaacgaaggaggctaatctcatggcgaagggccaggctttagctgagatggaggttcttggcctactgagccagaacatgatttctggtttggataccatgcttggcactaggaatcaagagaacaccatgcaagctgctaacatctccaagttggatactgacctcacggggtgtgatgagaagttaagggtagccctcgatggccaacaagcaataaaggacgagtacatcagcttatcttcgaaactcttccatgagtttaagctacataacaccaacattgatctttcatacatgggggatgcttctttcttggagagcacactggcccaaggaaaggcgctattcgagagccgttagaagcaaaccagattactgtctcgccagagggatcttctttggggaaatctgatgaagagatggctgacccacctgctgaggaggtggctggccagggccttgacttggtggccagccagcttatgtaggctatggttggcccacactctagtgatctagactttgcaggttccaattcaaccccacctacacctacacacatgtagtttcagcttattagtaattcaactttatggttttatagtataaacgttgttttcatgttctgtatggcctatgggccttttactttttgaaccctacttattttcagccccaaggctttcatcttcgtactcttggcctataggcactctatttttgaacattactattgtttagcc

SEQ ID NO: 268071 - DNA, 2032 bp, Cannabis indica
tgaagtggagcggtattttacaggtatttttcaaacagccaatccaacaaatgagcaaatttagtgtggtacagaggttgttaatttgtgtatttcggtggctaataaagagcatctaatggaaccattcactcaggaggatgttcaccaagctattaaggctattagcgccactaaagctccaagaccagacaaatttcatgctttattttttttagagatttcaggatattgtgggtgaaagggtcagccaagtatgccttgcaatcttatatgagggtgctttggtgcgacagtttaataagtcaaatgtagtgttgataccaaaagtacaaaaaccaaaattggttaaggagtattgacctattactttgtgtaatataatgtataaaaattttacgaaagctttacgattgaggatgaaaagtgttcttggcccccttatctcatctttccaaagtgcatttgtcccacgacgatcaatacatgacaacatttatagttagttttgagcttcttcattcactatttaaaagaaataacaagagaaggggatttatggcactcaagcttgacatgagtaaagcatatgaccgggtggaatggaggttcttagccagtatgatgcgacagagtacactttttttaatcaatgggcatcctaacggccaagtggttccagcaagagggttacgataggcatgtcctttatctccttatttaatcatcttctatgctaaattattgtcttcattgttctcccttgcagaggccagatctaaactgatggggtttaggtattctagattgagaccatgtgttactcacttgttattgtagatgatagccttgtatttggtagggctaatggaggtgatactgaaactataaagcgtatccttcttacttatgaggctacctctggctagaagattaactttgagaagtctgctatcacttttagttcaaatgtgcaataggttgaccaagatggggtttcgagagtattgaggttgacatcagtgattactcacgacaagtaccttggattacctatggtgattggtagaaacaaaaagcgagtgtttgaggggatttgtgaaaaggctaagaagcgtgtgacgggatggaagcagaatttcttttcagttggtgggagagaagtactgatcaaatctattcttcaagctattccgacttatatgatgagtgtctttaagctctcagcaaaaacttgtgaaaaattaaagtccattgtaagacaattttggtggggttcatttggtgaccaaaggaaagctccttgggtgaaatgggaaatggtatataagcctaaggtaatgggtgggcttggattttgggattttcaactctttaatcaagctcttttggctaagcaagtatggcagttatttctatatccagattcattgcctgcttgaattttgaaacataaatatttcccaaattgctttatccttaaggccacagaaaaagttggttcttctcatctttggtcgactttgatctagggaatggaattgcttaaatgtggtcttcagaggtccattagggatggaacacaaattagggttttcaaggatccatgtctcctgcgtctgaggtcttttcagccaatcacgaggaggattaatgatgactgtcaggtgagtgaatttattctcccatctggtacttgggatgtggggaagcttcaataggttttttgccaatggatgtggacataattttatctattccattagcgaggtgtgaggcggaagatggttggtgctagcactatgatagagatggggtttataatgtcaagagtggctaatcattagcgtggtcgctccaggttgaggagatagttacatattcatccaggttaactcgttggtggaatgaagtatggcatcttaatatgccaccaaatgtgaaagtatttgtttggcgtatgttccatttggctttaccagtagtaacgcaacttatctctcaaaaagtttgggtacctttttgctgttct

SEQ ID NO: 268072 - DNA, 846 bp, Cannabis indica
catccagatatcccaagtttagcagaaaaagtaatggaagaatgtggtgggttaccaatagccttaattaccgttgggcgcgccatggcttacaagaggacgccttcagaatggttgtatgcagcccaagtgctaagaacttcagcttcagaatttccagctatgggagataaggtacttcctcttcttaagtttagttatgacaatttatcaagtgaaaaactcaagtcttgtttcctttattgtgcattgtttcctgaggattggagtattgataaagatgacttggtaaattattggatgtgtgaaggatttttggatgaaattgatgaggaagtttgtgtgaaaggccaaggatattgttggataaattcccatactattgtcccataaataacgttacaaggaaaataacttagacctcttttataaagcctcaacagaccattataactcatagagttgtcggttctgttttcctaggcttaggtcttttgtttcttaacaataaaaggaagcaaacaatatatatcaagactctaacaaactctcagatattcaaggcaaaatatctcaacagaatacagttatttctcagttcaaacatacacagccagcaacaacatcaacattataaatagacatacaaccttcacatttacacaacacaatcatttcggccagcagaggaaaaataagggagcagctgtgatttttctcttgaaacacacctcagaaacaagagagaaaatagagagagttagtgagagatattgttatgtaaatcagaaaaataaagtgaagaaaagagagaaagaatagagattacctgctgtgatttgtagc

SEQ ID NO: 268073 - DNA, 799 bp, Cannabis indica
acatgaccatgagaaaaaatttagactaaaacattatttcggatactaaaatagatagagatgtatcgatatatctcttttaagtgggtgcattatagaatttcccaacaactccaaaatttattctaaatgtagaaaataatgattttctaatattgtaagataaaataataataaaataaaatgagtgagtgagctaactaccttgcgccacgtgatgacttccttcaaccttccctcttccctctctctttctctctctctcttcttgttggattggtggtagctcccttgatctggcctaaccttctttcactatataaaccctttcatttccatttttctaagctcccaaacaaacaaacatctctttctctctcgttactccattccattggctgattccgccgaagccacggaattgcgtcgccagaggtaatattttcattgatttcactctctctctcttcattctttcgtttggtaagaaaagaaagagaaattcttgtttttgcgaagttattggatctgttatgttggctctttgtgttgggagattctgtcgatgtgctcgaagttgcgattgattcatgctttgttttttgtttagtggtggaagtttgaagttaaatatattattaaggtagttgagggttagcattatgtgagaggttgagatctggtggtggttctttattaattgaatctttaggttgctattgctggtctttgaatctgtatgtattggttttgttactcgcattttgctgattttccttagatctgatttagttgagtt

SEQ ID NO: 268074 - DNA, 644 bp, Cannabis indica
tttaaaaataaaatacattcaaaatcttaaaaataccaaaatcttaaataaaactagcaatacgtggctcggcacgtacattcaactagttatcattaaatatatatagtaacttgcaaattaagttgctataaacttaatatgtttaagcaacactaaatgaaccctaaactataaatacaaggagacagccacagtacaaaatcatttcttgataagaaagcacattatgggccaatatactactttttatatgcataatatgtaggtgcacaaaaacaaagatataaaataaatatggttttaatttttataattatggtgtgtgtgtatatagatatatgtatatatattgaaaaaactgatcatgagtaatatctactccagttatagtttatactgaaatgataatatatatgtgtatacacatatatggatctgcagcaatggataagaaatgaatatgatgctatctataatataattatgccaaaaaatattctagctacctcaaactcctctatagctatacttaattagctagcactaaccttaattgtttctgatccataaattgactgagatcacaattagggataaaatttttccatatatatctcaatcaatttatatggatcggaata

SEQ ID NO: 268075 - DNA, 657 bp, Cannabis indica
ttatttttgtgcatttataaaataatctcttatataattaccttttaattatacaaaaatctataatgacagcataactttctaaacgcgctgtaaattgaactgtataactacataccaaaaagacttattattatagtgcattattattccaaatggagagtaatattacttacatgacttctaaaatatataatatcaaatgcataaatatttaatatgaagtgattatcaatttgctacaagtatttttggttgtatcttacactctctctctatatatattatatatatatatatatatatatttacacaaaattgatatacaaattcagtaatgaattagaacttaagagcagctaattgaccaatattgatggggtgaacatgttgtttaccaccaccatagagagccatagcagcaagcttataagctgcctcagtgggatgaaattggtcccaaaaaagaaagctatttcgatcttcacacaccacagattttgggctacatgcattttctgcattaagatctcctccaccaccacaacaagcactttttgtatttttgaaacctgatgaagatgaaataggattgttgatgagactcaaagtcatgtcaaaggatttagtaatagtatatttcatgtgtagagattt

SEQ ID NO: 268076 - DNA, 720 bp, Cannabis indica
aaataaacaaagaggttaaactagttaacacaaaacaacccatatgagagataaattaaagttggatttctacaccgctacttcactttgactctcacattaatatggcctggaccctcacatttttatttttgggcacattctcaaaagacctcgtgctaataaagtaagtagaacacttatacacaagataactcttgcatattctttctaatgtgagagacttgggttaaaagttgtcattttaaattagtgaactgtataattaataaggtttacttttacagcaaattagagtgaaattacagtattcctacaacaaattagatcaggaaccagtttccaatcctcgtcatcgagaggcaaggtcgggaacttaaggtgtcaaatgaactaggcagcaaattagatcccgacgagcttatagtatgcatacaatccaatccaaaaacgccgaggaattgatcaataacgttaagctacaaaaggatatgcataagtttccatgacaagagtaaatagtaatgaagagcagcaggcactatactcacaatatcaaatggaagcccaccaaaaatcatccaaccaaaagtaccaatggtaaggatgagtttcattttggtacaaattataaaataacctttacaaaatgacagcaaaattggtccacatacaattcatatttatttatatatgaaaaaggaaaacatcaccttctgt

SEQ ID NO: 268077 - DNA, 521 bp, Cannabis indica
attaaaaaaaatccttacaattatagtatgtaaatttatttaattaatttaagctagatgaaatccaaaataatgatactactacaaatattaactctaatgtaagtctttaaatcgtttttgtgtttgtacttgttgcctcgactcttaaactgtaccaaatgagcattgttattaggcatgcatcaggtgtgtctagcactttctcgacatgtcacgttgcgattggctagcgatacttcttaaaagttattatattaaactatgtgtgacccgatacttagttggaccaatagcgatactgacacataagagagtgctaggcactactgatgccctttagcatttctcgtaccaaattagtgtcacattatgtaacattaataaacacttagaaaaatgaaatgaaacttaagagagatagaagacttagaatgatttgtatagcataagggaaaaaaacaagcgaaattctaccaagatctatatatatatacgtatatgagagagagagagagaga

SEQ ID NO: 268078 - DNA, 795 bp, Cannabis indica
acttgggatgagattgattttgagttcttgggaaatttgagtggtgatccttatattcttcacactaatgtgtttagtcatggcaaggggaatagagagcaacaattctatctttggtttgaccccactgctgattttcatacctactctattttttggaaccctaaacatatcatgtaaactctccacactacttattcaattttataaattcgtacatagagtttgaatttcatacatttagaaaatgaaattatgttcaccttataacagccatgtttatttgaattgaaaatctataaaaaagcgtaaccctaatacaggcggaccaaatctctacctaggacatgtacacaaagatggctcctaatttagaaaaatcatctaaatacattgacaagatgcattcttagcctctatatccatataaattattggaaaaattttcaatgcactatttgaaagaagtatactgatgtatttttatctgtttcggtatctagaaaaaattatttttgatttttttatgatcgcatacgttgtagttgtttaagatatcttacaaaattttaaaaaatttaacacgctaaaaataggattcaaagaatttattgcacgattttattattttatatgtgtctgaaatagatagtttgaacattaaattttgtattacaaattattctgaattttttaaaattttataaattattactataatcatttatgaaaaatgctaaaggatacctgtggtgcttagcactcacctatgtgttagtatcgctattggtccaa

SEQ ID NO: 268079 - DNA, 666 bp, Cannabis indica
taaaataatttccaacatttttatcatgtaattcaatagaagacactaaagtctttttggacattagggagtgttctagagtaaaaacttactagtctttcataaatgtgatatagcgcctctgatcgtcagacgatatttttattcagattgaccaacacacctgaatttgaaaataaggtaagactagtataacacacacatatgtacatgtttatgcttaccagtaatatagtatatcaattagacgatagctggtgtacatgagattgcatctagatatcgtttgaagatatatttgccaattctaaaaagtacgaattggtatcatagcggtatgacaatagtgtcaggtcagaagtacgagcatagtattggttatgacttatcttcattctaaaagtataaactgacattatcatacgatcatagtacttagccagcaatacacacatagtactgattaagagtgatattatggttaattgtactattggatatagattgatgctatcatagcggtacgatcatagtgccaggtctgcagtactgtaacatccccgcttcaagcctctattgggcccttacacccacggaatgatggctcttatacacgagtacatcactttggctacttcatgaattgatgactgaccctacagacca

SEQ ID NO: 268080 - DNA, 1393 bp, Cannabis indica
ttcttctgactgtattgtttttattccatccagaaatgtctcagaagatgattgaggccttgaagaagagagtggggggaagctcgggcttattccctccggccaagaagtcttagggcggtgagattccatgaaaagagaaagcaccagtaggagaggtcattaagctttcaagggaacaacctgccgtggaccctcctaccccggaagtcactaagtccaaaggttcttgaggagggagttcaaaggaacctaagcaagcgaagggaggatccgagctgatcagaagcgggtctaaacaagttaaggctctcaccccacctttggtattccacacagagaccaaaagaggcagagacatgctcaacccctatgtgagccggtcggtttcagaggtgaacaaacagttggatggggcggataatgacttgtctctcaagctggtcatgggaggagtcttgaaagagctttcgcaggtaagtcttttctgacaattttctttattcttccttgactagttcggatttttaatgacttttttctgcacagatggtttgaagatggcatacgcctattctcgagcaaagtcggatgctgcaaaatccatttccaacacaatgcgaacggaagtggacaaggccaaaaaggatgtcgaggatgcgcgggttcaacttggggttgtgtggatagagctgggagaggttaacaagaaactcctagcagctaagaccaaagttaccgagctgactaaggaactacaggagacgtcctcaaccgagcactcgaggctgatattgcttctttgtcctgggacgttaccagtcttcaggacaaaaaagagggtctcaaactcttcttcgcatgttggaggatgagaagaaggccatggaggaggaactcaaggctgaggttaagaactagaagtccgaggtggcgaggctcggggagatggtgaattccttagagacagttagtctcaagatattttatgacttttggaaggtcaatcccaaggcaaactttgattatctgggcgcttctaaagacatgtttcttgactactgtgctgcttaggcggcctactgggaactcgagacaaccacttccacctctcctatcgatcagaatgttgaggctccttctgcccagaatgacgatcgtctggctccttcaaatccagttaactcataaaaagagcctgggactcctactatttaattgctttccttttactatcttttttttatctgtttggccaattaggccttcttttaagacaaggtgaccgaccaagcggtttttaaacttggaatatattttcattttttgaacaacagcttaccgggcagcctttaatcctgggtttgaatgcttttgttattcttaatgaatt

SEQ ID NO: 268081 - DNA, 962 bp, Cannabis indica
cccattcgctttactttccgattttctcaagatttgattttcgtgtcccgagagtctagagtatcgatgcagaattttcgcgacatagtatcacactcttcttcatttcctctaggaacacaaagctatcgttcgcgaaaaagagatgagacactttcaccccgtcctttccaaaccggatcccatgaatactaccagctctctcagccgcttggataagacaagagagaccttctgatcaaatgaggaagaggtagggagataatgaatcaccttgacgaagaccccgagaaggtttaaagtttcctatattttctccattaatgagtaccgagaaggacatactagtcacacacctcattatcttctctatccactcctcatcataaccgagccctttcatcattgtgacaaggaagcatcactcaacccgatcgtacgcctttcatcattattattattattttattaagtagttttgttttgttgaagtaaaaattattaattttttatcattattatttaagattattttgaaatttataattctttacactattttttcattgatctctttatgcagtttttttttttccaactaaattgaatttgcaaagagactaaaaaacaaagaaaacgatttcaatttcaggccaaattgtatcaatcaagtttctgatgatattatccttaattcgcatcacatcaaggcctctttctttattttcaattaaactttactaatatggttctcttatctgattgcacaaatactcaatgatatcattagtttgaaaattatttgtcgattactcaattagtatggttatctatataatttagaatttttaaaataaaaatatatggtaaacacgatttatttatttacatataaaaaagtgtgttatatatacaggggtggtggggccgttttgttgcttagtaataaaatttctatttca

SEQ ID NO: 268082 - DNA, 944 bp, Cannabis indica
caacaagttgcgctggactaaaaaggcaaagttcgttaccgcacattattgcgagtgacttaaaatcttaacttttaccagcacattacgcgctaggaaaaatctatttttaaccagctacttttcattttgtgctagaaaaaagttctagctaataccaacgttgattagtcaaccccttttgccaaaacatcagaagtaaatttcattttactagcgtaaaatgtgctgacaaaagtaacattcttgtaatataatatgtaaaacttatattttaaattattggtttggcgagaagtataaaatacttccaaatcttctaacaataaatttagaaattaagtcaggttacaaatttaaaatactaatagaatttgtacttctagaactgaaaaaaattaaaaataataaagaattttttattatttttgctgttagaaaaataattaggtctataatatcccaactcaaaactttaggtagatatattgtaaatatctctatttataatacactagttgttaatatcaaaacatatatagttaatattatacttacctcagaaaccatgtcattcaaggctcttcccacaatctctaaaatatgtttaggattattatttagaacacttcccaagattgtaagtaccatacaaccaccaatcaccatttcctcagaacgacacttcaaaaaggttgtgaaatcctcttgaaattgagtcaagtgggctttcagaaccatatcagaacttgtctttgtgatataaatatttcctttgttgtaagcttcacctgtttcgctaaccaatccattcggaacctttgaaaaaacacacacacatatatatttcttaagggctaatcattgtttctcatcccctttttaaagtgaaataaaataaatagactcattttatagttattaaaaaatatatatttttacta

SEQ ID NO: 268083 - DNA, 974 bp, Cannabis indica
aaccaaacacatgattactttcaccataatccaatcttgtcaatccagtccagtccaatcattttcagtccaatccagtccaatcctacgtatcaaacgggcccttaaggtaattgaaagattccctcaactggttgagaaattcactcgatcagttatagaaaataaatatctataactaattcagttatattatttattcaaataattaaatatgacttaataaattatttaaatttaaataattagtcaaataaaatattgatctgttttaatttaactttgtcgtataaaccaaaaaattgagacgcattatctatttttggataagtctaaaaaggattaataagagtaatcacttttctataatctctcaaaaagaagttcttctcatgtattgagaataaaaccaaaaaaattatatacactatatcctactagcctacactagtctttgtgtgtggtggaagatttgaaagactacggtgtgagtactttgagatcaactaaggatataatacacaaaaatattcgaggataccctgataggctttgagaggtaaattatatttttgtcaattttttttccatatttaaatatatatatacatgtggttatcctgagaatgtggtgcgatgataatcagaaaatattttctgttgcgtacctgatttagtactacaaaatcaacataatgtacaacctggggtgagcgagggtatcccgtcctatgcatgagcctgagaggagtgagtagggctgaacatcaggcgggttgactgggttttgagttcgtgggttttgggttcaaaaaattgtaccctgaaccgacccgtgaaatggttcaggtttgcaggtttcggacttgcgagttcgcggattcacgggttcggattgaccgggtcaacgggttgacctagtcaacttgttaatttatttttttaaatcatattttatgtggttttttctatat

SEQ ID NO: 268084 - DNA, 846 bp, Cannabis indica
agagaaggtaggaaggaaaggaagagaaggaaggagaggtggctgttctctctctctctttgccttttgcttttctcactggcatttcctctgcttttgaattcctttacaacattcctttttcaactttcaaagctttgtaaattcacaaacaaatcattcccattctctcaagaactccctctctctttctctctttttttttctctttcttgcttctgctgaatataattgtcccagttttgatgatcttttagatccttcagacatggtaagcatggttatgaatcatggggatttgtgtgattttgtgatgattgtttttttttcctttttttttggctctaaatgtttaaatacaaaatgaatgaggttttaacacttggtgtggtgtgaatgatgatgatgatgatcagggaactccagtaaacatcatagttggatcacatgtttgggttgaggatcctgaggctgcttggattgatggtgaagttacagaaatcaaaggcaaaaatgccaccattgttaccacaaatgagaaaactgtaagaatttttctcaactcccccacaatactggaatttcacaagctagttctctgttttttctgttgtcatcaacatgattgtttcgatcaattttcaatagcatatggtcgaaatattgtgttcgaaaacttctactgttcctctctttatggactctttcttgctttagctagactcacttgaaaagttctgatccaagtgattgcttatacacaaagaaaataagaaagctaaaacaggaaatggatccattagcttacctactagaattaagaatctagaaaagttcttatccaag

SEQ ID NO: 268085 - DNA, 624 bp, Cannabis indica
tagaacatgtttttaaaaaatattttcacttttctacttttaaaaacaaaaaactaaaactgataaaaaaaatattaccaaacgccacccaaattttgttgatttttcctttttaatttgtaagtgtatgtgtgatagttatatgattttacaccattttcgaatggttacattaatttggtgtgtaatctacacttatttagtatagaatgttttatttttggtgcaacaattctataattcatactaaatatcaaatcaaatattttacaaaataaatattttaaaaaatttgcattgtatattatttatatcatgcctataagatgagaaataaaaaacttttttttaatgatcaatataagatatgccaaacttcagccttctagaataaagaaagattttttatgtaacatatggttggaattacttgtaaagttataaggaggggagttgaattttagaaataattgatttggtaaatctcagctcaattgatgcattttccatttataggcaaaatgcactaatgccattacacacaagagcaagagaggctcaattacaactggcacaaaaaggtaaaacaaaaaaaaaaaacgaaaaaaaaaagaaaaagaaaaa

SEQ ID NO: 268086 - DNA, 1067 bp, Cannabis indica
acgaggccataatttgaaaccaaaagaacaaaaatacaacattgtgaattcttgcaatggtttgttgtgcttgtctgaaccatggcgaaatgatcctattacagtgtgcaatccagtaacaggagagttcataaaccttctaccacctacttgtgatgatgaagatctcaatggcaccattgattgtggatttggattcagtccaaggagttgtcaatacaaggtcttaagaatttatcagcacaatacttattccaattcatttgcagtggtacacactctcgggacagattcatggcgtagtgttattgatcatgttcctcactcatcttacaagcttgaatttcctacctatcttgagggagctctctatgttcttcatgtcgaaagagcagtaccaagcttggttcattgtcggttttaagtggtaacctttgctattctaagtgttcttgggtctccatagttatttgggcactgaagaaaagctccagcagtagtgttggccaatcttggagtaaaatttttgcagtagaatctgaatttttaccacttggtttatatcaaccacttcattgcttcaaatcgggagctgttttgttgtttcgtaacagttcaggaggatttatgtacatgaactcaaatggaaaatgcaaatatcttggcctttgtggccttaaatcaaggtacgaagtcttatttcacattccaagcttaattcccctcaaggacattgtgtttgggaatgataagaataacaatattgagatactcaatgtcaatacaaggtaatttattattttcatagctctgttttcattaattgaaactatgtaacatataacataatatggtttttaattttgatacagatgtgggatgttgaaactgcacaaagagacagagagcaaagatcttattttgaagagacaaagtgaaacggcagcgtatggatatcttcacagtccttctagcagtttagaagtaaagttttggcaagattactggtggaagaagtgttaggttttatgccctaaataaaactctttacaatctgattagtaatc

SEQ ID NO: 268087 - DNA, 533 bp, Cannabis indica
ggtgttcctctgaattcaaatcatgcatgcatgacttcgcaattgcatagaagtgttttgtagttgataatacaagtaaaaatatatatacattatggcttcaatatacactaaacaaataataatatatacattaaaaaataatgtggttttacaattttcttcacaaatttaatgtggcaagtttgaatctcccataaaaaagataattagttgtgagtagtactaatttgaacaatatggccatcatgattgggtggagaggcttgagcactagaaattagtattgttcctaattgttctcccattggcattggtgaatttgagcctgtagaattactagttgatggacttggaggacagttggtattattagctgaaaactccacaaaatctgtaccatatccaccataaaattgattattacttctctttttaaaggtgtggaagttgaggtctttttggtcaaaaattttagaaatggctccaattcttcttggaatagaactttgggaattcgaccagatttgctt

SEQ ID NO: 268088 - DNA, 1373 bp, Cannabis indica
gccttagtgacttgcatcatgcgattgtacttggacaagtggtccttggggtttgtcttgccttcgtacaattccatttgaggaattctgaagcgctccagcagtggtgcatttatgattcttttcacatgaatatgagtcttcttctttaaaatttgacataataccattttgttttttagaaatcttctatgtgagctttatcaactcttcgactttgcattctaagcactaagttttgtcacttgaggttcccttccatgaacacaatcatttatatgatttctcaaatcattcctgcagggtttggctttttctactctttctttctattttttctcgtttaatcttcttcgaagattagttgtggagagacttccactgttgctgcctgagaccagatacacctcatcaacatcatcgctttgacttgtggagttgttgtgatgatgcttgtccttcctggaagcagacttcttgactccaacatcaaccttatctttctatgtgactctacctctagaattagtctagtcaccttgcccggaagcatggtttcctttcttatctgttgaggttgggcaatagttttagacttcttttgctgtttagtcgaaggatttttcttcaatgtttcacatattatccctttccctttatccttgtgaggatttgaggttataggatcttttggatccactcttccaggagtatctagtgctgaaggtgtttgcacattagggatccctttggtcagggttgtcatcacgacctccattcttatcatctttccaagcactatctcattaaatcgatctaacgagacaacttactttcagttaactagaactttttggccatggcgaccacgcgatcggactcgtcaagagtgtcattgtctctaacactatcttcaataattttatcctaatgattatctttcggtgtgtcttaaggatcatcttttgaggtttcattaagactgtcatcagcatcatcaaaactgttctcttctgagtcatcatctttaaatataggagcatctagatctgtatctttgccaacttgatcttcgtgatggctagtttccccgttctgatcttttacatctcctggctgggcattaggatcaatgaagtgaagaccagatttattacgggtgagtaccatgattactgaatgtaatcttcagatggtattactgcttcctttagttctcaatgaaagcaccaaaatatttaccgagattttcaaaaaaccagctataaattattagaattggagaaataaataattaaaggagaaagagttagaataactcaaatagttttacgtggatgggatgtaacgagccttagtccatgagtcgatgt

SEQ ID NO: 268089 - DNA, 1181 bp, Cannabis indica
ggagcccatttgcttcaaatcttattacaagttttatgcattttcatgaaaagcttaccttgtattactattacacaaaggcaatgatactcaaaagaactctttcaaaggagttgtataaatagtcattcatatacatatgcctttttttttttataaagttctcctatctactctcaaagggtgccttagaattcaaatgtaaattattacattttactttacacatgtcatatatatattatataatttaaaatagaatgtaattataaagtgactttgtaataggacttgtgataattaaaatgaattttcttatctaataattgaaagcagaaaaagagaaaagagaaggttttaaatgaaaaagagcagcacccgaatagatattgagtctcagaaccgaatctttgtagagcccacgcaacttaacacactaatcacactatggagggtgcagagtgaggagcccaccacaaaacgacgagcgactcgtcgttttgttaaaacgcggtgaccgacaacgacaataacttctgttccataaactctaaacggggggctcttctgtcttttcacatttttgaaatttaatatcaaaacaaattcagtaacaatctttgtcttggagcgctctcatcacatttttctcacttccttttcctcttaaatcatttatttatagtaatatcactaatattgaatatgattttagttttaagtacctgctgatattaaactgtgtaaacatagaattttcttttatagattattaggcataaaaggtacaaacattgtttttaagggaaattgaagattttcttctatttgtagaagtttattgtctattttaaggatattctaaggacatgcagaaatattaggagaactagataataaatttttaatattaggaaagaaaatctcaaaactgagaattgtgattttcgacccacgaagagaagaaaacatatacaacaaatatttaattacatgaggcatcattttttgttaaaaaaaattatatttttatgtttagagaatttttttttttacatttttacggtttccataaaaacaacacgaaaataacataaaagtaacaaaaaaaaaagaaatctaaataacatcaaaacaacaacaaaaaataacatacatataacaaaaaatcaacaacaaat

SEQ ID NO: 268090 - DNA, 682 bp, Cannabis indica
tatcattacttctagtgcgccttatcactcatatttaatatatattattagtaaaagagaaaccaattaagctaatgaaagaaaagaagaaataagtagtgaaattttcttctcttactattcatgtggtccatatagaaacaacacttaagtttcaagaagttttttttttttttttcaatttttcttttttgtaaaagagtccaatcagaatgatgagagtaagatataatgatatctgatatttttggtcatcatataactttaggactaaaatccatagagaggtaactaagattttctttttgttggcacaattctgctcacatgtgactgactatacaccttagttagttgccttaacgcggattcgaatatgattatgacggtgggttggtgaaaagggtaagaagactcactatacaacgcgtctcaactttgggctcatctgtagcctgaaattccaaataggcccaggcccaggcccaggcccagaccctagacccaggcccaactagatctctttacaaagtggtcttggttcttccaaaacattaggacttttggtggggtctaattggtctatgttattaagaataatgatttgataactgttgactaaaacttaaataaaatatattaaaaaaaaacatttagaagattatttatttagtgtaatgac

SEQ ID NO: 268091 - DNA, 565 bp, Cannabis indica
tttttatagtgtaaaatgtattggtttaaaaaaaaaattttaaaaacttttaagtatagaaaatcaaatttcccattttaaaatctgtgtttgataacgtaaactattcagaattttttgaaaattaacatgatgtctattattacctatatatgtccatatactaattttcttttttatatatatacacaaagtatgtaccaaaattttaagcacagttatgtgaccgatatttttaatataggtgagtcttatcttaaataaatgtgacggaccaaaacaacttaacatgtttcagtgtaaaacacggtatgtattttgtgtgcacatatcagtactgttattcattttgcactaagtaatactaacctgagcaggtgcttttcccttcttaagatcttcttgctttccttcttcactaactttctctttaaaatactcaatttgctcgtcgtcccattgagctatattagcaacttcctgaatagcacaacaacaacaacgcatatggtagcgcgggaagtattcaaatgcgaaaggaaaaaccgaaaatgtctacaagaac

SEQ ID NO: 268092 - DNA, 918 bp, Cannabis indica
ttttattagtgattgaaaaatctaaaaaattatttaagtgtggattgtgatagaatgacatattttcccttgagttatgcttatgtgatataatggtcctaggggcattttggtctttttgaccatttgttttactttcaataaaatgagatttttttttggcaaaaatagaaagaaattcaattttggtttccttgcacttggccgaacccctccccctctcttttactcatctccttgaagcttttaatttgagaaaatttacttcaaattggaggtgatcttgaagtgattcttgttggcactttggaggcttgtatttggggtaacatcttgatattttctttattgagttctgaattcagtgaaacttgagatatgtatttttccatggtgtatattcttgaatgcatgtgggtaaaaattagctcagtatgtttactttcttaaatatttataaaaatgcgctaaaatattttaatatacattgaatgttgatttttttgttttaaaatttttacgtgcgtataccgaagccactattatattttttgctatctatcaagtgtcaatatatagtaatttaattaatatcaaaccatttcaataagtttttatatgaaaatgttacttttaaatttattttcatcaactcaaattggcatcattgattagtctaattttttattattttacattaaagttactaaataatatacttacaataaatttatttaatatgtatctataaataatcaaatagtatcttaaacattatattacatccactaattttattgaaaagctataaagtaagtacagtagaacctctatttaagaatactctattcaagaataacctctagtttgttataaaaaaatcaagtgccgatttgggctagttataaataagaataa

SEQ ID NO: 268093 - DNA, 1276 bp, Cannabis indica
tagagatctgaacggaggaagtcatttaattccgctgcacccactgtaaggtttcttaaaactttatatgtgtttatttcattgttttagaaatttatattaggatgttaatgaaacatacttgtttgtaaatctagatcctggtaaaataattccaataaggaccaccagggacaaaccccaaacaggccaatacatagccacctactgtgggccaaggtgtgacttcccctctggctgggatcacaccaggagtgcaagagactgggaacaccagttcagcagccgatcaattcattcccaacactgaagtcccgtccaccaataatgcacagagaacagtcggagacaatactgaaatccaaaacctccaaatagcccttggaatcatgcaaggtcataataatgctttgcactatgatcaggaggatctccgtgccactataaaccttgcattcgacgagcagagacgttggtttatagaatgaagggatagggaaatggaaactttaagggctcagcaagcagccattgatgatcacacgaggcaggccactatactgataaggagggcctaccaagttcccaatcaatagccaactaccgtgtctagtatccctctgggtggtacaaaagagtatgctactaggcattcttcccaaactcacaatggttagccgtccaatccacgaccataggtctaatctatgggccaaacggtagacggccagatccttcctgaccaccctttggatggagttccacctaacaacttcatcccaactgaaatctctagttaacctactagccaaacaagtcagatgttgagaccgcctggtaccttagtatttaataggttgggtgctgcaaatgacctcaggactaacctgaatagaagaaggggcctggacgaacagtatgtcacactagctgtccaattaggcatccgcatccaggatccaactcaaagagatcctaacgtgacataggtcagtcaacaggctgaaccagttcatccatttgtgcaagcgtaattagatcaattgaaaaacatggtacaaggcctgacctacccaaagctcactgatctcgagctggaccgagcacgcatatcacccttctccctggagattgaagtccttgaattacccccaaaattcaagatgccaacctggaagatgtatacggggaaagaggatcccttatcacatcttaaatactttgagatgtagatggatttgcaggggtgcgagcagtggcggacccagactttgat

SEQ ID NO: 268094 - DNA, 1132 bp, Cannabis indica
tatttagttttaattaaagataattttaagtgggaattagagatcatattacttttaatcatattattaaaattaattgtacatcattataaataatcttatataatttaagaatatcacaattgttactttgaaaaaatatttaacttcctatgaatttactatttatcggcaaatttggaaaaatacagaagacaacttaataatacacaaaaaaggcatttccaaaacggattttaaggaagaaaaaaaactagaaagatttctttaaacttaagtatgaaagacattatacaataaaagcacatgatttcgtttggagctataatagtgtataaatagcaatttagagtaaattaaaatctagaaaataatttatactcaaaaaatcaaattaaaataaagtgaatttgtttatttttcagaattcatactttaactttattccaatattgagagattcagagttaattttctcgaatataatataaatgtactttaaaaagaataatgacacataaatgtactttaaaaaggatcaatttatagcaaataagtgtaaagagagatgaaagaataagggaataatgtgattaatttgccaatacattcaccccactaaccaaaacaacacacacaaactatacatgaaaaatatatattttaatttgtgcacacattattattattattattattattattattattattatttatatatacaaaaataattacactatattttaaaattaaaggcccaattctagtctaagctatgtctaggccccacctagtctaggggctcaaaaaaataatctctcttttaaaattatatatattttttactaatttttcaaaatactatttttttttttttaaataagggtccaaaaatcaatttttttatatggtccactaaattacaagaccggttcaaaatgcaaggtatttttggatatgatgtactattatttatgaattcttaatatttttttgaaaaaataattaataattatatgcgaaaattatatttttcagtagttaatatttaggcgtaagttgaaaaatgcatattttattaatcaattaaccaaatttgcctctaattttatatttatttgaaacatac

SEQ ID NO: 268095 - DNA, 979 bp, Cannabis indica
tctaataatctatacaccactttttgtcaatttttttgttctctaaaacattagtggtacttaagactctaataattctataattaaatattaaatctcgtacaattatttatagtactaaagtgtcttgtacttttataacatgacgttttataattaattaccgatttttataatttttattaaatttaaataagtaggagctaatattaaattgtacaatattacacattataagattgttaagtactataagtatccttagtatttctctatatatttatataataactttgattgaattgcaaaacactatagcaatgtctatataataatatgattgtctttttctttttttttttttttttgagatttttcctataacctcaaattttacatttttaacttaataagaaaaattagaacaacaaaaaaaaaaaattcaaaagtttttttttcaaaaatactaattgaaccttcttcatcctttttcattcccaattttttaataattcacacttaattccaacataaatatatataatatacatataaatttgatgagcttaatataaatttggttacataatcaaatctatccatcaatacaattctctttctagctcattcttcccactataaataatgtatatatatatatatatgttagatagcagtctttttaaaggctgtaaatttatatatgaaattttatatttggattatatgttatatttggtcagggacctttttttttaaatggtgtcaaggattttattcgccatagattttactctagtaaataattttttatttaataacatataaaaaataatattatattcaattttatttggtgaattagattgtaattactttatatgtatactattattcctattatattattattttgattatgtatttttgtatggtgattataactaaattaattaattaaaatagaataaaatatatt

SEQ ID NO: 268096 - DNA, 801 bp, Cannabis indica
taggttacaaaagtgtaggttaaaattataggttacacatttatttaccatacacttaatatatattattcacataataatatatattaccacattttaatctacacattattatattaaaaataatataacaattttttgtaccttaaaaaacataaaattttcaagtatgaaatgaattagtcatggatttaatgagcattcctattaggtgcataacactacttaggtgaagcattgtatagttaacaatattatataatagctattaaattaaattatgtggaagtaataattaattacttcaataatgatatgacaatttaaagtatttttaatatatagagtgtcaaatatggcctcgccttatggtcatattatttctgaatgtttgactctatgttcggatattgtgggtgtttcttttaattttgtaaaacgatctgctaataaaattgcgcatgttctggcgcgatcttctctttctgaggctgattgtactttgtctggggatgctttacctatggtagttgcatctttggttttggatgatttgatttaataaaattcatcattatgcaaaaaaaaaaaaaaaaaaaaaaaaagtggtataatgttatattttgtatatttttgtaaaaaattaattctccaattatgtgctaaaacttatccaaatttggcacatattcaaaattagcttaaatttagcacacaatataacagctaaattaaacacaattaatgtaccttttaattatattattgtcatttagcattaatgacttattttaatacact

SEQ ID NO: 268097 - DNA, 2196 bp, Cannabis indica
catacttggtagtaatctagatcctggtaaatattcccaacatttagtaacactcatgttctctttctgagtcagctgggcgaattcttttcttttagcacttctcactgcctcgttataatacttggcattgaacagctcctggaatttctcccaggtcattgtggtaacatcctgagtcagggacaccatgtcccaccaaaccagagcgtcttgttgaaattggaaggtggcacatgccaccctatcgttgctggtgatgcccataagattcaagattctggtgatcacagttagccactgcttgacttttatgacatcgggacttcccaggaaaattggaggtgcctactcacggaacctttcatacaggggttccatccggttcactgcaaccataggtttggcctgcacaataggggcaggagttactggtatttctagagtagggattgcaggagcacccttctgtctcaacaaccgaatctcttcatctttttcatttatcctggcttgcatttctacgaacatgttttcccactcttgggcagcttgggcagcttgtggcgggttaacatcaccctgaccacgtgccctgcctctaggacctctaccacggccgcaaatatttaggggaatctgagctccctgaccaccactagatccaactgaattgcactggctcttggtatttcgcctggcgtccatactaattagaacaacctccgtaaccaagagctagtctagtcagatcatgatcaaagagaaacttactaatgctgcttatttggaaattaaaaacatgcacctattctactatcaggctactaacatgtttcctaaaaggcttttcttaaatcatactattaaaataaactactaaagcaataaaagcttactgaaccgtgaaatgagctgattgctgatgatgattgtacatgtcgtgacgatcttcgaaagacaacctggcggctctgataccaaattgtaacaccctaactaatttaaattaataaacattttccataattaaaccctaattatctgctaatttctaaattaaagctaagcggtctttacaaattcaacaccaaaatgtaacttccctactttctagggatattttcaaatattagtgttaaaccctactcctatataaagtgtccatgaccattgaggaaggggccctttcttagaatctcgtatatagactctaagtcacaagaactcgtatcactagagctctctctctctcatcttcctatattcttctatacattctcacagttcttcatctacacttcaccttctcattattgtaatactcaagagaaccatagttaaaaattacaaggttaatacatgtaatctacatggtattatctccaaagtgaatataaccaaaaggggagtaggtcattacccgtacataagtgggccaaacctctataatttcatgtgttttcattatctatttatcgttcttaacgtttgattggtgattcatcagcattaattaggctttaatttagttgatgaattttccagtcaacaaactatatgagcagtatattcatttattttgaggctgtattttggttcttaacttgattaattgtgtcgttgttttaaattttcttttctatagtgtttagtttaccttttctcgagggcgagtaaaggttaagtttaagggaattcgataggtgatttttagactcactttacatcattaatttaagttaggctttagttttttttaggtttattttgtgcaagtttacgcttattttgatatgtttccaagtttggatgaatttgggatgacttgaaattgaaacggtgaaaaaagatggaagatttggccaaaaatactgaaaaaacttaaaaattgtggtttctaaaggaattctaggaccgcacacgtatttggagcagtcgtgtaactacgctagaaatgtatatcgagagaaattttcagtgaaggatacttttgtctattctactacaagaaatgtcacttttaccagcatagttcgctactgcgctggtaaaagtaacttttaccagcgcattttacaaactgcgctgtaaagaggtcaaagttttatcagcgtacatttacagtggcaaaatctaatttttaccagcgcatttacgcgctgggatagtcactttttccagggctttttattt

SEQ ID NO: 268098 - DNA, 1848 bp, Cannabis indica
ttattcattatatataatattattattaagaaatattagacaaaatgatctctattttcttaaattattttgaatttctttggcctatatagttttgataattctttgtaaaataatttactaaatattatcagtaggccaaagtacaaattataaataataaataatgtatatgtcaaaattattaatatttaataaattaaataacaaagacttgagacacaatatctattactattataaatttgaccttggctgtgggaaaatcttggggcagtgttcatggtaaaagggcacaatttcttttgcatcatacataggcctattctctttgtttggtgctgttagcatggctgtgataagaccacctgtgctagttcctgaaattacatcaaagtaatccgcaattcttgcatgctctccatctattctctagtacatatatacatataatttatatatgtattaattaatgtttgttatagtaatgttataaaagataaaaataaagtaaaaaaagcctaaaaataatatgtgtacctgaagctcagcttcaagatgagcaagaataactccagggatcattcctctaatacctcctccatcgatactgaggactgtcacatagtttccaaattttgggtgcagagtttttggggttaagatttgctgagccattattgattatagttaagctaagtgatactgtgcttggtggaaataaaagtatacactagctcgatcttctggtttgatatttaaaaactcaagctttgttaccctatttatagatgtactaaccaaaacccggcccacatgacaaaaaacaatatgctgatgagaaagatccatttgtgttcatacattattatttgatattgtatggggccatttctgaccatacaaaaatgagaaaaaaaaaaagaaaaaaaaaaatagaagttgctagtagaaaaattgattactgtgtataattacacttccaatacgagtttttctagcgtgttttactttaatcgcatattttatagaaaaattttccagtcaagcacacttaatttaagaattcttacgtgatatataggctactgaaaaaaaaaattgtattttgttgtcatatctaatactcatcaatttatttaaagcttttttaatggtgtagtttcatatctatgccctctaaaaatcatcatactacaacttttgcagataatgtggaattgcacaactaatctattttttctttatgaatcacaggattttaactgtgttttgtgtccaaagacattatttttattcattattttttgctcattattccatctttttaagttattaaaacgtagttaaattaagttcgtagtggggttttcggcaataatgatcaaagcaacaaaagggtaaaagtgaataagttacgctatctacctttcttggccgtattccaaattcgaaaaagcaaaaaaaaaaaaataaagttgttagagtggaagtaaaacaaatatggtagattgctatgtgtgtttatcacgttatgcacgtgcactaaattactgttttccttgtgtttttttcttatatataacgtgatatatgttatacgtaggaattgaagacatatatgtagtaataataagacatcctaaagggttcacatgcattaggatatctaactcacccgccgtgttgtgttttttgttgttattattcatagtttaataaggggttctaaatactttaataagtaatattatatattaatcataatgctcataattagataaatattaagagaattatctcatataatttttcttaattttttttttcaaatttacgatttggatt

SEQ ID NO: 268099 - DNA, 1333 bp, Cannabis indica
ttttagtggtgtttcataaagaatttttactttaaatttaatcaaaagttttaattaaactacactttttataaactaaatgattagtaataataagtttgcaaaagcagacaagtggcgtccctgagagtcagggcgttacacatggtatcagagcgaccaaggtttaaggatcttgaagactagcttgatatgtacattgactacaaagactcgtttgactcatggcttagtaagtgctatttgttagttgattagtagatcattcattgattatttaaattgtttgcttatctgaaatgtgtaagctagtaagcgattagaaaagcatgataatttgataaaaagaaaaattgttaagcatgttgatgcatgtatggtaatgcttattagcatttattttggttagaaaaggagaggtcacaagtatactagaaggtgtatatgaggtgatctagtaagaataattgcgagcttaccaagctcggagttggtagtgtgagtatgaatcgtcaactatcacaagacttggagtaaatgcatgctataaagtaagaaattatccgagtggcaaggtagtagaacttgcatagttgatcccgagcactgtggtgatggaggatgatattaagcgggaccaattggtaattttttttttaatgaagcagctgctaaaactgctaggaagctaaattcaatcaaaggtggatatagtggttaaacaactaggagtggtctagttttatgctcaggtggttgagctaactcttactgctgaggaagtaaggactaggtcaaaaaggaatatagtatgaggaaagatgcatggaagtgaacatccaatgttggatttaataagggtacagaccctaatgaacccaaggaaaaggattaacaacccactagttatgggtcttggaaagaaaatctaaggtaaccaaaatttcctatgtggtggaaacaaaggtttgcaaacccatctagaaggtcgagatgcaagagacactagtaaagtgaatgctacatgagagcatgcttctagtgaggggtagtaggccatttagaagaagctgcctaccgttgtggagaccgaaatagaggggtgatgacattttagttcttgtttaggtgtttgtttaacctagaccgagattggtgctggtctttctatcgtagtaagttgaacttctgttgaccatactttgttgatagctttaattaattccagtgcaacgtattcttatatttcgagaaaggtgattcgaaagtttatataaagttaatgatgagtagtcaagtggttctggtaatttactgtttactggagaactag

SEQ ID NO: 268100 - DNA, 916 bp, Cannabis indica
tcggcaagtggttcgctcttcgctatgttgatagcctcatggaacgctccgatcaaatgttcgaggtttgttgtacatataccatatatattgtaatggtgaacatgttctgattttgtttcgttttcaggttagagctgcagaacttcggaaaatcttggtagaacttggcccggtgtgttttactaatttgagcttccagaattttagttttcgagcagaaaagtaaaaatatctgtgtatataagtagtttggtttagagtgttgtcctgacttgagtttcgttgatttttttttttttgggctgagtataggcgtatatcaaaattgctcaggcagtctcttctcgagctgtaagttttctaaattgcttctgattgtactgtacttgtttcgtttgaggaagctatttgcttaacggtttatctttcatattcttaagttcttatcattcaaattaacacaatatatataatatatgtatataatctcttttgatctttacattttttgcatagaaattagtagggtagccctcttttacatttctttttagcatgtatcagattttacacatattactgtatacagaatgtgttaatatgatttttgtaattggtatatctaattttacacatggtatattttgttattttacaagagtgtccaagctaaaggtcagaatgcaatcatcagttgttaattctcattgcttttggtaaaaattacacctttaatacttctttgttacttttgttgtgctattttgagtgatttataatgagcagatgagatttcagttagcattgttaaaattcatgacttctggtaggctgacagtggtagcttcttaggaatacttgtacacattaattttgattttgctctgtttttgactccatatctaagatttct

SEQ ID NO: 268101 - DNA, 1280 bp, Cannabis indica
agcgattacgccaaaagacaagatgggacgactcccctgcttacttaatgcactagcagattccataatgtaagcttgcagctgatcctatcaaacagcagaatacatatttcatcagattggaatgtcaaacgaaacacaacaccaaaatgattttgtttctgtattaacaatgatcagtcattagctaagtaaattcagtatacaagagaaacatccacaaggcatgttcagttccattgcgtcaaattcaaatctacactgaaaattcaaaatttaagaatggtttaaaatgccaaaacaataggcctataaatgtataatgttgctgaacagttttagaagggaatacccaaacacttttagtattaaattatacagaaaatcaatgactgatatgtttagtctcactacataagcaccagcttcttaaggttttttcattaagttttgaaacaaatatataaaacccaataaattacttctattaaaattacagtgaaagaaagtttagaactttttctcaccaaacttcacatacagaattatatagcgcatttattaatatattaatataggaataaaattctcagacatctgataatcaagtttttctgtgacacaaatataagctaattttacaattacatacaaatttatagtctttaagaattaaccagaccagacatgaaagcccaggagaatgaagtccaagtactaaccctttttgaagtacagttcacattaatcaacaatcaatattatcaaatcaactgattacattcctgaacaaacatagcagctatgaaaaagagaaagacaatattataaattactgattaatttcccaaaaataaaattatgaagaatgaaaatgtaacaattgattttttatttattacttccaatttttcaacttttgggagcgaaagtagtgtagtggcaagaaaattgatacctgcgaaagaaataagaagtggtggtaactggtaaatacgacgtcgttggagtggtaagttgaagaatttgagttgagatgctcagattacaagcctggtctcggctgcatgggatcattcacgaataagagagtttcatattcagctccggttgttattgagtttttgttaacattggccaaactactaaacagcttgggttggtgaaagagaaacttttccaatgactttgatacccctaatggttctattaattacgattgtgccatttatcagttttctgctgccgacatcttacgtgcttgtacatcaactttttta

SEQ ID NO: 268102 - DNA, 1133 bp, Cannabis indica
gtgtgaaaaactgtagaaaaactaagagtggacgagaaatttatgtggctgtcttggatatgctctagtttacaatatttgggaggctcgtaataatgctctttatatgcctttgtgtatactgtaaaatttcttgtgtaaaattaagagagagatttgttttaagttttctcattttaaaagggagaaaacttgtatagaagatattgattggttgtacaatttgagtataacttgatagtttactcatttggttgtaaaaagttataaaagttgattgtttttaataaaattcttatttattaaaaaaatacatcgttgtatcatactttattataataatatcatacacaaatcaaataaatagagggtaaagtatttccatattcaacaatattattccatattattatatcccactatggtcctttatttatcgttagcatacaatatacaacatatacaaatcataacaataatcataatatacatatcaattcacataatttatattgtctccaaatttatacattctcagtataatatatacatccataataataaatcgtaaatcttattctcactatcataaattgtaacttaattagtttgtcattaatttgtattgctttgtttcaacactttttagtaataaatttttaaaattttattatatattcaattattaaattatttggtaattagtacaaactgcttacactttactacacaataattttgaattgtaacttatacaattttgagatgtagttgcgatttgaaaaattataaaaattaacccatattgatgttgtcataatcaaatataatactttctttttttatttattttatatattttttaatttaaaacacttggacccacctccaattggtcccaaactggtcttctgcctaaatgattttgctattcgtacactccaagcttaactataataattattaaaaaaaaacagcaagaatgaatatatattatacaatttttcactcaattaatttcttataagccaagccaatacagccaaatacttaacaataaaatatattcactacaacatataatctctttaatcttgtaagctagctcacttatttacatcatcaaattaatt

SEQ ID NO: 268103 - DNA, 690 bp, Cannabis indica
tcatcagtagttgtgattagtagctagttatacttagttgaagtgactaaatttgtaatatataataaatgccgtattgatttacttatgtatatacatatttagttagaaggtagcaataatattaaggcatgcatgcatacataaatatatcaaggggtatcagtagttgtcatgtaatgttatactaaattttgcatgataattaatttggtaaacagactacgtctcactaaaaagtttgttatatttgttatagctccgcaaccgcaaaacccgctagagaatcccaacggccattttcttcgcaaccgtccaaaatatgatattacctccctaaatcctccgctatcaccacccattccaccattttctcttctacacccaaattttccaggaaaatcaaatcccacctaataatttatgatctatctctctagcttacaagacataaacaaattttgattataaaaaaaatagaaaagcacaaatgccaagcaagctcaggaaggcactcggggcagtgaaggaccaaacgagcattagcctagctaaggtctcgagtggttccaaatccaaatccaaatctaaattcaaagccaatggcaatggcaatgcactcaaccttgaggttcccatcttgaaagccacttctcatgatgagatacccttggacgaaactcgttacct

SEQ ID NO: 268104 - DNA, 899 bp, Cannabis indica
accgtaaatttgaagaaaaagtttaaaaaacagtatatatggtaattttcctatttgttttttattcattacgttacagaactagttatatattttaattttaaccgatttgagttatttgtttttatttattatagaaccgattctgttttcatttacatctgaaacatctacttctggtgactttttcggtgacaacaactttttcgacaccgacaattttttcgacgccggtgactttttcgacgaaacgtattattacaagttttattaaatttatttattattttttctcatattttaaactttaattatttttttttaataaactttaattagtttttaatttcattttttacattatttatttataccatataataataaactctctaatatttttccatatttatacaaaaaaaaaaaaaaaccctatttttatcattataatcaaaaagcctttcttttaagagttaaaataaaataaataaataaataaataaaattgcttagatgaatctcgaaccatctttcaacctcccataaaatcgttaataacaaccgccttactactgatcttcttcttcatttattaaatttaaaacagagtaagaaaagaaactcccagaaaatcacaaatcccacctaacaaaaatgttcttcttctttgttggaggagtagagcaacaagtgaggcaggtactaaaatacggtgcaggcagatgcatttcgtgcggttccacagctgatctggttcactacgaaaaagttctcaaagctcttcttcgttccccacatggcgctgggccctgggaaaaaagacccctctgatgcactgtaacagctgcaaatctcttttatccacatcattctctctcccacctctctcttcctccgat

SEQ ID NO: 268105 - DNA, 1307 bp, Cannabis indica
ggtaataaataaaagatttggacatccacataattattaatatttataacaaatttttattaaattatattttaagaattttcgtatgtatttgaccattaaatgttaaatcgaccacatgactaattttttttttttttttgagtcaaccacatgacaatttttaattgttccatatcattaattttttatttttatttaaaaatttagtcaaatatatcaataaaaaaataacacgtggatagtatttatttgtaatcgaaagttaaacttaaatatttaagaaaaaaataactttaattttttttattttaaaaatgggttatcctacctcgtgtaaaaaaagggtttaatttttgtttttattttggagatatacagtaactattatatatttattgttattataatgtttagatcatctccagggatgtaaaaattgatatttttttacataaagaatgactttatgatatagttgcatcaatgcttatattttgatctaatatacaatacaaaagttgaaatttaatattagatagttttactaaaaatatgaaaaggtttataatgtaatgttataattaagctaaatattaatattaataaaaaattgatataaataaaaaataaaaaatagtatatttatggtgatttaaaatttgtattagttttttttaaaaaaattgtattaatttttaagcacactattagaatataatagcttcacatcacttatgcacattttgagtgaagatgttataatttattgtgcgaatcgactcaatccaatgagaaccgactgatccaatgacaactgatcgtcaaatattagatattcaattttgatcagatcggattgaatattattttcaaatatctaattggatcggatcggatgttggatgagatgtctaaaaatctaataatctaatcaagctaattattattttttatttattttagatgataattgtattttgtattgttatacgtaaaatttatatgtatatataaaaattaatattaaaattttactcattttttttttaaattagatagatcaagtctaatttaatacatactgaacttaaaatatttgatgaattccattcgatccgaaaaataataagtctaatatattgggttattattattataattttatcttcattattcaaaagacaaagatataccgcgtatattaaaaaaaaaataggctctaaaacagagaaagaaaagacctcactctttaaaaaaaaaaacgaacctctataatgctccttttaataattgaaaaatcaata

SEQ ID NO: 268106 - DNA, 1582 bp, Cannabis indica
agagatctaatcaggaaggagacttgtttcattattgctgatgaaaattcggtggatttgtggaattccccatggattccttagttagattggaactctttcagaggtgcctttaatccaatgatagtgccaacctcgttgaaagtgtcttctctcttgaatgcggaggggtaatgggattctcagggcccctataggtggctggttcctagtgtggcaagctctttacatttagttaagagactcccaagttcacagcaagatcttcttgtgtggaaggatgcgactgatggggttttttctcctaaggtgccataccagtccattattaaacttcggggtaataactctgatgagatttgaaatcgcatttggaagattaaaattactgagcggctgaagttgtttttatggaaattgggcagggatgttcttccatttggtaatctgcttcaaaggatcttgggtaatcctgtaaactgtgtgttgtatggtgacaatgtggattattggctgcatttgttctgtcattgcccgttggccaaggccacctggtttggtagtcaatgggcgattcgtggtgagaatttgaacttttcctgtcttagagattttgttttgtggctgcttgatccaggtttcttaaggggagcaagcaaggaggatagagaggcattttccaggtttggtatctgcttgtgtgatgaactttggaatgctaggaaccgtgccttccatgatcaggtgttttcgacgtgtatgggagttatagcaagggtaaattctgcttgttcgacaatggtgggggcctgggaagctccggctctgccccattctcagttctgttgggagaatggtatggatcggatcaatggtagaagggctgtgtttgtggatgctgcttgtaaggatttgtgttccacagcgggtattgtggttacggaggcagatgggagtattactagggctctctctgtttagatggcaacgtcttttccgctagaggtggaaactttagccttatatcatgttgtgttgtggtgtctctcgaagggttggagccaggttgtttttgcaacgaattgttaatcgctggagaaaggaattcatggcctttctgctccaaattggcgattggcgaagtcgttttggcacctgctagaggtcgtggatcaggtctcagaggctgagtttgtttggctcccacattagaaccaggtggctcacaacttgtctcagtgggcttttaatttctcttttcctagtgtgtttactatagaggacttggcccctcttgtggccatgtagactgtttgtttggctctgttttagagcttttcttcttaatatatgatgtttcttcaagaaaaaaaaaaaataaaaataaaagtatgttctattactatttttatttttaattttaaaacaaaaaaacataaattttgatttttttttttatttttaatataaaaatatgaatatcatttattattttaaataaatatataaaattataatgaaaaaatcaaataaaaaataactccaaaagtaagactaatgagagagaagcaaaagtgaaaaa

SEQ ID NO: 268107 - DNA, 783 bp, Cannabis indica
tttaaaaaatcataaatcccaaattcttcaatgatacgtgttcaaacaaatatgtcacaataaaaaagataagaattataaaagaagattgaagtaacctcattaaaagttattatcaaaccccctccttaaaattaagtactaactctctttccttgaccaaaaatattacaagagtctttcattttagtttctacagctactcaataaactacatcaataaaaaataaaaaaataaaaggacatcaatattgagtccaacgacaacgtttatatcatctctgacatatacaaccgcttaacttatatctcaatttgctattgtctagggtcaaaacattttttagtattttaggagtaagcttaaaaggttaagatagaaaggtaacaatgttatggataggtggaagtttttcatttaagaaagttcattattaattttaaggacatgttttaatatgtataaaactaaataataaaactttaatatgtataaaaataagataacttctaactcattctaatacactaaaagaatctcttggtcaagtcaccaaacaacttgtaatcatatacaatttagtctgtagaaattaaataaattatgagaaaaatccaacttttttatgatatacttttgtctttttatgtatttagattataggtttttggttctttttacatttttatgaattttttatgctacattttttgtaaaaaaaaaactattaaataccacattttatctttttttttaactaataccatattttatctttcttc

SEQ ID NO: 268108 - DNA, 793 bp, Cannabis indica
aattactaactattttgccaaacaagatattaagaattcatatgtatttaccacctcatatccaaacacaccttgtattttaaaatataatgtaattactaaactgtgtaattactaccttagtaattaccctacctagtaattacacagttacttccaaacacaccctaagtaaacatgcatttttatctttttttcgtttatttgattttgaatctgtttttaatttttgggggtaaataagtcttttcagtggcaatagtttaggctagggtttgggcatatatatttagatgcttatcgtacagatctgtctattctttcctgaagctaaagctagctgagaacgcatcgagaaaaccagagaagccgtcatcatgggagttttcacctttgtttgcaagagctctggcggcgaatggaccgcaaaacaacactcaggtgatcttgaggcctccgcatcctctcccttcgagcttcaaagaaagcttgttcagaccgctctctccgctgattcctccggcggtgttcagtcgtctttctcttacgtcagcccatcttccgccgttttccaggtttgtattgttactctatgttcaatacgttgattagatttaggttttttttaatactattgttaatctatgtgcttggaattataattttaactgtttttatatttgaattttcattattttcgaacgacaattctatgctgtgtgataatcagttatattattaggaattaggataacaagatttagttttcagattcgatgtttagtttaaatgc

SEQ ID NO: 268109 - DNA, 1132 bp, Cannabis indica
taccaacccactgagcccgctggcgaagggacctctcgatgtccgggcaaacaacctatccttaacgacgaaggtcacgtccaagatgcaggaagcccatcatcaccatcccatggtgtacgactaactactaatgtccatgaggtgttcatggagaacgaggcattgagccagtgtttaagccacaaagaagaagaacccgcgggcgtcctggtacagcgagaaaggggctgtaaaatcctttttttaagaaaaaaacttaagaatttaattctatttttacttcaattttttttattttagtattttgaataaccatgatattgtgaattaaggattttaatgacaaataaattttattgtatagtgatgaatatttttttatggagatgaattactctagcatgtgcataattcttaggaagtaaatagtaattgtgacaaaggaattatttattttgtgagtgttgttgttacggtgagcataataataatacttgtaaaatttctttatagtatagtttgacatatttttataatatggttaatatatatctattatttaaaagattataaaaaataatttgtgattgattagataatatatagaagcattaatttaaattatgatttaaaatattatgtgatttaaagttttaattaggtgataactaataataaaaataaatatctatttatcagttattattatgattattattatatatgaaaaataggtgtgtatttgagaaaccgatatttaggggagtgactcgttcaacctaatcggttattgttatattatttcttttagtttaaaccacgattacacaccagtttaaggattagaaaaacatccataggcaattaagggtgggtctcttctcgttatttttttttcttaactattacaagaaattcaccattttcatgcacattcatccacgttcttgaacaatcttggattcaaacatgctagagtcatttatgggttaaaataagattatgtttaagctcaagggactcctagaagacattttgaccagaagaatcgaagctttaagcccccatacgaaaattgccatttttggctccatattggcggttacaccggagttggagaagatgactc

SEQ ID NO: 268110 - DNA, 515 bp, Cannabis indica
agaagcaagccatacaatgggttctaaagaatggttggcctgggccatatgatctccataaccagagagagacagagagagaaggggttgttgtaaaaatgttacctcacacagtccagtcccgtccactgagaccactcatctcttattatccactggcttgttattacattccaatatccacgctttagttatgcaattttcaaaacttctttttagtcagaagtatttagtcaaaagtccttatattgtgtaaaaattgtcttttatttcagcatattttttatattgtcattttcatcacaattattgtgattttcaggggggaaaaaaatatctgtatatgaatatggtcattaaacagggcaaaatttagacaagaaaaaaaaaaaaaagaaaaaagccatttatactattgttgttagaggaaaatggattcgagataagcataaaatactcacttacagaactgcgagtatttatttagaatgtcaaatacttaaagtaaataatga

SEQ ID NO: 268111 - DNA, 742 bp, Cannabis indica
gttatttagccagttgtatattgtttgctcttttctgttttctgtaacagatttctgttacttagttcatgtatatagacccttctttactcaataataaaatttaagattcatttcactaatactatccttatcttttgatccttatttctctatatattattagcaacagacaaatttgtgttttgagtatgtttattggaatttttttcttttttctttaatatataaaatagtaatttaatcgtggttaaccacattattttgtagtttgcggttaaggtatattgaaattaaccatgtagttaagattttttcaacttttgttacatggttgcgttggtttatacattggcaatatgttaggactaacactattaattaatgttagaatcgacgcttttattttgcactaaccaattgcatcaatcaacggaagtgttcaacaacgccaaaagtcatatttgtagtagtaatagtctagtttgaatgaagttttattattttattttatttttgaatagtaaataaattatttattttgtgcttactttatgttatttccaacgagaaatgttaaaaggcattattgatgcccaaaattctctccagtgttatatcgttattgatgtaattaagtattgggtcccatataacttaagataataacttttaaggaatatcgttaactaagtgtaaaacgcaacttataaaaagtactaaacaacactgatacttaata

SEQ ID NO: 268112 - DNA, 1142 bp, Cannabis indica
gaaatggaggcaccctattggctgatggctcaggagggttcgtgcggtcatatagctaggagggaggaggccaggcctagaataaggtaaaggaagaagtaaagtactcgaagctttcagatctggtgcgggtcccgctagggcttcatgcaggacacgtggcgccaactatgtcagagattcgttggcctcgtgtgacgtgtcacggtggcgcgtccgccaaccggaggaaaagggctggttttctcggtgagaatggtgctgactttgctttcttacccctgttcttgggttatatatatatttagatatttatatatgcatctccaaattaagaactggtactagaaaagagttgtcgttttggatttttattgtggtactttttggtggggtttacattttctggagctttcctccaatgccgaacaaaaaaaaactggactctattcttgcagctacaacgtccaacaactaaaaataataataaaaaaatcctatctttctctctgtatcattgtttaattaacagaaaagacataatctttgttcacccaaaaataataatatatgattggtgaagaaaacaatttaataataataataaaatgatctgatcagacagaccgcaaagtttagaaaagttaagagaaaaacttgtggtgtgatcaagatgtgcgtgcacattaatgtgtagatttttttattattacattgcaaaaatagagatgaaatttaaataaataaaatattttggagcttttaattgtgtagtatgaattaccagcttatagttatacttctacctttctaatttcatttgggaattatcacatacaaaatataaattgatattttatttacaaaaatactgtcataaggtaaagacaatatttattctttttatgtgattttaattacaaaaataccacttacactatcatcattagggatgcacattttccccgtctaaatggggatcggggcggggacgggatcaaattttgtccccgaatgttaaacgggacggggacgggaatgacattccccgtcccgacccgtttaatttattaattattttttattaatattttatattttataaatgtatttgtatttttttagtatattaatattatttt

SEQ ID NO: 268113 - DNA, 1081 bp, Cannabis indica
gaaaaaaaataaaaaaagcagaacaaatcattaggtgacatataaaataatggcagttgaactttctatttaagtgattatgtcatgtcgttgcttttcaccttaattattcccaatgaggatttttgggggcattttgtggggtccattaatcctatggtcggttccatattcaaaatcaatatataaatgccctacctctcctttcatgtgttgtgctatgctgtgacctcccacgttatatagtatattatggagagcccatgcttttgcatgattcattcatttattttttgagttgaacgacataatcattcatttatttatatcaattacttcatgtctatatctgcaaaatcctcattatctgactcacctatgtagatctttcatttcttttccttttttttcttaataaaactttctttttcttctgttagttccgtgactggtgtcttatcatttccctttcaacatcatatatacatgtatctatattaaatataaatataatatatgtgttacttattcacttataacacttgtttgttggttatggaatctatctagcgaattctatacgtaccgacattattatactttctttgtttctttttaattcagctatccaaaatgaaattaatgtcgagaagcaatgaaaatggattcatgtatattctctctacgactcttacgaagagttataatcttatatataataagaggcttcttccgcttctgcttattatacaatattactcttctattttaattttttaagagggcattatagtacatttattttatcaatagtattttcttttatttattaaaatagtttttatgtatttcactttttttttttgcatttatcttggccaacttcacactcattttccgtcggtcggtttatgctatattttattcaactcaatataaatatcgggttacaaaaatctaagtgcaacccgcccaattaagaaaaaaaaatagtacccgtccaattaaatttgtcggtttggtcgggttaacccgtccaaaccgaccactaatatattttttttttacatacaattattat

SEQ ID NO: 268114 - DNA, 1561 bp, Cannabis indica
tataattatattacaagacttatctctgtgtatatatatataatatatagagaaatgttaaagggtaccagtggtgtttagtgccatttcatgtgttaatatcgctattgatacaattaagtatcgggtctcatattatttaatataataatttttagagagtatcgctagccaatcgcaacacgacataccgcaaaagtgctagaagtggtacctactaacaatgctctaatatatatgttaattaattaataagtaatagagttcatatacataaataaatatttaataagttgaaaataaagaagtggtgtatcagagagatcgagattttctgggacacccttcgttgggatgggagaaaaaaccgcgaattgaagttctggccatatcttcacttttgtcttttgatttttattttatttttttgataatatcaagagcgtaaagtttgagacattaatattagaatttgttttgaaaaagaaaagagaacaaaaagaaaagagcattgctattaggtaccagtggtgtctagcacattctcgacatatcgtgttgcgggctagcgatactctctataaactattatattaaattatataggactcgatacttagttggaccaatagcgatattaatatataggaaaatgctaagcactactggtgccttttaacatttttcaaaaaaaaaaagtgtttaatttgaaattagtaaattccgtatatacccattatttttggttagtggttttgcttttgtgattcataataataataataataataataataataattatgatgatgatgttagaagtcttacttttgttttgtattgttctttttaaagttgactcatatggttggacaaggtcatgcaaatgcacatgtgcattatgtccatggtgttcttattcttaccccaaaattaattttagctctaataataatattcaattttattaaaaataggattggcttgatttttgtcaaaatcttattaattaggtatgggttttgttccgtttttctttttgaaaaaaaaaattagtaaagctaaccttttaggtaaatagataattatttatttcgtcatggcacatgatgatgatctagctacacaaagtacaaatctaagtaatatggttagtataaagtattatagctaattaaaataaaagtcccttatgaatatcttccaactataaacaagaaaagaatatttatactaatgatgaacaataatactttattccattttcgacatacatttataaggatataattgtatgtattacttatattaccattttatagttctaacgattacacaaaattttatttttaatcataacaaaatttgtatttaaaagtgaaaaaattgtgactaattataattattattatattatgatgtgagtccagtgacggacctagaatttttactttgtggggacttatttatcattaaataatatatatacttatattataattactcttactagatttatttaattttgtggggacttttttattattttggtctataatta

SEQ ID NO: 268115 - DNA, 1185 bp, Cannabis indica
actattttcaggactaggttagaatgttaataatttagattaaaaaagtagtttcttcgatctcacgcaattcccatggattcaacctcgttcttcacaatctttacactacaataaaaattcgtgcgcttgcgagttgataaatgtaaaaacataccacttttggtatcaatataagggcttttcaagagacgccccggaagcataagttgatgtgactatcctttgacactgaatcccacaatgtcagggctttgtccctagtgtcgtaccattaaagtgtgcgcacaaacaaagagaacatacccattgttcgacgaccactattctaacagctacagtatgcagggacgacccacgaatgtcacctgtcggcatcaaatggtccccagtcgtacggaagatcatagccacacgggttgagcctcaatccgtgggccctaagttagtgaattatatgtatttactctattagtggaccatgttacacaccaaccctagcaggtccctggtatacttatacctggatcctagcctacaaatactacattgttccttctagcaaatggttggcaattcattactcaaacaatatagtaaaaagtggttctcaagcttgtcaagaacattggtgtaatactttaaggctacttagcttaatacaatagactcgtggactagggttcatcaatacccgaaatacataaaaatctacatctctattttgttcacttgatttattttattagttcttattttattatattgaatttttcaaaaatctcgataaacagtatcatattgtgttgacctattttgctatcacaaaaacttaagttatagaaaaaaagaagtaaatttagatttctattagaaaatttataaatgtatgtgtatttttttttagaaaaaatatttttagttttgtatatttttcagtaaatatatatttttatatagttatactattattaataactttttgtttattttatttatttaatttttttttttaaaaaaagtgagcaatttacggcgaaatccttttatattttaatttttagacacttgactcccttatttttttttttgtggcaaaaccatcttatgttctaatttttatacacttaacctccttatcttttttttttgttggcaaaactctcttatgctttaatttttata

SEQ ID NO: 268116 - DNA, 662 bp, Cannabis indica
attagagagcatattacattggtaaatatagttaccaatactccaactggaactggtttcattcagttccttgataactatctccaaatcactctcaattgatacaaaagggtgtttcaaaatcatggctttctccatggccaactgacaagtcgcaacttctccaatcaaaggatcaacgaagttaagcttatagtggtcactcgcaaaatagaactcgtgtgatccctagctaaagctactccacacatgaaatcccaaccagttgccacatcacaattgactttgatccaatccactgaaggaggggtccacctatgagaaatagcagcttccggcaagaaaaataaatcaaacccataatctatgtaatagaatataatagagtcaatacactgtttaaaattacttaaaaaattattgtgtatcttatcatttgagatgatttaattgaaattaagttttattatgtctactcaccaaaacattataaacaaccagttgtcttctttggaattctcatcctttttgatgtcaaaattaaatgactgctaattttggattaaaattttttagtcattaaaattgtatattattttaaacattttttaagatttttttttttttttctgagaaacctacaaaaatattaaaatttaaat

SEQ ID NO: 268117 - DNA, 607 bp, Cannabis indica
ggacctattttcattctctttggaaatggtgcaatcaccttaacaaaacacccctagacttttaagtatttgtatagaggttgtctacctttccataattcatatggtatcttttgctctttcttttggggaatcttatacaaaagataattagttcacaaaatagcttcaccccacatgttttgtggtaatctagaacttaataatatgtcattcattatctcctttaaaggataatttatttgttctgccactctattggattcaagagtatatggtggtggtactgtagcgaccgtaagaattaaatatagattagtgagattataagtgctaaatttattattattatcattatattggaatttttatgtgaatgattatgttaaatgtgaataatatgctatctctgtgattttagctcggcgacgatggaaaaggcaacggaggatatcttagtcacttgaggatatatagaatttggtaatgttagaaaatatatcatgtaagtttaattggttggtattagtgggattgtggttgtggaccattttaccctaagccgattattgaactaggtttagtattggggctatttaagtaattc

SEQ ID NO: 268118 - DNA, 722 bp, Cannabis indica
caattcccaaattcatatactccattctgctcactgataacccaattatgcccaattcccaaattcatatactccattttgtccactgataacccaattatgcctaaaaatatgcagttattaaatttttttttttagaaaaaaaagaaagacagaacaaagagtcaaagaaaattctttgaatgtttgacttccacagctacaaaaatcaaccagcattgcagttaagcattgattatatttatattgttgtaattattaccatgatcgagtcttagaggaaaatcgttccaacattcgggtcgcttcgatatctcagtcacgaattgaagaacttcgtcagtaatcccaggcacaccaccaccatgttcatcatcatcatcatcttcatcttctgattctgctttatcctgaaactgcaacaagttcgaagcaaacttagagatcccactgaccgctctgttactattactagacagaagattaaggccactcttgaagctcccgccgatctccgccagatcgttccgtattccgaccaaatccagcgactcattctctgattctggcaaactctgggcaccggtggttggttgtgaagcaggaggaggagcaagaaacgccgccacgccgcggagttgccggccaatggtatggccgatcaccgacaactcaccctttaaaggattctcctccgacggagatgacgtggcatcttgtgg

SEQ ID NO: 268119 - DNA, 493 bp, Cannabis indica
actcaaaactaaaccaataaatatatatgaaatacatccaatggattcaatccaaacattcaatgattggatgactaaaattaattggatcggatcagatggtaaaatttaacatccaatatttaactgtatcgaatttggattggcctaaaacattggatgtggtctaatgaacacccctagctgagtctgagacttacaccaagttatatatttccttttagtctcactttcttcatcaacttgttttggtatctatggaggactcttttatgattagcttttcatttttctttttactaattagataaattctaacaagttttgtttcatctatttatttgtagagaaaatgcatatcaatttcttgcctttttttttcttaatgagcatgtcaaagtcttcatctttttaagtgagatttgttgattttattttttatattgcttcaggcgaaacccgttgggggtttttcactaatttactacaattt

SEQ ID NO: 268120 - DNA, 620 bp, Cannabis indica
gtaaggctgaataataaggatcgccctaaaggacaagaaagggaattgttacaaactcgagaaagtttgatgtagactttggcacaattctagacatggaataactgctagtgtgactctgtgatcacacaaatgcaatttctaaatagtaaagaatcttgtaccgtaagaggagtaaaacatatatatggggaattcacaaaatcatgaatttattttactaaggaaaatgtgatggtggaaaaggttggtactgaatacaacctatcagatcatattacatggtttatgttaaatactacatttgattaagacggcaagtataagattaaattgaaattcactttagttttatattagtgcaagtgagagtttgttgagattttatgccctaaataaaacctaatttcattgtaaatcttatttactttcaataaagattagaaatcataccatgatcttgtcatatgctttgtttaaatatttattacatgattatagatttaatatataagttttattaaatcttgaacatatagttattcacaattacagtgatgttatcacagtggaaagtaattgttattatctgcttcaaattatttagtctcacaatttat

SEQ ID NO: 268121 - DNA, 582 bp, Cannabis indica
ggccgaaatgaaaacaggatttagtatagtttaaaaatgtccaaataaattattttaaacaatactatggctggttgattacatatacacgttttgcacatcgtttttaataatttatttcatccggcatgtgagttggcagaatgatgattttttctgtttggtgttatatatacaggaagcaaaaaaacacatttttcatatcaaaatttcaactactcacaccagccccttttttaaattaaagtaaatggttttaaaagaaagaaagaaagaaaaaatatcactccattgaaaagaaaatatcactttcagtttttccacgaccgcagctccgtattaataaatttggtatttttttttttttgtataaaataaatttggtatttatggttatattaaaaattgtcaggacaaaattaaaaattgtcaggacaaataaccaaaaatattctaccgacatctaaattgaaaataaaattctaacatagtccaaaactgctctcatttattttagggtagatagcggcataagtacgcaaagatttaagtttgtaagcggcataaatctaatgtttattt

SEQ ID NO: 268122 - DNA, 1644 bp, Cannabis indica
acaataatattcttttaatttctttctcacacttatcaagtgatcaagaaattgtcaaaaagaatctaactaaaggtacgtatcatcatatatatatatatatatttgttactttccttatattatgatcatattatatattttattaatcgaaatcatcatttcttgtcttattatatacaatttcttgtaattcaatgtatgtactttgttgatcaaatatagaagaaaggtacaattatatatacattctcttccctggagaacccacatgccttaaagatagagcatcttgatggggcgtactgccgtgatcgaaatcaaaagagcaatgaaattatatttgatcatcttcctctctcacgggcaaaaaagattatccaatttcagccctattttgatcgggtcactggtgctgacgttaaatttgtcataagttctgaaaaagggtatgaaattcttaaacttggtgacttcaattggagacctttaccgccaaattatcgcaaaggacaacaaatgctgatgtcgaaagatagggagaaactagtattttttcaaattcctcgacgaggtagtactacttcccagtttgggataacttggtttgatccaattacagaaaaaattgagattatgaaagattttccaagaattgttatcaatgatataccactataggcgataatttaaaattgtggcctatagtataggctacgattttacaccgtggcctatagtataagccacagttttaaaccgtcgcctatagtgttcaatataggcgacagttttaaactgtagcccatactattttcccgactgtttttaactatcgtctattctacctggtattcgcgatgctcgtataggcgacgattttatggactgtcgggcattctttacttgacattgtaaaaccgacagaaatttgggattttttagtagtgactagatatataaaataatataactttattgtataaattataaatgtgagaatttcgtcatgcataagagataggggacattaatgatgaattggaaaattttatttttatcctataagatgttgaaattaatggacaataaaacttaagtttagttttattatttttattgtattgaaagatactaataggaatagcaatatatagtattaggaaaatattaagatatacattactattttccattgacttctctctatcttaatatactaccagtagtatattataatttatttaaaatgcactcaactccaatagagtcaaataatagtgtttatcctattggtaatgtcaatcaagaaagcttagatttttccaaggttgtagaaattgaaatgcacaaataactagatgttaccttttgtggtgcttctttaaattttttttttacaacaatttctctggttttttatttataatttttgtacaattttttgttggtgaattagttttttttttttggtaaagaaagaatgtcattcaattaaagcaaatcagctgttacaggaggaccaataaaaataggacaagcatttgtccacacatgaactcctaaaggactacagacttagctagtgcgtgggccacaccattcgcatcacgcgaaatggcacagcaagaaccaccaccaaca

SEQ ID NO: 268123 - DNA, 893 bp, Cannabis indica
ctgagcggaaggagacattatattctgctgcaaccactgtaaggttcttgaaactttatatgtgtttatttcatatcgttttagaagttcatgtttaggatgttaatagcatatacttattagtaaatctagatcctagtaaaataattccaacaaaaataactcctgacaactcgaccacacaagccagaaaaggtcaatatttacattcgtcgaagaagatcgtcgcctgatggctgctctaactttttcttgctcttacctgcacttcagagcactcgtgagtcacaaagactcagcaagaaaagtaataaaggaaacacatgcaataatcaattatccatactagaatcataaaataattaaacaataacattccaatatttatataataaaaccaatcatatttattaatctaaaaagtaaccatctccataatatcacattgcctcatgaggcaagtcgatgccctaacttgacatccatatatcaaattacctaattaggcaagtcgatgtcctaacctgacatccatatatcactgccattgtgtaatgaaacaatcaacaatctagaaacctgataaaaatttcaaatgacgtcatgatcttaattcactttaacagtaatcaccgtttcatctcgatcataatcgagtcattacaataataattgcatcttatcatgccatgcggtacaaatatacttttcttagctcaagtttcgattcaagtatgttggtcaacatgtatggagagcgataaacgatcttgggccctatatcataacaacaaaagaacgattaaccaaatgacctaacctattccaggtccataatttattcccaaaagtcacgtatgaatcagtagtgtacccatacttcgaacatcaag

SEQ ID NO: 268124 - DNA, 1591 bp, Cannabis indica
gcagcagttgactctaggattgtgtattgtttcgtttttttggttccctagtggcttaatagtcgtttggtagtgatgcatcagagacacgtttcttcatactaatttttatctttagtatagaattgtcctttggcccttttacaatcttaggtttctaacaacaataatagtaataaataacaaggctttcgaaatgaaaaataaaagctaaaatcatagttccgtggaaatcctcttaaggccatctaaaaacaagataaataatattaataagctcaagcataatttatggtcttgatgatcataccaccttttctgcattttgccagagaaaaggcaaaattcataacataaaggtgaatgtcaaccacgattcagattgcactttctaaaggacaaaaaagctacagaaattcacttcaatatcaactctcaacatattaataaatgtcttccaacagggaaaaaattgaaagacaatagatatctgtaaaaatgaaaaagaaaaattatttgttgagtttctatgcttacagtactttctatagatggatagtgaaaacaaagactttcatacggttcaagatggtgagagataatggtctgcctcagaatgtttctttatcgttgagagaatgcaacaaagcagacactgctcccacaacatgcaccaaaaaagtccagcacattagataaagtgctcgtattgatttctatctgtaaagacaaaattcacttcctaagtaatctgacaaaatgaaacatagtaagtgaccccatgatccatattattgatacgagtttatactgaacgcaacagctcaaacattgttttttacctctttcattacaaaactcgaatggcattttcattatcttcattttcaaaatcatctctgtttagttctgcatagtcatccagtgatgctgatgggaataactccccaaccttatttcctttttcggttgtagtattagctggagtgctagatttttctttgttcaactgttccaggaggacataacgaaaagaatgaacttcgcaaaataaatcaaggacaaaaaatgatatcatagacagccattgcattgttaagtctgtttgcctactaaccatgaaaatttacatagacaagattaaaaatcatccatatacatttttcaaataattagctttgccataaagcaatcattcgcaatcataataaactttctttgaataataccaaagaaaaagttagcggatgatttcaaataaaaagcaagaacttacagttcgcaacagagtccttctttctctctctcgagcatgcttgatagcctgatgacagaatcgacaaaatcccatcagctttgaatgtctaaaaacaaaccttttccacatataatgctccaaatcacataatttagaactgacctcttgaagctctttttgctcagcttctacctctgaaatatcccttgaaagagtatgaaaaacacatttgaaacaatatttagcattataacttgccatattcaacttcaaacacagcgaagacagactccagctgtaaagaggcgtgagtatcgacattcataactaacc

SEQ ID NO: 268125 - DNA, 1051 bp, Cannabis indica
actgaagttttgagtagccttctcattcaagaccgcgactggcatttattgtgtactactgcaaagctgcgagaacacaagcttatctcagaggacgctaaacttcagcgagaaccagggtacaaggagccttctgataagcaaaagaaaagaatagacaagcgtctacccaaacagactttcaggccaacctcgagtaatataatctagtatggtaaatattcttttttacctcatcaaaaaattttacttatggttttccttccagacatgactttcttgaagcacgctcctgctttcaaccataaacccaaggccagtattgcgacgccatctcatgcgattccctagaagagaaagagcgacgttgttcctactcaggcgactgactcgtcaaagaagcagcaaaaagttgctcatgacaagggaaagaaagtgatgattgatcccgctctcaaggctcgcaatgtcatggctcttcaggagaagttcgtgagcgacgaattcatttctaaaattaagaggattcctaccgatgacctaatgcctcgctcaactgaattggcatcgcaatttatgtcaatattcttgcgggcttttgttgcaggttctaaagatctcgatcttctgaagaagcagaactcgtcacttcaagagggtctgaagaaagtgaagttaaaagcagttgtcaaggataaggagatcaaagatcttagaaaagccaaggaacagggggaggaaaaagtaaagactttaaaatcacgagtccctgaacttggtcgcgaccttgagaatgaaaaagagattgggaagaaacaatatgatcaggccgtctccgaatacatctacatgactttgaccaagctgcctgattttgacttcgcgatttttggtcctgaggtagtggaaatggccgatgcatttcgcgccatgtcacctaccgagacccaaggacttggtggaaatctatttcccgacgatgctgaaaatgcgaatgctgctgaagtcgcggagggtacaagcaaagatgtggatgatcccagcactcatg

SEQ ID NO: 268126 - DNA, 561 bp, Cannabis indica
aaaataatttccaacattttttacctagagaactttctcagacgaactccctgtccaaaaatcctcgcccttactcatctctcggaaccaaaacttagccccctcttcttcgacttcattgttgtgtttctttgacgttcatcactttcccaaacaattaacttactgttggagcaaggcgcgaccatgtcaccaagtagtctacgaaatttcagatgacgatgaacaaccatcatctcctcctttcaatctgtccacaagtaagtattctcctactcaaactgctatttctggacttgtttgtgaaatacaatttcgagttcgtagaaatttgttgccttgcatgcgtaggattagactttaaaaattaaggcattttacaattttgtatacattattttaattaattataaaatatgtgcaaaaaaaattattaccattttctcatacattcttatatacaattagaaactttttttttttaattttttataatatatatagtaataattattgactgttttatatttcttttttaagattccataattcttgttaaat

SEQ ID NO: 268127 - DNA, 589 bp, Cannabis indica
ttaaaacatgtttctatctctttcgttaagcgttcggctaatttaatagctcattcttttgtctaaagcttctaatttatatcctcaatgtaatttcagtatgagagatgtcccaactgatttgcttccttgttagtagcaagtttaataaatttagtttcttcaaataataataataataaatacaaattgatgaagagctggttgtccccactattattattattattattattattattattattattattattattattattcctacaaggaaatatatgggtcctctagcaatatttgtgtatgaaaaccactttattggggtaataaactttacatatcaatattgaattggtctagatcaataggcaaaggttcgtggtaatggtcttgccacaccagtgaaccccacaaagctgtaaattattggtacgtgtgatattggtaggtaaaggatcccattcattgtggtaaaagttattaatttgtcaattttaacaagtgaaagaggtttaattatcatagaattggatctataagcaaggcatgaacagtttctttggtcccttttccaactttagtaaaa

SEQ ID NO: 268128 - DNA, 1502 bp, Cannabis indica
tcacagttaagcgtgtttgacttgaggtaatttcaggatgggtgacctcttaagaaattttcccaagaagtgtgcgagtgaggataaagcatgctaaaaacactcgtgttgatttgtagggtcagtccatgaaacaactagagtgacgtactcatgtataagacagcatgagtgatctcttgggaagttttcccaggaagtgtgggagtgaggacaaaacatgctgaaaacactcgtatagccagagtgacatattcttgtataagagtcaccattctgtgagtgcaagcaaggacccaataaaagtttgaggcgggaacgttacaaacagaatgttaatcttttttattgtgctataaaaatacaaatggtaaatcacttggaaaaaataaataattgaagaataaacaaaaacaaaacactaaattcagaagtggaagagatagtaaggtaggtcctctaatatgtcggtagatgagaacaccaagagaagttttaggctatggtggtggaacaaagccacatggtcaagaacaaattcacatggttcagaatcaaattccccttccaagtaaaaaagaatacatatacatagaattagctagctgttaaaaagcagtacctatcagctatattcaagtgaattatacaatgatatgggcaaatcattgaaaacccattaaactagcaaatcaattttgaaaggaaaagaaattcaattagtccttaatgacagaatgggacatattataggtacattaatgctgggccagaaattttgaagtgggattattgcacatggttttggtctactctataaataattatatatagagataattattgtatattgtatagctaagccataagtgaaattaatcacagttgtcagatatgagaagttaatgacaaacttaattcatttttaaaatcaaatgaaagaaagttttctctttttctttttcttcttctatttgtagactagacttaatttagagggttaagcttattaatcactaagagacaccataactgaatcaactacacagagaatgtcttaaaaggcatttatgaaatatgtgaatgagattttatcagccaaaaagggtatatagagaaatctagtcaaatgttctataatgtttcataccatggtaaagttttcaactctgacaagagaaaactgtttcaagaaaatgaaactcttatcaattaatgtatcaaaataaattcaacatgagaagaaaaaagttctgatctttgaaaagataagtgtacaacaattgcaatagaagaaacttaattagctgcaatttcattatattattaagtcttttagagtaatgtaaacaaaaagaacaagtactcaaaattagttaggtaaccaaacttagaacatgtctctacatcaagaaagatgctactaatatttctctaccacaaataaacagcaattatcaacaagtggggggtaaaatgaagaactaaaaagaaaaaaaaaa

SEQ ID NO: 268129 - DNA, 791 bp, Cannabis indica
gaactattaattacacaattaatcaatatgtgatcccaaaataattagaaccaaatgtactgatatacaaattgctcatccacaaatcataccatacatgaacaagcaagtgtatgcacataattaattaaaataaataacacataaatatcactgtatattttgtctatggaccttcacttcaaatattagtgaaagcaaggatcaagctagctattgcagtagtttgatcaaacaataaagatcttttgatgactgttccatttcaagacaattgagttttccacgactgtagaatccacataacatggttttgttgttctcaccacccaaacgagaaataaccttggtcttttcctctcaaggattccatacagctgacacgtgaaattcaaagttcaatagtgacagaatcactattaattatagaaaatcaaatccatcagtgagtaagtgttaagctacagccaaaggagatgaatcattatctactgaccctaacttgttccgtaaatattcctgctactcatagtcccgaactgcaaaaggtaacagtagttaaggcatcataatctcaccaagatcaaaaacaaaacaagcattcggtagtttttttgttcttcctaacttaaatgtgaaaaacaaactggtatacctccctttatggctttcgatgtttttcgaattgcatgtgaaacaaatatatgttttgttaaggaaagaaatttcatatttaacaatgagaagaagtaattattccagaagaaaaaattgagaatttattaattagt

SEQ ID NO: 268130 - DNA, 1158 bp, Cannabis indica
tcgaaaatgaatgcatagcaatcttaccataaaaaggaaaattattttgtcacctaacttgccaaaaaaagactttacatatctaataagtcgcaagtataaaagcatcaaaagaatgcgaaaggtagttaaatttccaccccgaatgaatttatggcgaattaaatttatcagccaaaaactttccaataaaaattgaataatgacaattttattattcaaattaaaataaaagaaaataacaattatggaaatccccaaatttaaactacatacaagtgctttgagccacccgaaaacatacaaactacccaataagagacaagcataaaacatgtcatcataaaccaaggagaaatactaaagggcatcagtagtgcttagcaccctcctatatgtcagtatcgctattggtctaactaaataccgggtcccacatagtttaatataatagattttagggagtatcgctagccaatcgcaacgtgatatgtcgagaaaatgctaagcaccactagtgcttaatagcaatgctctaaacaaaaaaatctttcctgtatataattcatagcagaatgatattatttagctcaattaaagtttatgttgttacacttaaatacataaaaaaaaaatattaacaactaaactactcaaattacatccatttcaacacccaaaaaaaaaaattaaaacaaaaaccaactcaaattacatcatttttcacacttaaatgctcaaaccttttttagtagctaaaaccaaatggaccatttgtcacacttaaatacccacaaatataaagttgttgggaaaaaaggatatacttctgaagtaaagaatttctacactcttagctaaaactacaaaactcacaacacttataatttcaaattatatactttctatatctcaaatgtctctacacaaatagtaccaaatagtaatacactctttgcttttacctaactctctcacactcatctgcacatctctttcacacaaaaaacacatatttataaagatataaaatttaaataccaagacattctaaaacttggtcaccaaaactctcatttttacacaattaataattactaaaaaaatataaaacattaaaaatataaaaacaaaattaatttgaatcaaactccaaac

SEQ ID NO: 268131 - DNA, 825 bp, Cannabis indica
ggcataaaacccaacaggaagcatctgtgttgatgaggaacatatccttgggaggaggctgccaggaagttaagggctttgatgaaggagtggctggaatgtgttgttgcaatcccaggtgttgttcgattgtctttatagcccaaggaatccaatagttgttgttcgggtccttgtgttgaaaaataaattggtttcgtctttgccaaatcaaccaagagcagcccacaaatcggatgaactcctcctttgagagatgttcccactgccaccacaggaaggccgaagcagtatgaacactttgatccttgaacttggagtagcccaactgcttccaaattttttgaacctttggacagccccacaacacatgacttatatcctcctcctgctgcatacacctatcacagttagcaaataaggacattcctctctttctcaattccaccttagtcgggatccaatggttaaacactttccaaataaaatttttcaatttcggagttagccttgacccccatatgaacttccaccaagcttttaatttggagttgtttgaacaagccgcccaatccggattactaaatcttaacttatagccactagcaaccgagtaattcccattaatagttaacccccaagtaatccaatccgggttgtgaatagatggaataatgccaagaacccaaggaatatcatcgttgtgaaaccaactactcaattcattgattttccaatctccattagcagttatcaacgaattaagagtgacatctttgggtatcggaatcttggttcgcaactgaaaaggaatttgtcgaggaa

SEQ ID NO: 268132 - DNA, 1106 bp, Cannabis indica
aagtcattgctttccaacaattgctgttttgattgaaacctttctagccagaagattacagaaaatccaatcatggccggttatctaataacattattaaataatggccatatattagtcaatgtcataaatagttaatagttatatttagttgttccaactagaagagatcatgagtgagacaaaagttgaacaatgcatgtttgtctttaaaagactttattaaattccagcattgttaaggtacagacatatattaccatatataaaatgcatgaactaattttgagataaaaactcatacatcttaacttacaccttaccaaattctaaaagacctactatggattgcttactataattttgctctcttaagagtgtttacaactattgtttttctttttgaaatcgtgtacaactatttaaggagtattaaatgtcaataatgcattcatatctggatgtcacataatgaagattggaaatattggttttgcgcacaaaaaatattatataattttttttcttttttgggtggggcagagaatgttgaagtgtcttgtaatttgcaaatgttgtggccgcatagtgtggatatatattatatagacagaagctactcttgtggacctaatgggccttgggtcaattatacacgctggacaataataagaccaactcagatacaacaggcaaaaagaaaataaagtaggaagaaggggatgataaaatacaagataatgaaaagcaactccatgtaccaaacccaaagttgaaataataaaatatattaaatcttctaaaatgtatataaagttgatgccactactgctccagttattttcacctattgctcagtgttacagagagtataaacaaaacatatttaacctccaagacactctatatactcactaaaaaaaactgactacataatttatcagtctctgttctaaagattcagaaattcttgcctttctttctgtggttaagattaaaaactgtaaaaccattcttaaatatctatatataccaagtatcatatttcttctttactagatccatcgctccaaccaagggggtaaggaaatttttccagtgtttgt

SEQ ID NO: 268133 - DNA, 609 bp, Cannabis indica
ccccgataattttctcaattatttatttcttttaacttttattctcttggccattttccaagactaccagctatcttttgaaaaagaccactcttatatgcatatccattgagaaacccctgatctcttttagtatatatttaaccttttgtttctttataattggaaagaaaaagccctagggctagatagcagcttggacattaaatatctgcaaaacaaactctctatttttccctttgagtttaatctctaatcatcttcttctccttgttttgcatgaatcgatccccctggtttggtgttgaacatccgaatcctaaccctagggtaagtttctcgatctgaatctgtgtgatttctggtctattgatgattttttctgttctgctctgtgattgagattatttggctttttatatctgttgtagtggaatgcagagaaacatgagagttagttacaaagtggttaaacactttgtaactaagaaggccacctaggaattaatttttactgtcttgtaactctttttataataatctggtttttacagtgtacaggaatgagggggtttattatttcaacaacttataatgtatttttttttt

SEQ ID NO: 268134 - DNA, 1211 bp, Cannabis indica
atagaattataatatttaatattatatttaaattttattattattttaatttatttataattgaataattcatatcttattattaataataaattataaagttttttaacatgccgtgtcatatttcttagacttttcgttgtatttttcggaatagtctattcgtgcttacgtgtcgtattttatgtgcttcttgtgtcatatcgtgcttaacgacatatttttaattccgtgtagtgataatttgtagcatcatgtcatatcgtgcccacgtcctattttttgtgcctagtcgtgttcatatttttttggactcgtaccgatttcgtgtcgtgtcaaaaagtctaacttatatttatagcactatattaaaggtattgtattaaacatatacaaatattatctctaaaaattgtatacatattatagcataacttattatataataaactactatttatctatttattttttatttgaagtactcttcgtaattattctttcactaataaagttaaatttgtcatgttagtggtagatcatagtagtagatgatgacaaattatttgaaaaaatgagcataatgtaattataggagaatatttgtaattattttcttagtggagaatttttacaagagaaaaatgttgaaaaacaaaaatctattggggtcaacaaatcctgttataatgtataaagctagacatggacgttatttttacaaatgtatacgtacactaaataatcatacatatacaaacactaaataatcataggtagcttgatataacgttatttattaatctcaacaagagtatctaattttgctatgtggatgtggtccacatgatttttttttttctctttattataatttgagtttagaggattggattcttaatatatacggttcaataatttgactatggcaactctaggaagatattataaaataataattccacatttatttttcatccacttgttaacattatttgacatatatctccacctccaccataaccatcatatttgtgaatcattctttgccctacgcacattattattattattatgtaaaggaaaaaaaaagtaatagtaatttgtgcgtatatatccatcatgggtaatttttttcttcaaaatgccccactatttaatttgttattaaaatgttagggtattttggttttttttttcgtttttttttc

SEQ ID NO: 268135 - DNA, 523 bp, Cannabis indica
aattgccccttaaaatttttttttttattaaaaagagctttttaaatgattataaggttatttttgacttaaccaaattttgaaaattgcatgctttgggtttcggcagttcgggatttcgaggcacatcaacaatattaaatgtctcgtcttttccaattttgtagtgtttccatccgttagatctaatttcttttgatctaatggtgattacttccaaggtataagatttgaacgtaaacactcattttgccatttttgcctttcaaatattcaagcctttctgcgaaaaaatcatctccaatttctcatcaccttggatgccctctttgtcactaactttcttcctgtgtgtttcattaaattacttttttagcctcaaaaacttttagaacacgttgattcgttcatctccatctcaatcacaaagttcttccttgcctgacaatcttccttagaacagtgagtggtttatacctttcttttttatacttacagtctgattattatgtttgattgtctt

SEQ ID NO: 268136 - DNA, 671 bp, Cannabis indica
aaatttcatgaaaaaaaaaataatagtacaaaaagaaaaatcaagttgtgaaaactaaaggtgtgtttggtaatactttttgtaatcagtttttaatttttttaattagaagtaaaaatatttttcaaaaatatgttctataaaactgttttcaattttgaattttttaattgagaatcaaaattttaaaaattttgaaaatttttaaactttttttcttaatcactattttggacttcaacctcaacttggaccttggcccccgaacgccggcctctaccccagtcccagacacgaaccacgaccccagtctcagacctgaacctagacctgaattaaataaaattaaaaataaaaataaaaatgaaggttatagaacacagttttgttttatgtgccaggagttagaaccaactttaatcgctgacctagtatgtcgcatgtcctgacacctagcatatattttccttatcttgtatagttgttaacgtctatttttattaatcacagatagactggctcgacctgtactggaccttgcctgtagggagatcgctgaagttttaggtggccttcctgttcaagatcgcgactggcgactactgtgtactaccgcaaaattgcgcgaacacaagctcatccctgagaacgccagccttcagcgagaacca

SEQ ID NO: 268137 - DNA, 831 bp, Cannabis indica
catgtttcaattgcctagtttaattttttttataattgaatatacagtgaagactaattgtgtaattcaattagtgaaagctcaaaaagtcattcttatttttatataggttatagattctacatatatatatatgtatatttttctatatatttttattaattaatatacacttatatatatttttttaatttaattataaataattattattaatttcaatattttaggctaatcaatagtcatcaactttttgttataagcttgatatatcataggttacattcactactcttatatatgtttattcttgaaattacaaaaatttaaataaattatatataatagtgcttattagcaatatttacttaccaattattattttatatttatgaaaatggtcgataggttgaattactaaagtttccaaatattttttttttatatatttatgcaaaacttaacaaaccatgttacttaaataaaaatcaatagaaattctcaaaacctcatcaaataatattccttaaattctattttatgtcatttttttaaaaaaaatatttttctctctaaaaaaattatatgtctataaatttagtgttgttagaatagatgacatgacatttttttttattgggttaatttcacaaatgcacaaaaacaacaaaaaaaacaacaaaaatacagtttcacggaattttaaacatttttgcgatttttctgattttataatacgatcattttatgttgaaattttgttcatttgttgttaattttttgttatttttttgttgttattttgatgttacttttatgttgttttcttgt

SEQ ID NO: 268138 - DNA, 2312 bp, Cannabis indica
taccctaaatatcaagaaaacacgaaaaaaaaaaacacgaaaaaatgacactacaggggaaaattgcctgaaaaaatagtaattttgggtaatctgccagtaaaaacaatagactgtttccaccaaagcggcctactgttttctgttgcaaaaaacaacaaagcctcaaatcttgcttaaaacaaccctaaacttaaaaccaagctccagaatacctattcatacatcaaagaacatattctaagtggtagaactaaaagtaacctcaaattaaataattcaccattgttgaaccaagtttgagttcaagaactaaatcttgctcaactcaataaataaccaaccaaaataacttaaataagctttaaacaaccttatgaaacttcataatcaatccaactaaacctaggtttggacagaatctaaactccaactttgcatacttgaaccaaataaaacccttaaagaaaccaaggagaagagcactaggatccttacatttgatttacaaccttagcttttgctagattacctagaaaattgatgaagtttgacatggtgtcctgctggttctcttgaggccgaaaggttagagagagaaagtaagaggtagtttttggcttttagcttaaatgatgaacacaaactaacttagatttacctaactcgaaatcagaatattaattaatatcatagttattctataataacccaacacacaacataaatttaaataggcaaaactaccatttgcccattactttcttcttaagaaatctttaaaacttagaggtaaaatggtcaactacctcaatcccgtctaaacccaatgttccatgaatcaacaataaataccccactaaataaatagttctaaactcactcatgtgactaatagccatctatcacatttttcattattaccgagcaaaaattataaaaattataaatttcacttatatcataaacattacccttagagtttcataaaatatcaagaattaagaaattataactctaatacccattttttgaaaataggacccacaatatatataattattaaatataagtaattattgctaattgccctactaattcatactttaatcatgcgatcattacaattattcccctgttaaaagaattttaccctcaaaatctaacttgaataactccagatattgagtcctcatgccgaactccagttctcaggtgacttgctccaccttactattcctctagagtattttgaccaacgctatggtcttgtttcgaagaaccttctccttcctatcgaagatttaaactggttgtccctcatagtacaaatctgactgtaattctagggattcataactcaagatatgagttgggtcagacacatattttctcaacattaaaatatagaataaattatgtacaaccaataatgatggtggtaaggctagccgatacgctacctgtctgactttctcgagtatctcaaatggcccaataaatctggggcttgacttgccccgtttcccaaagcgctttgcacccttcattggtgagactcgtggaaaaacatgttctcccacctgaaactctatgtctatgcgcttggggatcagaataacttttatgcctgctctgtgaagaaagcatctgagccttgatcgcaataaatcttctagtatctgtattgctctcttggactatccaccagtccgaggatgaaaagttgccttgaaattcagctttatacctatagctctctgaagacttacccaaaactccagtgtaaactttggatccctaccctaaataatagattttaggatttccatggagacgaattatcgcttttggcatgaagaaaagggtttctaatgttagtggttcagaaacagagagagattgagaaattaaaagcataaatcaaatcccttaaacataagaaaaatcatgttgaacaagagtagaatgaggaggaggatgaggaagaagaacatgttcatcaggcgtgtgttccataagaacatgctcagaaggatgagggtctacaaaattatgctcaggagtttgtttccgtatattgttaggctaaaattagtctaagtttcgggtcatattttgggttagttttcactctttgcttctagttttagggctattttacgcttgattcttttgtttcaggtccttgtgtgtttaaagagagtatgtacaagaattgaggacaagtggtgaaagaatcgagaagaaaaaccaaatattgtgtcgctgcctgttccagtcgcgacgggaaattttccagtcgcgacggg

SEQ ID NO: 268139 - DNA, 968 bp, Cannabis indica
gtttctgaagtttggcgagttaataaagttggcattggagctcttgtggagaccaagattaaaggggaaaaaattcaaaaatgatgtcaagtaacttctcgtgttgggacttttattctagtattaaagtggaaggccggattctcttgctctggaggaagaattttgttaatgttgaagtcattgagcattccatgcaacacgttcattgtcatataaaaatgataggtcagagaaaagattactttgctacttttatctacggagcaaacaacgtagaaggtaggagtgatctttggactgccctatcaataataaatgtttttaaagcttggatcattcttggtgattttaatgcggttttaaatcatgatgacaggcagggggaatgatattactaactctgagcttgtggactctaataactggattgctcagtcttgtgttgggcctatgaagcgcaggggttcgactttcacttgcaataataagcaggataataggatattttcttgtattaaccatgtgtctcacaacgaggagtgggttgatgattttttgaatacatctgctcatttctcttgggagacttgttgtgatcattgtctttgtgttgttcattcactttctacagaaagtattggaagcaaaccgtttcggttctacaacttctggattgatcatcagaattacaagaaaattgtgctggacaactagggcaagcctctaagatgttgtgggttgaaggggatttatctaaaaaccacgagactcaagcacaagttaaaagccttcaataggcacttgattgggaacattggcaatgcttatgagaaggccaaggagagttacaaagaggctcagttccaatgtcaagctaacctgaacaacaatcatttccttgagttggagcgtgcgactgctaaccatttttacattcaggaaaaaatgtacttgaactttctcca

SEQ ID NO: 268140 - DNA, 664 bp, Cannabis indica
ttcgggggcagtttagatgactgagggaactaatcttgaatgacagctaagtcctctcaagccgcttcagatgtagggagattctcccacttgatagcttgaggtggcattttaagagtgcctggacggatggacagcacgtcttctggttccagcaaccattcgaaatcagcagtgacattcgggggcagtttagatgactgctggtgtggaccaagtgcagctcgcagcagcgacacatgaaacatggggtgtattgaagcatctgaaggcaattgcaaacggtaggcagttgtaccaatacgagtcagaactggaaatggcccaaagtaacatggtacaagcttctcattgaggcgtttagccactgtacgttgacgatatggtctgagtttaacataaaccaaattcccaacctcaaaatgcacctcttgacgtttcttgtcggcttgggacttcattttctgttgagcgcggagaagatttgctttgagtaacaccaaagtggtatctctagcttgcaaggactgctccacttccgtgacctttgtactgctggttcaaaacgaagcagagacgggggtccaatcgaaagagctttgaagagtcatgccaaccagacatggtaggatgtgttgtactagtactctgaccatgctagcca

SEQ ID NO: 268141 - DNA, 825 bp, Cannabis indica
tctcccaacgagaggaaacctttcaagggacctaataattatgtatataatgtattttactctaatagtggatagaatttttataaataccctaactgggtcatggatatgcccagagtcgaactttaacctacataaaccctttcgtttctttataaacgggaataaaaaaataatgattaaagttctatcaaaatatcctctaaattttcttcttcttcgagataaatttaaaggagcagagttatggttttactttataaatatcacttgtaatacatttaagcagcttataaggctaatatacggactcattgactataaataattaacacttgaactatataaatttaatcgtctcaataatttaataattatttaatttttgaagctttcgcttaattagtttataaaaatttcagtaaacataaattatttataattttttaaaaaaatttaaataactataatgtatataattatgaaaaaaaaaattaaactaaaaaagaagatgccaaaatggtgtagtgatcataaagttttactagttatagtagaaactgctacaagaacaaattcgttttctagttgaattggatttttcagaaaatacattaactaaaaagtataaagattattctttcaaaaaaaaaaagtataaagattaaagagcaggacaggtcatcaagtggagaaagttctagccgacttcctcggctgagtgggcccattcggagcccacaagcgaatctcccatcgaatcttctctagtcacacaagaaagccactacccaattaatgtttcaaataaccctcatatttctc

SEQ ID NO: 268142 - DNA, 1400 bp, Cannabis indica
tagcttgtataggctaaggctagtatagctagatatacccaaacatggtcatggtcatggtcatggttctatattacattacattatatatctataaataaattattaatcctccaattatccacattttccggcttgatttgagatatgttttttttttagtttaaagttttgactatacttatacttgaaagtatgtatggtataaagtaagttagggataataatagtgttgagtgttgattatagtgttgactatactattaaaaaatagtaaaaagaaattcaaagaaatatgtgtgttatatttatcttaaagtgctttatttttattaaaaataaaaacacaagaggtgagggagttgtttatattataatttataaagctttttgctacataaatacatatttgatttgtctagtttgtgaaaaaggtgatggggttagggtgctctataatgttgtctactactactatactaatctcttacaaatattttagaatatttttatgggttccaaaacttttataataccatttaatgtttatgttgatctaatttaataaggtgttatatattttaatttaaatttatttagaaggcatggatattattacaataatattgaaacattttacaattcatattgtattataagccttgtttaacataacatttatataatgtaataaaataaatttggatatagttttataggtaaatactatttttagattttatattttacaaaaataattgggccctgtattttttaaaatagtacaaaatattatcttaattaagtaattttcttttatcaaaataaaactaataataatctgatataaaaatgttatgataaaacttagtatatttttgtatctggtcgtgctaaaaattataagttgattatattaaaaaaaaaaaaaaacgctcagccttagaatactattttatactatttaagaaaatatagaatttaatttattatttaaaaaaaatatcaatttaataacttttgccaaatataaattctaaaatagtattaactctaattttatttatgtatacaaaattatatatatttaatacaaaattatatacttataataagtatatgtgtaattatatcccttacaaaaaaaaaaaaagtgtagtttatacttttgattatttacaaataattcaaatgaaatttataaaactagctaagtcccacataagagatattaaatccaatcttcatacataattatataattaaatatataataacaatatatagttgtggacctttgtggttagcttaatgtgatacaaattaacatgtccctataccctatttgtatatatatctatagatatattatatgccagccatacccatctgtggggtcc

SEQ ID NO: 268143 - DNA, 893 bp, Cannabis indica
ggttggcttctccttcttctccgttcatctaggtgacccacgatacaggtatgttattagagtttccctttccatttttctcagcactaatttagacaatagaataaacaccttaaacttctttggaaggctgctctagttattacactgtccgaacagctctctttctttgatttttctaccttatataatctgaatatgtatttcatttctatgtgtatatgtaaagattattatttttctcattataaagatcttgtcaaatttatatttgatgtattattgagatttaattttattatgacagaaacactataaatttgaggagttcagtattagaggacatagaaatatatcaatcttttgattcaggtaaataatttatttattattgtgatatgaatgatatgaatttcctgtaaatttagtaagaacagtatcaattataggaaaatagtgaatggtacattgatatagatgatgaggagaaagtgctctcccaacaactattgctcacttaaccatacaattctctctccaaaacccttctaatactctcatatatcttaggaaaaccagaaattgtggaccttgaatagctttctggaagttggggtttgttgaattttaattgtatttatgatataattctctgctccatagtagttttgtgttataggaagtaatcaaatctgcaccactggtgaaagagctttgaaatgattagtacttggcatgtagtctgtgttgctaatcattatagttttgttaatttcaataattttgtatgttgtctcttgatcattgcaggtcagtgaatttaaagcagtagcaatggcttcatcatatctaccagccactaccgattcaattgctcaggctttagaagccaa

SEQ ID NO: 268144 - DNA, 1046 bp, Cannabis indica
cacatacgatgtgtagactatttttattttctgaatatgtgaatgatccataaatttatatataatatagtaaatgttagacattattatatgaatgatggatttgcaatgggacaaaaagtaaggaaatcggaatgtatttgatcaaaacatcttcagtcattaactttcttgagttttaatctcacacgagtttacaaaaaaaaaaaaaaaaaaaaaaaactaaaattaagtgtgagtaatcaggcttccaagttctctcaattctcttaaatagaataataataatcataccttataatagtgctagctatcactaacatttctctatcacatatgtatacatttagtttatatataattttatggaaatattaacaaacacatatagtgcttagtatcctctaaactatcttattattaataatgtatttaaatattgaacttaatttatatagtttaatataatattcttgataaaatattattaaattataacacatcacttttaaataatattaagcaaggcttaataatatttataattttattagcattaagatactagtagtatgaagcaacaataattgtctttagcattttcaataaaaataaggtatgtgttagggaagcagccatggtgaaaacaacaaagtaaaattattatacgtgcctctttctatttggtacattggaaacaacaacatgtaagataagcaatttgggaatactataaatgcagaggcacgagagtgttgactctttgaatttttagagtgtacacataaaagatattgcatcaccaattacgtattgaggatgttcatgtacgtataatttattatttcaaaaatttgtaaatggaaaggaaaagttaaaatgacaacagttcaatatcaaaattttatgacatttaataatagaaaaaggctcattataacctcctattataattttttagtcaatgctaacatctaaaattacatgtcgaaatatttttttcataacggtattcgttatagttacaatattatttctgtaaattt

SEQ ID NO: 268145 - DNA, 1416 bp, Cannabis indica
ccacttggctgattcaaaagagatggtccggaagatgaaatatcagttaggcccttaccctgatgagaagggtctttgagaattgcaacatctctgcctttcccacccaaggggataacaaatgctgatagccagtcactagcattagctgtatagcagagctttgataaagaaagtgagcttcctaatccctgacaatcgttattgttgttgggattttgagagcttaaaaactcgacaacaagggaatcattatcctggattgtggtttcaaaagtgaacctcatatcaagtccagttctgagaccagctttatcaagtacattgtagttgttaccatcctcatgtgaatcgacactgttcatcatcatcagcaaacctcccatgaaattaacatcccctcttagaacagtacccacttcttgaaatggactccctttagcagtcttatacaaggaaagaattctttctaccttgtcttgcctgtccctgagcttcatcaaatccgaaaaagcttctcgttgtagcctcttcaatatttcaactggagtgttccgacgggggcagtgaatgaagctatcaatgacgccttgagtccattgacccaaacctctgaatttgtcgataacaaattctagaggctccattagaacaaaaccctagagagagaggtatacagaatacagttcaaaaaaagtccacagacttaattcgtgtagagcttcaattcaacttttattccaaacccgaaaacaaagtttcaaaattcgggagagagaggggggaagtgtgtgtgagacagaggcgagaaagagagaccagagaggagaatttgccaaaatgccattctcaaactgaaatttgcaaaataaggtttgtttgtcattatcttttatttttatgttttcacattatgttttaagaaaatgataaatgaattggttgattagaaaataaaaaagtgttttggttgattagtctattcaatacaacattggcatcatggtaatgtacataatattattgtgaggggataaataatttacggcataaatacttaagttttatgttgagtaacaaataaatatttaagtcgtatttttggcagaaaaatatcttcggtcactaacagggccggccagagaatggtacagccggggcataggccccaggccccataattttcgaggtctcaaaaaaattaaaattagtatatatacatatataaaagtttataatatattaatatttaatttaataaattactggaagctcttgtggcattaatcggagaatagagagtcatgtgcactgtgagattaagggttcgatccttcatacatgcatatgtgttttattttgtatatcaaagtgatgtctaaaaggaaaaaaagatgataagaaataaattaaata

SEQ ID NO: 268146 - DNA, 904 bp, Cannabis indica
tcatttttttggcattattataggttgttcagccatagtgattgttgcatggagttggttagccaatgttgtgtctttaaggggctcgccaactttggcaacttttggggaagggctggttggctagttttgtcttttgacactgattttgatcttgttttgctttcaggcctttatgaagctgaccttatcatgtgacagctccagggggtcttcgatcgctctttgtgagctgataaagatcttggaggctgctttcataacaaaggaggctaatctcctggtgaagggccatgctttatctgagatagaggcttttagcctacaaaaccagagcatgatttctggtttggaggccatgcttggcaccaggaatcaagagaataacatgtaagttgctaacatttggagactaagctcatggtgtgtgaagctaagggcaacccttgatggccagcatgcgataagggacgagtatgtcagcttgtctttagaaatcatctatgagttcaagttgcgcaactccaatgctgatctttcctatatgggcgacttggctttcttagagagcacactggcctaaggcaaagcactattcgagagcaggttggaagcagcaaaaccaccatcaagctagaggggtcttctttggggaaatttgatgaagagatggtcggcccatctgttgaggaggtggccagctagggccatgatcaagtggccagccagcctatggaggctatgttcggcccacacaaaggtgatccagactttgtagctttcgattcagtcccaccttcacctacacacatgtagattcagcttattagttttcagcattatggttttatagtatagacaatgttttcatgttttgtatgcttttactttttgaacactactt

SEQ ID NO: 268147 - DNA, 1494 bp, Cannabis indica
ctttggaatgtcaaaatatattgatatgtatcaaaaataaatttcaattacactaataataaatttaatataaatttgcatgcactagttttaacccattttattattataaataatcgatttaaccaataagttacattatttgtctaaatgacataatgttattctcatagtagatatatgtatatagtttcaatataaaagtgattgttgggaagatgtacataccttgtctctctcttgcacaattatatctgttttatgttcaaaatatctattgccgacaaactatcaacaaatagtacagagtcctaaaatcttaatcgaatccctagattttctaataagtaaaaagaaaaacaatatagcactaatcaaaagccttatatattccaagtttatagaaaaataatatagcacagaggtcataacatcttaattaacaaaacacaattcttataaacaccaaacacccgaattatataatgccaaataaatatggactaaccctacaacctctagaaaaattaaagcataaatgaagatgagaagttttttttaaaaaaggctaacttgattaactctcaagtgcttcttaatttggaatctctaaccctccaagctttctctacaccatcgattgagaagaagaagatgagaagaggatagcattcggtgaagtgaaaagaagaagatgaagaaatgaagaaaatgagtagttaaaaaagtagtaactgaaataactgtcacatcaatatttattattatttttaaaaagctaatcggttaatgggtatttttttaaccaaatacccctactgcttatgtgtacaatattcaattgaatctcagcccttaaatcaattacacacaagattgaacgatccacattaaatgcagaaccgtccatcaggtgaaacaacatcgatccttctcccgctataaaaaatctcacttttaatttaatcacaacaaaatttgtgactaaaagtaaaaaaaattgtgattaattataaataataaatcttatattgtgactaaatgtattagtcacaaaaatcacaatttgttgtgactaaatgtgcttttagtttggtcgcaatacttattgtgactaaaactaaattagtgacaacttgtatataaatactatattttagtcataagtaattatatatttttcgttgtgactaaacgttaaatataataataaaaaaaattatgttgtgactaaaaggttgttattaaaaatattgtagtatatatagacagagaatcctagctcttatatattatgataaccatgtatatcatgaccttcaactactcacaatacatctaacggatctgatcttaaagtaaaaataaaaaggaaagtttaatgtggtgggtattatggtatatcggaagctctagtcatccttatgtgaaaaagtttcaagtagaattttgtgaagaacttgtcccatatcataatcttcttcctcctcccta

SEQ ID NO: 268148 - DNA, 555 bp, Cannabis indica
tatatttttttatctaattcaatataaaaagttagagcattgctattgggcaccagtggtgcctagtaccttctaaatgtgtcgacttgtaattggctagcgatactctataaaaattgttatattaaactatatgggacccgatatttaattgcaccaatagcgatattgacacgtaggagggtgctaggcaccagtggtgccctttagcatttctctaaaagttaatatcatgtcaaaaaaaagttaatattatattcataaattaatatattaaatataatagcttctaaatgatgaacttgggaagacaaatacacattttctatgtatgacaatatctttttttgttggacgaggaaccttgttttgtcctatttatttaaaaattaatatatgtataaaggtaaatcaatttttaattgaatgtgctaatattgagtatagaatctaattaataaaaattacccaataaaataaagaccaacgtaattaatggaaaaaatttttaaaataattattagtcaatttccattttatttttttggctgaaat

SEQ ID NO: 268149 - DNA, 928 bp, Cannabis indica
ccaggcggtgtgggattgcacagcttacccgctgtttccccttacggatcacggggctactgactgtcacaatatatatgtacaattaatctataataatgtagcttcaaaacattattgactatatatacttgagcatataaatatatatgttacatattatcaattatatataaaactgcatgaacttcttgatagagacttgaaagtgttaagagtcttgatttcacatgttatggttaatgggtatatatattaatgctaataatatgtactatacttctcctccatgtatatacaataatttatccctgcatgtcccaaaacaatttctctatatatatatatataaagataatattcttgatattatatgttgtagttaagtgggctttcctccaccactgttctatcctaacctccttaccagaaaatttgttttgtaatgctttattaattaatgatgagtacacttattttcagaaaaaaaaaataataatatcctagacatttccacttaatgaattattattttatttgtcagaattttcacagaacgaatttgttttgtgtacatatacgtacactgtacacattgctgaatttttataaataccatttttataatatttatttatgattttacaatttaaaattttatttacaaaatatatttatagttttaaaaagcacaaatacatattttgctcagtaaaaataaaaaaataactaaaaaataaacagaaatcaatctcacaataactataaaaaatcaactaaaacaacaaaaaagaatccgaaaaactaccttatagtaactataatacaattataaataaactataaaacaataaaaaacagtttagtttagtgtttttactgcacaaatatttttataaataaaaaatactataaaaaattttacttt

SEQ ID NO: 268150 - DNA, 979 bp, Cannabis indica
agtggagttatttaccctggttcacagaacccaagcactacccaatcgaattgtattttcgatacaggggaagcttataaatcttctgtctctatctgtttgaaattgatcaattgattcttgaattggttaaatgaattgataatcggattaaattgaaacttggtaatcagtcgtagtaattaggtaatttgaaactttcagtctgataagaattacaaagagaatcgtatttatacaagctaaatgaatcaactaaaaagaaaggtaaaagtagttacacaaagtaacatagtaacaagaaagctaattaatctaaccaactagattagttattaacaaacttgctaacaaacaagggtactacaacctatctctaacacactgcatcacaccacattttagtggtgtggtttttgtagttttgagattttgtgatgtatttgagaaattgtaaaaattgcatgtgcagattagtttaaaaaaaataactaaaaacacactgcaaacccattaaatagtaaagtcgagagtttcttaatttagaggttatccccattgttgacacggatttagcttgagcatagatcaccattctaatcaactgcatcacttttaggtggcgtttggttgtgaggaatgaaaacataggaatagaaatgacaatgagaaaaggaataggaatggaatgtaataaaatttaaaatgcataaaaaattgataaaaagatcattaaatttttctcatgttacattggaatggtctttccttccatttcaaaatgaaatagtcatttaaccaaaatagtggaaagaacattctattggaatgttattccaatattttaaaatgcaactaaacaaaggaatggaatgaaaattatttcttttctattccattctattttattacctccaacaaaacgccaccttaatgtttattttttaagtataacttttatatagcattatgtacatat

SEQ ID NO: 268151 - DNA, 1614 bp, Cannabis indica
caaactgattgattcttatgtcatactttgtttattaggcctaatcaattatatatatatatatgatgttatacatttatatataatacggtaattaaagggtccaaatcacaatttatatgtctatatatagcttattaattaattaagaaacaatcgcaagaaaatataaaataaaaaggtgatgcaagtccttaaagaaacccattttcctccatcagactaatatatatatatttaaaagataaaaagctttagaatccaagaaagagcatctgttctgtggtgtcaaccttcaatttcctcaaagagcatctgttgttgttatgaatgtgctgaatttgtcaaaagatttcataacaagccttttattagtagttttataaacaccataaaaaattgttgaaagctactataataaagacaagattcacctttcacatatacctcaaaacagaaactaaaggatattcttttctttgcagcatttaattgctccttcaaacatatcatgtacaccattcttgtaacagagcttctttgatgggagggattcaatattgaatcctctgatgctctccaaagatctgtctgacaagatttccaaaaaacaataatgttgtgagacttagctcattaaaccagctgccacatcagcacaactaccctaactgtcacactataaaggcacctcagttaaaaaactcaaggcatctctcagcacctagaagattctaactcccacagattcatctctccctagttcgaagacttgttcaagaagctcagtcatgaaaagagggttgtaataaggttcctcgttcctcagagtgagattttgtgtaattggtgtttgacaccatcaatgattgtaattgagttataaaactctcattgtaatgtgctgagttgatcaataaattatccattttgaaatcgagctaagtatcggttcttaattaactctgttttgtgtttgaattattggttcctattggctgttaatgactataacaacaaaagaaatgtagaatttaaattcacatggtatcatagctataggcttcaaagatctgcattcaaatcttcaagaaccacattcaaactttcaacaatctagactaaaatgactataaattagatttgataatgactccaataatttcagtttatagatgatcaagaagttcatcaaactattttagaggctctagatgaagcaatgattcaatgaatctcattgaagacaggaacaagaagattgagattgaagaaaaggcacatagtgctattcttcttagccaaggagattaagggccagtttggcacagctgtgctgtgggaaaaagtagctgtagctgtgctgtgaggaaaagcagctgtagcaaagctgtggaaaaaaactgagctgagtgtttggtaaattataaatttcaaagtactgtaagttgttaagatctattataataataatgataatgctataatctagtttattataatcaatgtaaaattatttatataatatttatttttaatatattttatttttttaaaatataaatttatatgcatttaataaaaataatttatattatttttattatgtttatc

SEQ ID NO: 268152 - DNA, 948 bp, Cannabis indica
ctaagctttgatgaaaacaaaacttgcaactactacttcttcttttagctaagttcacattaatgtaattgtatttaatttgatgaataacaatgctgaacaaagtttttttggtagttcattaacattaatcaattttagctcacagacttggcgatactctcaagtgctgagtaaagtttatagagttggtcttgagataaatttagttgtttctttagtgatttcgacatttccaacccacgaatcttcagataagtggaggatgctcacacatgtaacagtctcctaagagtcatgatcaagaaagcctagggtgatttggtatggcaagtgaccaatgaaggcacttctttgatcacttgggggcacataggttatgtaatggtatacgagagccacatgttacacgagctttcaattttttttttgcatatttgtgtgagtactctcatggtaaagataactgtaagaaacaatgacatacatcccaatatcgagtttcttaagacatagtgtattgtgcaagtgttaaatggtcaagcggtaacgaataaagtaaaaaaaagcaaatattgaaataaagttttaattaatttggaataatttctaatttaatttaaacaaatttgataatattttacaaaggcttatccacatcgaaaggttacctaggatgacctactaacacactaaagctaaaagctaaaaataggaaaagaaaaaataaactaagacaatatcctatgaagccaataagatttctatggcattaacatctttagcttgttccttattccctacaactaacgcatcagcaagaggagaaatgtgtagatgcttgggattgtagccttcgactctttcagcttcttcgaccactggctcatcacaatttaagttaaagtcaatcctctagagagcatcgtcattgaaatgcttcttgca

SEQ ID NO: 268153 - DNA, 877 bp, Cannabis indica
caagtgtgtgagtcctcacccataagcacaaaactggataccccttggggcccaaactcaaatgtcaaagttgcattctatatacccttgtaaataagggtttatatcccatgtggaactctttccacttcacacactaaaatacttctatattttgttaaaatattcatggaacaagtttgttatcgctcatttgtcgtgtaccatacgctcccttccaagtctccaagatgactccagcacaccaggtgctagaattgttacaaacatggctaatcataaactttccacaactgtcagtgttgctgagcttttaggcatatgttgggaggcacgacgtagccgcattggtggggaaaatgaaggatcaacagtcaccccaaaaaaaaacaccaaaatattgacattattttcgtcaattataatttgatcaaaattgttagaggcaagacacgaggattatagtggttcggcccatacataagtgatctacgtctactcttgagttttgtttaatatcaaattgaattttgatagcatttctgcgcgccttaaaaaatgtcactttcactttatcacaacccttttctttaaaaagtggctggagctctttgtttcaaatcaagagtattgttacctgaatagtgaattgtactgtcaatattcaaattcagataactgcattaaatatcattaaccagacttcttattttaattcttttttactcgatagaagagtaattagaacataagttaaaacaactctataacatctcatggaaatgcagaccaatgatttagagcactttaatgaagaataataaccgcaaaaagtccatagaaaacaataaacttgattttaattaatttttggaac

SEQ ID NO: 268154 - DNA, 926 bp, Cannabis indica
tccacttaacccgtggtttcgaatcaaaccaaaccgttcttaatggttttgtttggtttggtttgagaaatttattggtcaagtttggtttctgatattcgaaaaaccgttatactggtttggttcaaaaattatgaaaattcgaaccaaaccaattcgtgaacactctcaactttgaggttgcgggccgaatcatgttagtgataacagtgtgtctattgcttcagatgccagagtttgtggtaaatccttgaataggatagtcgacggagacaatgtgactcgggattttttcaaggccgaggaggcgggccgaatcatgccccccaaggacccatgaaggtgctttcgtggaattgccgcggacttggaagtccagcgacaaaaaaagctctcagagccttggttttgagagaagacccggatgtgttatttctgatggaaacgaaattaaataatagacgtatgaatcctatttggcgtagtttgggatttggcggagcatcttgcgttgaagcttcgggcagtgcgggaggtctgtgcctttgttggaaggcgggtgtagatgttcttataagatcggctgagtcaggggtgatctctggggttttttccaatgtcctcaatgggcctgactggacaggtctctttatctatggtcctccggttcgctcggacagagcggtgttttgggaagctagaattatggaaatcctgtcgttagaccatccgtgggttctggttggtgatttgaatattatttctggccaagttgataaatttggggtcgtgcggtcgagcggaggagggccaccatctctctgaattgttgaatgttacgggtggagttgaacttgggtgtacggggaacttcttcacgtggtctaatggtcgaagactgccttctctggtcaaggagcggctgg

SEQ ID NO: 268155 - DNA, 1041 bp, Cannabis indica
ctttctttttgtcatttttctcgatcatgcattgtcatattcatttctctctcttatctatatggtaattaattattatggcttcacacatgcaaaacgcgtttgtattttcaattatttgctacgtacgtatataaggaatcttgtggtggtcccatttttataagcctttttacactatctgaaatttctacttttttttttatttttttttatttttttattttgggctgaatttttttttcaaaaatattgtattttattataaaaaatactgtgtaagttttatactgtgtactgtgttaagttttcacagttattttttagttgtttcactgttattttaattattctatttagttattttacagttgttttataaaaaaaataatatttttataaaaaattccgtgtaatagtaaaattataatttttttttttatcaaaatctaatatttttgtaagaatttctttttataataatcttattgtctgaaagaaaaaattaaatttgttcaagagtagtggtccattaatcttggactgttggacaagttctagctacttgtgatcacattaatacttcttattttctttgagctaaatcattacaaaagagttatacatgataatttttagaaatatatataaagatgaccaaaggtagtactttagtttttttgttatttagttaatcaataaataatcattcttttttacactacaaaaaatacaacttttactggtgtatatgtgcaatgcacgtataattaatttttttttaattaggtttgattaagtgatgttaagtgcaatacacgtatgtttaattttttaattcggtagtgtacttttattttttaacttttaaaatagaatttgagattttaatctgagattttttttagctattgcggttacattggtgtgctctttagatgtgattatatatacgtattttatatgtacaataaaaaaatgaattttattgttatacttattttatattgatctcactatatattagaaaataattttgac

SEQ ID NO: 268156 - DNA, 798 bp, Cannabis indica
ggggattggggttggggaatgttttggccacttactttacaattaatactttttttttacttgacacacatgtacaaagtacaatatttatttagtaaaggcaaacaatatatattttctttgaatggacaattaattttatttaactttcaatttcaacttccaaacacgatactaaattagttaaaacagactctaaattgaacatacaatcatgatataatatagtaattttagtaaaattaatgaatcattacattaattaatcgtttaataaagaaaaaaaaacaaattatttaagtctgcaagcgaattcttatactcttaagtaacgataccaaacaagaaaatacatatttaaagaatattgatgagcttgcatcacataaaaacaaatatgtattctgtctctagactccaattctttcctttattcaaactcagacctcacaattcttatagcctcagttagaaccgattcaactaaactaaacgagagtttagttcaaccttcaatgagacaaacctcaggcatcctaggcaaccaaaccaaccatacgaagacaaacaatatttattttttgaaacaaggcatacaattattttttcgaatggaaggcatacaatatttaattaataggaaaagtaattaattaagatataatagagatcttatatattattatttaaatatttactacaaatcgtgcttccaatactaaaaaaaaaaaaggtgcttccacacttccttccactagcattgaatggtaatgaaaaatgctaatgaaaactttaaag

SEQ ID NO: 268157 - DNA, 849 bp, Cannabis indica
gtatttgctacaattaatgaccgaaggttatattgctaattttgttacattttaggtatattactaaaaattaccctttattttattacacaaaaaaaaaattactaggctctacaatctcaatagaagttattcttcttttgccatagattgattaagtattatgaagtaacgtcttataattagttaacaattttttagaatatttgctaaagtaaaataaataatatttcaatcgaataaaaaattataattaacaattttcttggaactatatatattgtttgttaaatacttaaatataaggtaaagtttatactataccttaaattttatctgttttagcatttttaatcaaattatttttttcataatatttgtgcatttgtagttatttatgactatatatataagtttacagcaaatttaaaattttattgtacgtgcaattttttttttcttttttagtaaaaataatggttaagtctatagtacaccaacctgaaagagtgtttcgatagacctcctatctatttttgcattcagagagttttttcttcataaaataatattttggaatgtttttcaacatttagataaaattctcattttaatttaatattattattaagtagtatattaattaaattttatatatttatctttaatatacaaagacttcaaaaaaaaaatattaattataattctcttttaaattttttatttatatgtcataatttaatgagtatttaacattttcctattgaagttactaaatttattgatatttttggttctaggtatctcctttttaagtagaacttcctactttgttggtagaattaagac

SEQ ID NO: 268158 - DNA, 1344 bp, Cannabis indica
tatcctgcaaaataggccaagtaatggaggacctagcctcgatctggagaacaatagggaggtaatcgagatctaaaccagacaatacattagagataagtaaggattcgggatatgggtcacctgcaagggctaatacatctgcccactgcctcttttgtttgaggtaatcaaccatgctgagagatccttttcttgctgtttggatctttgttctgtattcatccatttttgccttagaatgagctccatatagggcttcaagagcttgccataatgctgctgaagagtcacaccccatgacttcggttgctatcccctctgtcatggacccatacagccaacccatgagcagttggtcatgaactatccactgctcaaattctgggttaacatcgagtccaaatcctggctgtccatctacaccagcaggagcaggaatgaactctgttggccgtggctttgttcctttgagatatccatcgagccgatgtcctctaacaatggcagtcatcattgttttccatagagagaagttattcctgtcaagcttgagtgcaaatggttgattaagtgtgcttccaaactgtggaacaaccacgctggatgttgtgttttcagagactgttgaagactggttggcaccattgctaccagctggagctgaacgattttggggtgtgcttggtgttgatctatcgccagtcgacatcttgccagggccggctctgataccaagtaagaaattatagacaaggggatttgattgaatattcagctcaatgagctcttgccttcattcattccttaaatagtattacaaagatgattctagaaatattacacctcaccaaacgtaataacagaaagagaatattcgtacaaaaggtaataacataaagatatgaaaaatcagaaattgatgattggaaaataatgagctgtctgatattgaattcaggactacaatgacagatggcagagtgatgtgtgaagcaggggctgatgcatattttcatttcttaacatcactctattagaataaacaactgagaaattctcattcactttctctttatctcttcatcttattctttttatctattttatattattctatattattttgtaacatacaaatattaattaggttattgacactacaaaaaatgttactttaatttagtcacaacaaaacttatgactaaaagtaaaaaagttttgaataatcataaattattattcctacgttgtgactaaaaagtccgtgattaaaagtagtagttataaaaatcacaattaatttgttgtgactaaatatatttttagtcacaatacttgttg

SEQ ID NO: 268159 - DNA, 486 bp, Cannabis indica
tatataatataataataaaataataattttaatatttattttagtcaccatcttcccaactttacttctaatactaaaccataaaaagggcaataactatcatttctatccctcctactgtcatcattttgaaattcttcatccatagtcttcttcccaaattaggagtatagattctcagccattgcgcgtgaattttgacataatttaccatcagcaaatgaggagacttctctctcctcaaactaccaactgccaactagactactaccaaagtaaagggacccactcggttaagtctgacacgtggcatagctggttctcaactcatactcccgccaacgactgtctccatatttattaaggaattttgattttatatgtttaaataattaaaaaaatttattataatactaaaaatttaaaccataaaaaaactatattgtttttttcaaaaccccaaaaatacccctctcacaattctct

SEQ ID NO: 268160 - DNA, 823 bp, Cannabis indica
aaaccaaaacgaaaatattgggggttttgccgccatttaccttagtttgtattataatatatacaaagggtatggggttggggacctcgaccccagtcccgaaccccagactaagtctcgtaccttggaccccaacctagacccgaccctagtctcgaaccccagacctagccccgaaccttgaacctggccccaaaccctgacacaacactggaccccgaatcctgaaccctaacccgaccttgaacccaagtcccatccctaaactccaaatccagacccgacaccgaacccaaacccaacctcagactcaaaatctaaacctcatacccagaccccgaacctcgacctagtcccaatctcggacttgaaccccgacatgggcccagaccctagacccgaccccagacctggacttggacgggagtcggagttcgggttgaatttattgtaaagataatatttttctcacttattaatacaagttaataacaaatataatattgtattagatactattaatacaatacaataccatacaacataatacaatacaatacaaccaaacaggggcagacctacatagaggcaaggtggggcagtcgctcccctaaaaaaatcagaaaaaaaatatatatgcattttagctagttacaacatatatttataaatgaaagtgatagttacatattactttagtatataatggagtttatgagtctaatcccaaatctagcatgtttactttagtatttacatattactttttgaacctctaccaataaaacttacatttagtgtgaacccaatatttttattgtta

SEQ ID NO: 268161 - DNA, 775 bp, Cannabis indica
tagcaaagattgcacaataattgaaaaagcactgtagcgtgccttagcattagggtgttacaaagtcgttttaatcgacgaggaagagggagtagaggaagaagaaggcgagattctccctccttaagaccggaagcgcaagggaaagatggtggagactgaggttgtgaagaagcccaggaaagtagacactccggctctcagatctgattcagggatcccgtttgaggtggacgagtatactgttcctccgggtatcatcctaaccctcattcctaccgatgaggaaagaacccaactcccgatcgccaagcacaattatgccaccgcagagtacacaaaggggaacgccgaggtggaagccttgaagaagatcctgagggaggctcagaacagttttactcgcagtgtgtacgcggggaacgtttgggatttcaatctggatcccctaactgacttgtttaatcgcttcattggacccaccttggctccctttgcctcagaattaatgagccattttgctgccggcctagtttagctccccatgaagagatacttggcctgtgcttctaccaatcccgtctaccaaatccaggacgtgagcgcggccgtgactgcggtaagttcttatctgtttagaggtattttcaggcttcttttccttttggtgcttgacttcatgcattccttatacatatattttttttttgttgtcaaattgctgcggaacctggtcgtctttcgaagactcttatcgaccatgggtacaccatgt

SEQ ID NO: 268162 - DNA, 967 bp, Cannabis indica
tgtaaacccatttgcaaccaataacatgttgcccttctggtaaagaaaccacaatccaagtgtcattcttctcaagagcatctatctcattgtccattgcattatcccactcgggtatgccatgtgcttgactaaaaaattcaggctcaaaataactcgaaatggcccaaactgttgcacgaaaagcaggagacaacctgtgataagatagaactttggataaaggataaggtgtagttgatttgccccgtgatgaggaaagcattagcagcaacatagcaatgatattcattcaaataagatggtttgtgtgtatgtcttcctgttctggtaacagcagagggatggtgaacctagtgtgaatcagaaacaataagattaggaacctgttcattgtttataacagaaccaggaacctgctcaggaaaaataactggttcaagactctgtgtagatgtaaaagttggttcacaatcaggttcaggacaaggagaaagagactgagtaagattaggcatagcaaagaaaaaattatcataggcagcaggaagattttcagactttacaaaaggaaaaatgtgttcatagaactgaacatctctagaatagaatatctggtttgtgttcaaatcaaggagtttgtaggctttcctggtggataaccaagaaagatgcaagaaatggctctaggttgaaattttgttctagattggctcaaggtagaggcataaacaaggcaaccaaaagcttttaaatgagcataactaggtggcttacagtgaacaatagcaaagggtgacttgtttttcaaattaggggtaggtgtcctattaatcaaataggttgcagtggcaatacagtccccccaatagcataagggaacatgagattgaaataagagagccctagcaacattaagaagatgttggtgctttctttcaactacagaattttgctgtggtctttg

SEQ ID NO: 268163 - DNA, 581 bp, Cannabis indica
agggaattctggtggggtgatacgggcgacaagagagttatccacacagttgcttgggaaagacaatgcaagccaaagactcgtggaggattgggtttccggactacgaaagacacaaaaacggctttcttaatgaagtgggcttggaaactcctcgtggaggacactagtctctggaaacaggttatgaataccaaatatataaggaacaatgaattccttgacatcgaagctcaaccctcggacttaattatatggaaagcaatcctcaacgcaagacaattgtaatatccgctaattccgaaagggtatttttgtaattttatttagctgagagtatttttattatgttacatatttatggatttaaatatgtatgggattattttttatgatgatataatatttaattttattggcatgtgcataatgcctaatagatatatatgtctggatattgttatatgggtatattattattattattattaacgtattattattattattattatcaatattattactattattaacattaacgtatatgcgatatatatacacacgaacggaacacgaac

SEQ ID NO: 268164 - DNA, 781 bp, Cannabis indica
gtttatattttttcatgtcatttatcaaaaattcaaaacataattctaattgaaatattattatttttattttacctaatcttaactgaaattgaaatagaatataaattaatagatgagagcttttttcagtttaagcactatttgggttagaaaccttagctctctcttcctctctcattttggccctgcagcaataattggtgtgattgagaacatgtccacactaatcaagtgtgatacttatgacattatcgaagattgtgaatagaactgttacaaattttaaagtcagtgaaattcatgcttaacacttaatcatactctgctacagaaaaaatttgagagttaaaatagaaggagtcttataattttattgcgttcccaatataaggaaatacctaacttaatgtgtttatttatcgttttaaaaaagtatgttttagattgttgataattagaattaattatcaacatacatgaaattaataagatcttagtaaagtatgtatcaacaattctataatctcttggaagagtaaaaagaagcaaacactatcaagatccttaaacaaagtagaatatagagctatggttaacacaacaacatgtgaaataatttgactattgacaatacttaaagaattgaaggttgagcacatgtgtaacgaccaccttaataaattggattagaaaaggcaattagcacaaattattattatttatgaatttaattattttggaccccaataatttaaaaataaatattagagttgtaatt

SEQ ID NO: 268165 - DNA, 885 bp, Cannabis indica
ccaaactatatcaactattaaaatgagtcccttgtgcaatatattattcattttaaagtatattgatatagcactaacgccatgttaatgcatcaaaacttccaaacaaaaaatatatatttgtatgtttagcaacaataaagttaattttggttagatttagttatttaaataaactatttctcagtgtcaaaaattaaaaaaataaacaaataaataaactatttctcaaattgcctttatgcatgtggttttataaccatattagtaaatccttgattacaaaagtaggtttttcagtaagatttatatatttatataaagaaaagtataatgtgatgtgatgaggtgatacattctatatttatttttaattatttatctattttattagaattttagtatatttgtattttctttgattttcaataatttttatttgtgatttttgctaaatataaataattaaaaaaggggcaaaaattttataaaatcaataattcaggagaaaggaaaattatttctatgaaaacaataatttaggagaaaataaaagtatttgtcctttataataatagtaataaccactacaaaaaatcttacttttagtcacaacaaaacttgtgactaaaagtgaaaaatttgtgactaattataaattgtgatttctatgttgtgactaagaggtccgtgaataaaagtattagttacaaaaattacaatttgttgtgactaaatgtatttttagttataatacttgttgtgactaaaactaaattagtgacaacttgtaacaaaatactatgttttagtcacaagtaatattttgttgtgactaaaagtcacatttagtcaaaaaaaaaactatgttgtgactaaaaagtt

SEQ ID NO: 268166 - DNA, 2904 bp, Cannabis indica
agacccaggcccgaacccggaactagagccagtctcgaacaccactcgagacagaaacccggacatgaacctcgccccgaaccttacctcgtgacttgaaaccggaactgaaactagaagcggatcaggaccttggaacaggaccaggagcaggacatggacccagacccaaaactgtaaccagaccaggatccagactcggacacaaacccacactgggattgggtccaaaacctgaatccaaaccctaaccgagactgaggacccaaacccaaacctaaactcagactcgaacattgaacacgactcaggacccagaacttggatcgagacctagaattggaccccaatctcagtcctggacctagacccagacccagacttgggacatgaactgaaaccagacagggacccgtgattgggattcagatgttgtcccgggatcagagaaatggggcttggacaagacccatagtcgatgtctttatgtgggacttggaccaggagccaaaactggactaggacctggacccagacccagactctgaacccaaaaccgaaacttaaaccagaacgtgaccaggaccctgaataggatcaggaccgtgaccaggaccttgacctacaccggcacccagaactagaacgaacccagccctggaacttgagctcggacccagtctcggacccggtcccggacccagactaggactgagacttgaacccgaactcgggactcgatcccatacccagaccaagcccctgacctaaattggtattcagacctggacatggacacgaacctagaccaagacccggacccgaataccgacccagaccaagaccgggatcaaaacacgagacctggactaggatccaaacgcaaacccagacctgaacctgggacccgaacccaggacctggacccagatcaagatctgaaaaacatgtacccggactcggaataagacttggaccccaaccccaaccttgacccaaacccggacctagaaccaaatccagacccgaaatcagaacaaaaactgtgactaggactaggacgtgacaccagaacctaacccaaaccataacccaaactcaaactcggaattgcaactagaacttgaaccggagtaggactagactcgaacccaaacccaaataaaaaccaaatcgagacccaaacttgaacctcgactaggtaccaacacgggcaacgaaactagtcccagtccgtgtctgggtccgagtcctaatctatgtccgtgtccgtgtcttgcgttcgagtccgagtcccaagttcgaggccaagttttggtacgagtacgactctgggtctgagtccggctctgggtgtgggtctgggtctgggtttcgatctgggtctaggtttgggtctttgtcttggtctgggtctggatctgggttctggtacgggtctaggttctggtccaggtcccgggtcacgggtcctgggttccaagttctgagcgcaggtcttggcgcaagtctgggtccgagttcgggtcttggtccgagtatcgatcctagtctgggtccgagtatcaatcctagtctgggtgtgggtccgtgttcggttctgcatctagatctggttctgggtcaaggtctaattccttttccaaggtcctgaatccagttcttgttctgattttgggtcctggtacaattccaagatccatacatcgactacgggttgggtccaagccctgggtcgtgggtcaaaatacagatcccaatctggggtcccggtctcgttccgatttagatcctaggtcccagtctgtgtccatgtccgggtgcgggtgtgggatcgagactggggtcggctcttgggtcccagtcctgggtcttgattctggttctaatttcagttttgggtccccaatctaggtttgggacctaggtccaggtctgagtctccaatcccgatctgggtcctgagtctgggtctggtccaagtctgtgtttgggtttgggtttgtgtcccaagtcccgatccgagttttgattcgggtctgggtcagggtcctagtcagattctaattcaaggactgagagcggaaactaggtccctggtcttgtttccgggtcgcgatctgctttcggttccgcttctagtttgggatcacgggatacgggtccaagtctgggtccgggtttgggtctgagtctggatctaagtttgagtccgggtataggtccaaatccaaacatcgactatggtttaggtcgaagccacgagtccatattagggtccagtctcgagtcctagtctagttccactttgggtcccaggtcgggtcctaggtcccagtccaggtccatgtttgtgttcaggtcctagtccttgttcttatatcgattctgtgtccaggttcgggttcgggtcggggtctaggtctaggtctaagtcctggtccgagtctaggattgggtctggttccaagtttggatcccggtgtgggtctaggtttgggtccatgtccgagtccaagtcttgggtacgggtcaaggttttggtcttggtctcggtccggatacaggtgccaagtttcgatcctggtctgggtatgggtctaggattgggttcgattccaggtttgtatccagatccatgtctaggtccgcgtctaggtttgggatcgggtcccaggttcaggtccaactcgatcccgaacccagaaccagaatcggaccaggactgggactagaacccaggcatggactgtaacaaaacccaaacctaaaccaaaactcaaaccaaaacccataccacgacttggacccagaccgagaccttagacctgggacctaaaccaagactcggacctggacccagaccgagatgcagacccagacccagacccaaaaactattgcc

SEQ ID NO: 268167 - DNA, 1070 bp, Cannabis indica
gaaaatattgaatataatgcattaagttccaattcttaagatttaagaaagcttttcactccaatgagatgacatgcttgaagagacttgcaagcccaaacaaatggaaaaagaataattcatataaatatacatatatgatgaggaattattggatagcaagagaaaaaaagaaaaaattaatagcaataatagatttaaaatatccccacaaaaaagaaaaatatctacaataaaatcaattgtatttacattacaatccgtatcgttaaaccaaaacactaatctagcttattttgtctccttccctataactaatacttaatcatagacaaaattagaagaaacatatatttacactagctagaattgatagacattaaaaaaaggacagctacgaaaactctcaaaccccaaactaaagtttgaattgtttgctatggtttagcttacgccacagtagatcaaacatccaacctcattttgatgatggaaagacacaaataaaatattgtatacttttaaaaaatgaaattaaataaaaaataaaagaaattgcgctcaagtttacccatcacgccacgtgtcaacagcccaccaaacaaaatttgccaagtgtctcttcaagataaagtagatgtatagacaaaagtcattgggcgtcgtaggtcacctctctcttacccgtcaccaccccatcactaaatgacttctttattcaacattgctaaaaaatttaatgaagaaagtacctaattgtgtgtataagcccatactcataaaccccccaaaataaatggtaatttaaatttaatttaaagaaacttacaaaaagaagacaacggagactgcacctaagactacttgaaggtgcgtccggacgacattgatccttattttgaggacactgactcgagagttggtttgactgaggaactcaaaaaaatttctcttatgatagcggacctaactaagattttcaagactggaacaaacttaatggagcccttaagtgagtcgcttaatggcttgcctcaggagaaatcaataatttttcttggtcgcatgag

SEQ ID NO: 268168 - DNA, 1486 bp, Cannabis indica
  modified_base (32)..(32): a, c, t, g, unknown or other
tcgttttacaaaaaaaaaaaaaaaaaaaaaanaaaaaaaaaaaaaactaagaataaaatcaaatgaaaaagattgtggcatcatagttaatcttaaaaacacctatattcagtttactcgacctctcaaaagacacaacagtagatatgttgcaataggttcattaaacttgtattcgtgattattgtgcaaggtacgtaaatgcaccactaataatctcttcactcgcagagaactcgttattctcaaccactaacagcaattttttcgcaaagcatcgaagaataaaaagacaaaccaaccacgaattataaaataaaacaaaaccgtgcatgagaacaagactaatcatagtaacctaaacaaaagatactcaaaagtatgtcgtagagacaagaaaaattacagtagcaaaaatataaattccaaacaaggcatgcctaaacaaagaaagggacgtagagacaaacaacctcaagcgactaattaaggatttagaaaaatttataaaatattttaaataagtaaaatacaataaaatcgtataactacagaaaattatctaagattacagttaaagtataaagtgaaatcttacataaaatatagggatacatgattcttctatttattctagaaaaaaaaaaaaaaatccgcctatgaatgagagtgcacggtacactcccgttttttttaaaaaaaaatgttcagtagaattttaaacaatgatttgatttgaaaatattagccattgtgcatatttttctttttttcttccttaatttttgtcgaacgaattaaatgaaagagaaaggggacacagagggatcgattttcttgcttttcaactaaccttttttcgaactatattatatattattgataagcgcaatataaactcatgtagctgagttagaacatctgaatcgcttctcacttctcacttgacccttccatcggttgaaggaacacacattcgtacaaatattaggacataaacattaatgggtggaaatctaggaaaattccacttagattctattatatatataatctgaaacaccctattcgtcatttaatttattagctttttaattacttcatgtaacattaaatttcaaataagatccttttcaaaaaaacaattgcaaataagatgaataactttagtatatatagtatttaattgtttttaatctccactaatagtatattatcaatcttatttggttttccgaattggatcatccgttcaatagtaatactagtctaggagtcaccattctctattaatttctttttcttctatattttagaagcattgttaacaccaataaaattttattaaagtaaaatatgtgtattatttaatattaaattacctcaataataatattactagtacaccgtaaatactttttaacatttttaaaaagtatttttttaattaattaaagaaaatttaatataaatacatatacataca

SEQ ID NO: 268169 - DNA, 693 bp, Cannabis indica
gtgccaatttgtaacatcgtaccatgtcgtacccaaacctttatatttttttggtacctatagtcgtgctcgtgccttccaagttcgtgccgtgtcaaaaaaacccaactcacatttacaacactattcatacataaatcaatattttttatatatattttgaaaaaggaagatttcattctctgtaccatgagtaattttcatcttaattatatccttttttatttttaatacattattaaattaaaatgaaagtgagaaaataattgtactggtggccttttagggaccaacatcaacatatattaattactgacaaagactaattagatctatccacattccacccatgcatatataatttcatctattattaattaatccgaaccctatctatattgtttgtgttgaaaattaatagtactaaacaaattattaaaaatgaaagtgacatagtaattgtggtggccttttagggaccaacattaacatgcatattaattactattattaattactgacaaacactaatttgatatccacattccaccacccatgcagattattttcttaatttttaacaaaagaaaaataaaacttcattaagcaatcaaatcggtcatcattatatatgaatgaatgtctctaaaagagcattactcactcgaataattatttaataaactttaagga

SEQ ID NO: 268170 - DNA, 892 bp, Cannabis indica
aagggtacccaaatagataagcttccgaaatccatcggtaagcttcagtatctacgtactttgaatctctggaataccctcgtgcatgagctgccaatggagataaataagctttgcaatcttcataatctttttgtttgtcgtatgaaggacttacctgagaggccaggtgatttgtttggggtgaagatacaagaaggatttggtaatttggagaatctagaaatgctagaatttgttgaattgcaagatgacatagttggtttcacaaaggaattggagaatttgagcaagttgaagaatttgggtgtgactaatgtgactaaagaatcttctaaagctatttgtgctgttgtagcgaagaagttgagtcaccttgaatatttgtatttgtatactaaagatgctgatgggtttctagatttggaaccaatttcatcatctcctcctcttttgttggagtcaattgaattgtctggtcgattaaacaagttcccgcattgggttttagatctcactaatttagagtcgttcattttatgtagttcaaaattgacagtgaatccacttaaatatctgaaagacttgcccaatctaatgtggcttcgattgtatgatcattcatatgaaggagaggaactacactttgaggaaggtggttttccaaagctcaatgagctctgtttaataaatttgccagagttgaagatgatgaagatagatagaggaacattgcctcttcttacagcactgatcattagttcttgcccactaatggagcagcttccatctggtgttcaatatctaacaaagctaaaaagcttttctagcaggaacatgtctgtggattttataaatggggtgcatcgaaatgagggcccagattactaca

SEQ ID NO: 268171 - DNA, 918 bp, Cannabis indica
ggccacttgagctagtctcaaatgatttttttattacatatggttggtagttgaggttttccttctataaatattgagcacttaaaagagcattgtatcttaatgaaaaacgggtacacttttcttaggacttcattacctaaactgagaagaagagcactatgtgctttagtttcaatctccttcttctcatcttcaatctccttaagactctcttcattaattgcttatgaaattccattgtggacaagcaataccttcatcttgaccctccataatccgaaatcatttgttccattgaacttgtcaatctcaaatcttgttgcagccatcttcttgatgtcttcaaatctaaatcttaatcatgagttaatcccttgctctaacaccacttgttgtgatcgattatcacctttaacaatcaagtttgaatgctcaaagatgagctgcacatggacaacatcaacaagaagaaatgcaacagcaaaaaccagctagacaaagagattgaacaatgtttgattttattgatgaatggaattcattacattgagagagaaagagagaattaaatctgtacaaagttgtatttgagatgaattgaactctatctatttataccattcgaactaaaaacagaaaggtataacttgtaactaaccaagacagttaattaggggtgtgcagaaaatcatccattctaattacaaccgaccgatccagtctcaatcgattcaatagaatcggatccaattataattagatcgaatctgatgtaaattttgaaaattcaatcgaatcggatcggttgttggataggacattcgatccgatggataaccgaccaaatcgatccaattatcatccaattatatttatatatttttaaaatatatttataattttaaaaatatatat

SEQ ID NO: 268172 - DNA, 573 bp, Cannabis indica
ctttctaaataaatttattagttttttttttttttttggaagaaataacaacttcattgaatttagtatttgaaatacagaatgtccaacatagttgctggagtgttaaacacacaaatgctacgttcagaaaagatcgagacatcctaacaacatgtgctaggtggtttgctgaacgtttaacaaaatgaatttcaacaaaaggcagagataacaataaaaattgatagtcttaaactaagttcccaaataaagaagaaagagaaatgtgactacgaatagcttgaatagagactaaactgttggattctagttcaacattttgtcatccatgtcttttgacctagcttaatgctttgtaatacccataatctcggcaactaacaacttcgggagaaaaagtctcggtacagcaatcggctttggcatcgataagtattcctgagtcgtttcttgcaaccataccgtatccaaacttgttgtcactagcaaacgtagtagcatcaatatttatcttaattgaatttgcaccaagtgtagtccatagctcagcctattatcactattgcaaaa

SEQ ID NO: 268173 - DNA, 1066 bp, Cannabis indica
ttagcccagtacacaaggacacacatgctctgcacgatagcgtatcgtgggggataacctttgacatcgtacatgaaaaagcctaatcactgagtccgtagcctgacacgcttgggctgaactccgcgggtcaaaaggcgtaccccggactggtgcatcctcgaagtgctttggtcgggtttgagaagatccatattcctcgcgggagcaaacaatctcgacttctgaatggaatgaggctctagcttagggatacccttcgtatggtcaatcagtcgggaagacttctttcacagagaccttttttgcgagattaatgccttcgtcctctcagagtgataagtgaatcatttgggcggcttaacgactttttgaccttctttgattaatatccacgtgtcgtgcttacgaaaaatgcagataacaattacccctaagttctgggacattccatggttcgggagcttgtagtatctcctcttgaaaagttttgggcatgtgggagttatggtgagttctttaatgcactacgtcatcagtcgccaaactaaggtgtcatgattcgggaggcatattttcttctatctttctgtcaggattttaaatgctgacttttgggttctgtgcgcgtgttaggcgcgtgttttgtgagaagctcaaaacagcgacgattggatttgagtcgactctccatttgttgattgctttctacgatgcgtgtaatgatgggagtcgactgttggaaagtgagacaccctcttgacttctcatttccatccgtcggatgccctcttgacgatcaattcgaaccgttcgctttctgtggaaggtgcctctacaacataattgattgttttagggtgagaaaaagctcacttgtgcttgttggattaaaaatcctatgtgggcacatatgtataatgtatatgctattataaagtgtgatacaaaattaagtgaccaattatgttatgggtatcaaaagggtattaaattgtcatggaaataatgtgtagataccataagttaatttataatttgttgaggggccaaattataaataccc

SEQ ID NO: 268174 - DNA, 880 bp, Cannabis indica
tgcttggcggttgaaacggctttagatcttaaggctaattttattattgtggagaatgattcgagtgtggttatcaatgctcttattgggaaggaatctcaatgggtgcttgagaattacatctccttttgtaatagatcttctcctttattttctagttgtgtattttcttatgttagtcgaacctgtaattttgcggcccataacgtggccaagtgggcgttcacccacaagatatttgatgttattccggtttcctctataccggtcgactttttatgtaatgaccgccaggtctaactattttcatcattaatatatatattgcttcgctgttgttttgaaagtataatacataaaatggtgttatatattttcatagttcttagggtaataatagcacccaatagtaactatacctaattattctttcatttttacttggcacggtgagaccatttattaattgctatttggctcatgacctactcaatatcagagatgaagaaatttattatttttggttctaattaaattctgagtacttatttcaggtacttaatcagtattcagtactgtgtttggaagcactgaattatacagaacttttgtttatgcacataaatagaaaaaacaaataaaaatgtctttctcaattttattacttgtaatagaatgcaaattgacccttttctaaaaaataataataaaaatagagatagttaatatattgaatacactatctatgagtggtaggttgggccaattcttatgtctcttgaaattttgagattgatttgattatagtgggtcaaatgatcaagatgaatcaaagttaggccccaatcaatgataacattattattttaatttacttata

SEQ ID NO: 268175 - DNA, 529 bp, Cannabis indica
tatttaataataataaagaaaaaagtagttcaacataattattaaattaaaatatattaggtgttgggtgatatcaatttatttgcggatgctagcattaaagatcaagactcgaagattagccttggggaggtggtgatgcatgcgctaggaagttcctttgctcggcgacttccctaacgacagtggggttgctcctcatgtggcggaggcggctactttgttgcagggcctacttctttgtctcaggcttggttatatgaggcttaattgcctcctattggtgcaagttatctctaataatgataagaggtctattgaatttggtacaattgtacatgacattaaacataatgttatgactcattctctaaattatattactttgtctttagatttctctcaagtttagtggcctaatttccctcccggtctccaactttaattattttgtattatgtgtaactctattagcattgtaccttttcaatagaagattcgatccgataattaataacactaataacaa

SEQ ID NO: 268176 - DNA, 101 bp, Cannabis indica
gtagatcaataactgatgagttcttgagaaggacttaagaagatatgacttagtgtaaaggtggcatgaatgaagtataatacttgagagagagagagaga

SEQ ID NO: 268177 - DNA, 929 bp, Cannabis indica
tattatttattttaaatatatatttttaatatataacaaataagtacatgtatttttattacaaataaaaaatttatttttatctaaaaaaaaatgtatttttattacaaataaatatattattgagttttaattaaatatatattttttttaaaagttagattgcacaaactttatttttaatcgtatagcttttctataaaattttcaataaattatttttaaaaatgtttatcaaatacttttttattataatttttttaaaaaataatttttaaatttttcaaaaactgtactaaactgactcatatcatattcataccattttgaacaaatataaatatttattttcttcatatggttttcattacatttattaattgcaccaatacttttagtaggtatatgataattattgatagtggtatatatcctaacacaaggttaggattagaggaaggaatgttcttgctatgattttttttttttttttttttgtaaggttcttgctatgatcttaataaatattatcttaagtcaataaaataaataaaaatcttatctaagagtaggtgaatcaattatgattgattttatctaaacttacctttccctattttttgcaaaaactaagcattaatttatatccactataaaattaatgtacctaacaattgttttttaatttttttttggtaaggtcaataaatattgttagtatttcctcaataaattaaatgcacccatttaaatgaatactataattagttactaatcatttattttacaaatcttataactatacgttaatatatcttcagcctcttgtttaaaaataaacaaaattaaagtttgtttaactttaatttaagttgggctcacctgactttattagtaccaaaaattacagtatgattatattttataag

SEQ ID NO: 268178 - DNA, 942 bp, Cannabis indica
ccttatataccaactatcatgtatgttagtacgtataactgttacaagcttttaagaatgatttattgactttaattcaatggcattttgctacaacattactcatgaaatcgttgactttaattatcatataatctatctcttttttgttttaatatatagtttagtgtattaattgcatatatcagttattgattaccaaagcttcatatatataaagcaaaagcccgatcaccacatcaacgacctattaatattattcttaacattgcgttaaagaaaaattctcattacagcttttcttaatatgtacgaactgaaaagtataatatataaatatatttatatatattgtccatatgccatgtttctagatttaattattaacaatacgtgtacattatgtacataaattatatctcgtaaccgacgatgaagctcaaactacgaaactgatcataattgaggtcaatattgtgatactaatcgtatcgaacattatttattatcatatatgtaccactaccatatttctacacaattattctttcttttaaatatatgtatttataaaaaagaaaaagaaacactctatatatatacttcgacttcaaaactaaatataaattttgcataaaattaatctttttatggagttttaaatttctttagtaatgaaaaggattgcaaactattcgacctaaaaatcaattaaagttcatttagtttgacttaggcatagattaaatttatacgtatatataaattaaattatttgagtacatgttaataaaagttcaagtgtaaaaatttaacatataaattataagctaattaggatttttgtcccctgaactttgacatgtaccaaatcatgtccctgaacttttaaggtcgttaaaaatgcccctgaactatagagattgttggatttaaggactt

SEQ ID NO: 268179 - DNA, 920 bp, Cannabis indica
ggtgaaagggtgtgttaaacatgatatttcttttgctactttaactagtgaacgcctaaagaagatgcttgctcaaaaaagctccaatagacacgcctgcttttaactatagactctagccatttctagctatatatataacaaaagttctttgctggaacccaaaagtttctatataaccaaagttcattttgaatatttttgacaacccaaaatgggagtgggagattacattataaggattagttcaatatttagcacataatatgttaaaaatgttataagatttggacattgtagacttgtagtatagttagaatagtcatcccataaaaatacacacattaacgaaattggcttgtacctcatttgaatccatcttttttttttaagtcatattttgtttttgcttttcaaaatagctgtttccagaattagagctcggttttcttccttaaatacatatatgttctatacatattatataaatcgaggctgtcacttatcacatattgagacaaaattaaggaaaatattgacataaaaaattattagaaatggtaagtgtagcaaaattatatatatttttctgaacaattaaactttggaatttttcttttttcttttttttttttttatagaaatagaaactttattagtaagaaatttcaactattacaatagataataagaactggataaaaacaaaattacaagcgatcgtagccttactttaaaaatggaattattcataggaaatgcaaaatattatattttcattttcagaataaattagacaccatagatgatgacttatatagtcatataattagaatttggaaagtctacgtagagctcacgcaaagggccaaaaagaaaaaacttctctctcatatctacacttgaccattttatcacta

SEQ ID NO: 268180 - DNA, 655 bp, Cannabis indica
aaccattaatcaaatattgatataaaggaagaaataaagtcattcatttctgttgatatggatgtatgcatgcaataggtttatctacttatataaatatatatttatataattacttgcttgcatatttttcttgttatatatagttcttgttaagctttaattatgaaaggaaacctctgttttcacctgcggtggagagtttcttgtttggactttcccaacaatgttattgatgatataaaaacataacatgtgtatgaaacatatagtgctcatgtatatgcatgtgcctctttaatgtaaaagaaattgtcagtgactttccataacttgtatttagctttttcttattgattgttatatgaagtgacaatgactctattatatatataaatacatatatgtatatcaatcaaagtagcacaaacatgaccaaggaaagaacacagatggagcttttcattataattaagccaatgggggataatattttaatggtactcgtatgcttatccaaccaaagaagcttcagatgaatgctcttgcttcagaaaaaaaaatacactgctaaatgaatttgaaaggctccgaaagtacagctatacatataactatccactatgaagaaaaaaaaacctatgacctggtttat

SEQ ID NO: 268181 - DNA, 871 bp, Cannabis indica
acaggggacaaaattaggtacaatagtttaaaaaaagaggtaaaaatgaatagaattttaaaaagaaaggtaaaataaaagaggacaatataaaagggtatagagtgtaattcctctatacttaaggccacctgagtatatgtgcaattgaagttaaactattattataataaatatgatatatttttatatataggaaaaaaaaatctaaattagtgtatgacaaattccttctaatgtggctatgatcatacgtgttgattgattttataacaaaaataaaattatagccaaacacaaaatcatggtataattatatcaaagtagaggaatggagaattatttcatcgcaatgtatatcccagtattccaccctatccttcctaatgaatcaatcttttcttttttctttccttcttatccattcaaacatattgccttatatctggtctcgtatcactcttataatgggtgaagtagtctttttgctcttttgcttttgtctttagctaagataattgagtctctcactaaatgaaatgatatattatatgtacttattttcttgaaatgttttagctagatatttacaattcgatcgcattgataaattttattttaatacagttaaatggttccttttgatatgtttaattccctcacaaatttgactccctattgttttttttttccttcctcaaaacgtgctttattaatttccaatcagttttcaaatagatagagatgtatctacattcaatcaagttattacaccttgcggaaaaaaaaaatcaagttattaattgatacgtaccataaaatagcgcagtactcagttactcgcttaggacagattattattattattatt

SEQ ID NO: 268182 - DNA, 698 bp, Cannabis indica
aaaaattactaattaaccaatttttaaatatttgtgttgcaactaattagattttcagttaacttttttgcttttaaaattaaaattgtaaagtatttatgtacaaaaattatacattaaggatttatacagcaaagtatatatccttaactaaaaattaacgtggtaatatttttttaaaatgcgttttataagtacttttttaatttatacagtgagtcgctttatgcttctaatatatatactatttattagaaagataaaaaccaaagaaattaaattacatgactagtaatctagttgttaggtgcagctacaaattcaaatgaatgtacatattactgtaacttataagtcaatattggaatctagacccaaaatatcagaatcttcactaaaattttaaaattttcaattacaggtctttgaaagtgctctctctccaagaatttggagtaactagacaatgacctttcttaataagatataaatatttgtttttataatatattttctaagtctttaattagcccataatattgttggtactatttataaatagttaattaattataaatacattataattatgtgcatgattgttaagggtcctataaatcaattaaagtttggccaacctcttcatcagaagaataaacgagtacttatcttgccaataaaaaacaaagatatataat

SEQ ID NO: 268183 - DNA, 851 bp, Cannabis indica
cgtaggcttattactgataatattttaatatccttcgagattatgcattatctgaaacagaaaagctcgggtaaagagggagttatggctatcaagcttgacatgagcaaggcatatgatagagttgagtggggatttcttcaggcaacaatgaagaagatggggtttagtgatcagtggatccagttggttatgtgttgtgtcagctcggtctcttaccatattctttcgggtggaaaggaatcgggtcctattgtgccaaagtgaggattaaggcaaggtgatcttttatcacctttattttttttcttttgtgtgcgaaggccctttcaacactaatttcagattttgagaggcgtgggaaacttatgggttgtaaagtagcttgtggagctcctattattacccacatattttttgttgatgatagctatttatattgatgtgctactgagaaggaagccaataatgggatggagcttttccattgctttcagatagcttcagggcagcaggtaaatttgaataagtcctctattttttcagtgctaatactggggtggatgttcgtgtgagaatctgttctatcttgaaggttcaagaggcaagagaggcaagtacttacttgggtcttcccaacattttgggaagaaataataatgttttgctaggattcttaaaagaaaaaatgaggaaaaagatcaagagttgggaggggagattcttatctaaagcaagcaaagagttgctcttgaaaactgtggctcaatccttgcctagttatgctatgaatgtcttcttgcttcctatgaaaattgttaacgaaatggagcagttaatgtgcaaatatt

SEQ ID NO: 268184 - DNA, 669 bp, Cannabis indica
aatgtccatatgaacataatttttcttactttaaattaattttggaatatatcttaatcaagaatgtcaatttaaacgaaacttggggacccacttattacatgaaaatctcctgtccacataaaaaaaaatggatggaaatgggatctcaatgctacactatcaagctttcaaggcttaaaaaaaactttatgctttaattattattagattggtgactttttaatcggattttaatgattttagattttatttaatagttttttattttttttagcataaacacttggataagattttttaaatacttctgtacataaattaatccaatttaattaaaatgatcactaaataataaatatttaattgtgattagatcagattaggtgatattttttaatatccaattggatgttggatagggtattcaaaaattcaatatatttaatattcaatcgaacttattagtattgttatttttttttgaatggaaaatcatactttattaactattaaattcagctaccaacgaatgtagctaatcaactgggacagatcccatgttgaaactgcaatcaggataagataaggaagctctagcaaagttgtgagctaccttattagttgatcgcctaacaaaaaagatagaaacattttgaatttctttca

SEQ ID NO: 268185 - DNA, 684 bp, Cannabis indica
gtgagtgagtgtatatatatatttatcttcttcttcatattatattatatactaggatgatattacatgcattgcatgtataattagttttccttttaattaggtataattagatgatgttaattgcaatacatgtatatttaatttttttttaattaggtaatgtattttttgttttaaaaaaaagaaatagaatttaagatttttatatttgaggattttttttagtaattgcggctatattgatttgccctttgaatgtgattatatatgtttttatatgaacaataaaacacaagtgagatatcgtggtagataacttattttaagcattgtaaatttaaattaattttttatataaaatatctacataattttttcattttatttttatttaaagttaaactaataaaagtaaaatttttgttttgttttgccctctgaattttgacatgtaccaaattatgccccctaaacttttcaggccgttaaaaaatctctctgaactattgaaattgttagatttaaggacttctgaccaatttcattcaattttactaatatgacgattgtctatatactaattcatgccccttgaacttgatatttactaaatcatgtccccgatctttcaaaagtataaaattatgccctctaaattttcatccacatcagactttattt

SEQ ID NO: 268186 - DNA, 612 bp, Cannabis indica
tggaaataatgcaaatctacttagtcccacatatgatgatatcagtgtatggtgtcataattaaattaaataggtactcaaataatggggctgatatttagcatttagagctaggaaggctattattatttccatattcttatttcttagagttaattttgtcaattattctgtattgttagaatactacaggtcagtaacatgtcatgtcagcatcatcacccaacaaaagttgttagtttgttatgcagactcatatatcaataattacatttgtaatattgctacgtacatacccatttatcatgctattcacctcataatttcccaaaattaaatatatccaccaaatataaatgtcactacaacaatacttttccaatcaagcttgagcttaataaataatatcaattgattcaaaaaaaaaaattattaaaaataaatacctatataatacgaaggcaataattgaatgttcatgtttcaaggttagtttttagtaggagaattacctcaaaaaagtatttttaaccctttttttttaatttacggtttgagttgctttggtagttatttcgaattttagttgcgatttaagttgatttattagtt

SEQ ID NO: 268187 - DNA, 1138 bp, Cannabis indica
aatgcattataagaaaaatttaattaatttttttattaattttttttattgcattttaaattttattcaattctattcctattctcattctcatttctattcttatattttcattcctcccaactaaaggccaccctaaattatcatataatatataatatataaaaaagataaaaaagcattatcatataatatatttataaaaacattattataattcgtccactatcatacaaaaagattaatacatatatttatatattgatgaaaccgtgtagaactattctctcattccaaaccaaaccgcgttatatacatatactccaattattttgattttaatggaacatctcttctttcaatgtatacataaattacatatatagtgctttagtgagactaaatttaaagtaatattttatttttgtgtaaagtgtgtttggttttggagatttattatttcaaataaaagatacgggaaaaattaacagcgcacgagactcatgaataaatattttgaaaatgtataaaagttagaacatactgcactaaaatttacagtacaattagatcacttaaaaaaacatttcaatacaaaatttataaggattatttacaacaataacacatccaaacaatttaaaaaaaattataaaaatacaattgcacgaaattttaaatatttttacgatttttaagatattatttacataaaatataattttttgatatatttttatgttgtactcttattatttacataaaattattttgttgttaattttattgttatttgtatactattttttatgttatttttctgttacactataaaaaactgctacttttagtgataattttttagtcacaatataatttttttgtgactaaatgtaacttttagtcacaacaaaatgttacttgtgactaaaacataatatttagttacaaattatcactaatttaattttagtcacaataagtattgtgactaaaaatacatttactcccaagaaattgtaatttttgtaattaatacttttagctatggatataagtcacaaacaacataggaatcataatttataattagtcacaattttttcacttttagtcacacgttttgttgtgactaaaa

SEQ ID NO: 268188 - DNA, 1049 bp, Cannabis indica
atttagtttgactaaaagttattggaatcaaatcaccaataatattaatgattaataacatgctcttctactttgtagtattgatggtttacaattactcactaataaatgaatctagcttcctaatatatttattgatattagttaattaatttatatagaatagctatatatatatatatattttctttacaatcgaccaagagctatatagctaagtatataggtatgtttcaagggctaaaaaatgaaacaaaaaatattatattaattgcccggcatcttggaataataaacgcttaaaagattattaataaatagtatatattataatttatttaaatatatttagtaatagaagtcaatatataaatattaatttgggcttttgttgcaccagtcgcggtcattaaaaagctaaaatgaggtccaaattaaacaaagtgtgtcagctacacagtccaagtaaattatttttttggccacatacattatttgctttcacacattagtaggtaataattaataattaaacttgtttaattaataaattaataaatggtgaaagatcgatgaaagaataaaagctttacgttataatgaccggccatcatcgattgcataacaactaattcatcatttttatatattcatcgtaggactccactcttcatgacatgtatatatatctaatacatcataacacttacatgttcgtcaacctaaaaacctaggtctacatacattaattatatttaccctcattaaataacttgatattaattaattataatgggtaattattattcttttgttgtgtgttttatatttattttaaatggtacaaaacagttcgatctttgtatatatatacttgtgagttactatgtgaattttgattgcgatttaagttgttctgcgagttgctatatggatttccgtaaaaataattttaaaaaaattaaaagttaaaaatgaaaaaaaaaattcattatattaaaaaaattaaaattaagctcatagtattattttgtattattttttaaaaa

SEQ ID NO: 268189 - DNA, 563 bp, Cannabis indica
ttttgattttttggccataatttggttgacgagttttcactgtcaatagtttggccagctcaggcttcgttgtttccttacttacctttattgcaagatgcttagacactcctgttgtcttcaagcatcgagattcacctagagaacactcagttgatcacctccagaagagagccaccagcacccatcgttgaaaaagttgaccagaatagccaaattcctcaggcaagaagagagagtgaccatcttgaagagaatctggcgagcacgcgccaagatggagtaactccatccatcaccccagttggtgaaaatggtctgtcaaggcaaagagtctcgtcaccgataaggcaccctccaccaccaacaccacgagattccagtacctcacgccatcgcctcaaaaaatagaagtgagtatactctgtgagcttaagatcccaaactcaccactatgaagatgagataaatgatctccgctagaagaaccaaaagctagaaactacagtggttggcatgcaaaaggtgttgagtgaaatactcaaaggcaaaatccaagcctc

SEQ ID NO: 268190 - DNA, 667 bp, Cannabis indica
attttaaattttctaatctaatttaatccgcataagtgtagatatatgcactttacggattagattaaattaaatcgtacgaattgaattatatcgactattttataatttaatacttctcctaccagaactctttctaaattagacactaaatcagcaattaatatgtgctacaaaaactatatacgtaccaaatcatgatatggacgtgtctctctcagtagtgacaaagtcgatcggtcgatccatgaccatggtcttagtttgctataataatggttgactgacttccaacaacacaatttgggattgggaaatgggaatatcgattcagtacataatgatttagctcatttctgtttttgaattggttttattaataatatttatttttttaaaaaaatgtttatcatattgtcgtgtgtggatatcacatacattcacactcactcgtttatactttaattttgtggcaaatatatgaatgcaatgatttgacacctcttttttatgtgtcccaaacattccatttccagtattcaatttatttaacgtataaaataaggaaagcttgagcagttcaactatatctagtaagtaatcatatgtctggccgtgtaatatgatatacagtagaacctctatctaagaatacacttgggactaa

SEQ ID NO: 268191 - DNA, 1051 bp, Cannabis indica
ttttttttgcttgacaaccacattaacattttattagccacgtgtaagcatggtaaattgttcatgagatttttttcttcaaacttgagatctactcttttcgagaagaggtatgaaactaatagattatgtctataatcacctcaaaaaaaaaattgacaactaaaaaatttaataaaatacaatttaatatttataatagcttaagaggtaaaaattctattacagaaatgcatataaaaatgggagactgtatgctattaattaatatttggatattattacagcaattgtactttgaaaaaaatatataaaaatttaatatattctttaatgaacatgaactttcacaaagcaaaccttttgacaaattaaattgggaaatgaatacataatattaaaaagagatataatgccctagataaaaaacatattggcaagaatattggtcaaattctggattttttttggtaaggaatcttgaataaaagttttgtttgtagtttcaagacttgtttctttctatttatagattatacatgttatatttttggttaatctataaatcttctactgttgtagcctttgagaagtgttacatcaccaaaaaaataaaaataaaaattaagattctaaaaaagggaattctctattgaaagtagtaaaaacagcctagagaatctaataacaccattattattagtgaccaatcaatagtcattctttgccatatatatacacttgtatatagtcacaatattagtaatgacacaattagaaaaatttacttcttgctagctacctcatttctttaaacaatttcttgatgtaaccagtagtgcattgattaatttaacaaaatttaagaatttagagaaaaaaaaatacaaacataacaatctaatgaaaaattaggattatataaatttttggaacttataataaatactagatattacgtgtcaagtcacgtatgttaattttattttagttttagttttttttaatatcataattttaaaattaataacattcaatgtagtgataatta

SEQ ID NO: 268192 - DNA, 544 bp, Cannabis indica
tcggtttggtcagtttcttggattttttgctcacccctaattattactagcaaaaacacatataatataacccaaatgagaagttgaaatcatgtttgagaagaaaattgaaatccaacaatgtataaatagaagaaaaaatgcaaaagagatgaaaggggaacatgtacagaagatgaagagtgttggattgagacttttcccgagcttgagcggtagcagaagatggtggagggttatcaaatgatgtcgtcgacaacgatctcagaaaaaagggggtcttgaggagcaaagtgtttcagaaaatctcaaaagaagatagaaacatagtctcagaagagagaaatcttgattaaggagaagataaagaagagaagaggaggttggggttgggtcactgcctgattaagaagaggagaaagagaatggggctcgagtgatcgattttgaagaggaggaaagggactcgaagaggtcggggttgggtcgcttatttttccagagaaattttgaagaggagagagattagggaagtgtgaacagt

SEQ ID NO: 268193 - DNA, 1256 bp, Cannabis indica
ctaagaccatttaaataaaaatataaaagaacaaaaaaaaatactcattaattagacagaaaattacaaaagtaaaaaattaaataaacttttcatataatgtttatttgaatagaattattttttaaaatatgtgaaataatatctaacattatatttagactaattaaaaatatttattttcctcctctaaatttgatatatatacacaccaaattataattctgaaatttttacagacttttaaaattcaaaccatatgaaattattagaattaaagattttcgatcgccaactcagtttaattttattaacagatgtctattatgggataatataccatatgaaataaatggtaaaaatattaaattaacatataaaaacatgtattattccacttattactaattgaatttacaataaaattaattaattatattataattatgtaacaattcaaatatcatatcatttgccgtatagcaatacttatttgtttattttaataataatatcaatatctaccaagataaaattaatttgaattaattttttagtataattttgctaatcatgaaaaggcttacaaatttaacacaaaaatggtataattaattttttttcttaattggaaaagtagcatgccggctctgcttaattggaagcaatttcttttctttatttaattattaattaattattatgccatcttataataatttggcttgaattattattatgctatctttatttacaagtatattcttttttattatattatttgtttatatgtcaacatgtgattacgtatctgatgcattttttttcaaaatatttaattctacgtataaatataaaactattatttgaccattataataaactaaattaattaattggtcagcattacacataacaatataataatgaattatgctaaaattaattattaatttcaaacattaataaaatatgaaaactcatgggtttgaacgtaggccggttagaggagcagtcttgttgtattatattagtgaaacacataccagggctgtttattagatcagattcaatatttttaaacttatacagattttatataattatatattagatattaaattttactatatgacttaatctaattaattttattcatctagtcgatccaacatttataaaatgttagattggatcggtatcgttcgtttgatgtattttatgtatatttattaatttaatttaaatttattcaa

SEQ ID NO: 268194 - DNA, 1063 bp, Cannabis indica
ttcaaataacatagaaaaaacctatcaaattacataaattagtatacgtgcctcgcacgtaatttttgctagtatatatatatatatatattcatcaaacggttacctgaatcatttgtttaataattgaatacatatttataggataataatgatgaacactgccaaggccaaggctaagttggatgcaatgggtaacttcatgcatttatttatttttttaccttttactgttcttcatcttttaattaatattattaacatatatatgtcattaatttgtttaataatcgagtatatatatataggatgatgatggtaacggtgaacactgccaaggcttgatgatgaagagtaatattatagtattgattctgaaatggtaataaattttcattaaacatttgttgctttctttgtttgtttagaattagagttgaaaattaaatggttctggtttgcttgtttttgggcagaagaagatttgtggatcaaaaagggaaaagtaaattgatcaaaaaaatggatagaaatgagattgaagagtaaacatttgtacatttgtgttctcttattaattaattgtcctatatatataacacatttcaaaagtttgtttaaagtcttttagtttgatattctcttaaatacattctacttaatttaataggaagggatcttctaaatcatcatcttaattaatattactccttataatataatataatatttgtttgaggcttggttccttctctaccaaccaagcctttctactttttcttagttttgaaatgaataaataaataaatgagctttattatataataaaaaaaaaaagaaaagcattataggtctctaaaagccagcattattaattctatttctttcatacattaaaaaaaaaaaaaaagcacaatataatttttttttgattaaatgtgagtatttttagttacaataaaaaaataacttaataactaaaatatagtatttagatacaaattatacactaatttaatttaattattgtgactaataatatatttagtcacaacaaaattgt

SEQ ID NO: 268195 - DNA, 935 bp, Cannabis indica
gacatttcttgtagtgacaataatgataatttataattagtcacaactttttttttttatctttagtcacaaattttgttgtgactaaaagtaagattttttgtagtgtctattctctttactagctagttttctctctttttaaaatgagataaactatatatcacaagtttccttcttaattaattctaaatgtgtgattgtttaaaaaaatattaaaaaaaagtcgttatacgttgattattatttaatgttacatgtggtaaagatcataatatacttcatcaatactatattagaaaatagtctcacattaccaatgtgtgaactatatataagattcatgagctgctcctctcactcatcgtcaattgtatttttgagatgcaccttaactaaacacttccaaattttaatatggtatcagagcaactaaaaacactttcattgtcttcgccgttgacctttatttgggaactttcgccaattatgtgtgtaacttctagtattggaatctttaacctattttaaaaattaccacaaatttttacgtacatgagccttactgggattctttctaaactgtcacgtttttctaagctcaaacgtgaagatgatgtattagaaatagtcctacattgctagatgagtagaaaaatattactatagataaaaatcatgaattactcctctcattgccaattaattttgagacaaatctcatacatcttaccttcgtcttaaattataacatcctaagtttctttcactagattttgtaattacttttattatttacccgatatatcaaaacgtaattattaattatattgttacatgataaacatattattatactttatacatacaccctaagtttttcctttcacctagatttgaaactttaacaatttacatgaatattcaattctctc

SEQ ID NO: 268196 - DNA, 783 bp, Cannabis indica
gagaataattaagatcacaaggtctgaccaaatgattttcttaatattctcgagaaagtttacaagtatttcagcagcgtaataatactctaaaaagtttaaatttggatccctaaacaatgaaatgtcttcactatttatatgaaagatacaagggtttgttacccaaaataatagggaaataatcgggtactcaatattaattcccaccaatctttcgactatataaaaataatcccataaatataaagattctaaattagttataattatggtgatatttaaagaaaatattttgggaaatctctaaatatcgtgtctttttgcgcggatagcgatgctttactggatacatgtattcttcttggaacattatgaggtacagaacatgttcggatactacctgctgaagaaatggactttgtaaatttaagcctgaattattctagacggaaccttaggcgagtatattttgtccaggtcttaaaataaactccatgtgtcaccctattgagtgccacatcaccctacataaattgggatatttgcgcctcatgttcccatgagaatagttactcgtatgtggatttctttggtctataggtcgttcggatgggtgacatgcgtctgatcccacgtgtcgtcctagatgtgacataacctggcagcgcagacatatcttttcttgtctcttagtatctcgagcatttaatacttttcctaggaaatgggatatgggagatcgcgaagacagttatggggaatcacattgtaatgattgca

SEQ ID NO: 268197 - DNA, 1409 bp, Cannabis indica
attaattatcatcttcatcttccattttaaatcttcatcttaattatattttaatttttttttttttacagagagagcaaaaatgggtgagaaggaatggtacttcttctgtcaaagagatcggaaaatacccgaccggaatgagaactaatcgggcaaccgaatcaggttactggaaagctaccggaaaagataaagagatttataataaaggaaatattaaaaactctttattatcttcttcatcatcatcatcttcttcttcttcgacaaatcttgttggtatgaagaaaactcttgtgttttaaaggaagagccccaaaaggagagaaatctaattgggttatgcatgaatacagactcgaaggaaaattctcttactacaatcttcccaaatctgctaaggtaataaagttttgatttttattttgacaagtttattatgtgtttggttaaatgtttgctttcatggggtctttattttttattttttaattattatttagaaaaagtctaataattatttatttatttaatttttcaggatgaatgggttgtatgccgcgtttttcacaagaatattgataataataataataatatacagaagaaaataatgaacccaaataataatatgatgatgatgattaataataataatagtaatcatcatattaatcatgggttattaagaatcaattcacttggagttgatgatatgttagattgttctaattcattaccaccactcaccgatgatattcctcttccgccgtacacaaccaccacaaccaccaccaacaacaacaactaccaaaacgacaccaatttcaaccaaacgacatctaactattactatactagtttctactcttctaataatccaataatccaaaattatgattttaataataataattgtaaggtggagcaattctctaatcatgattcaatggttagcgtgtctcaagatgatactggattgagtacggacaacatcaacaatacgacagagatttcttctgtcgtttctgatcaccatcaacgacaacaacagcaacaacaacatacggtgtcgtttcatcatgatgggttaatctcgggatttgacggtcaagatgtgttttgggatgacttatgatgaacaagattgttaattattactttcttcttcttcttttaattgattaacacgtagagttaattattaattaattgtggtcgtataatattatatattttgatgtgtattttgcttaattaattacttcattttctttattattattaggggatttatatatatatttatgatttattatcatgtgatgatgatcataaatatgtatatatatattttagtttttgctttgattactttggatcattacacatgacttaactttaat

SEQ ID NO: 268198 - DNA, 1479 bp, Cannabis indica
tattcggggacaaaaagtaatccatgtgcccgctccgttcctcatttaggcggagaatccccgcctcattaggagcgggcccccgcggagccccatcaccgtggggaaaatatgcatccctaaacacaatgggccatcttgttacaaagtctaggaacataaatgacccctaagcacctactcgaagctcggactttcttgttgtcgtcggccaaaaattcatcgtccccacaaactttgttattgacagcagagattgcattctgagaatcgaaatggatgtaaaattcgttgatatctgtatctctagcaatagatatagcctctttgattgccttaagttcaaccataaaaggggagagagaagtataccagaatctgtgataagaacgaacacacctgccaagatgatctcgaacaatgcccccaacaccgctgctgcgatttagaatgtcaatagcagcgtccacattagtatcaagctttccgacctttggagaaatccaacgctgcctatctgtatcctgctgtatgtgcttcgaattagtatttccattgactttgatactcatcaagaatgtttgtagctacctcaataacatctccatatttaggagagaaattattgtgcaacgacaaatttttactataccaaagctgccaagacaccatcacaaagaggtcaaaatccctacttcgaaatattttccttcatagctaaaaagaaagtttacaaatccaagttctcccaataatttcttcagaaaagtacttggactgatgcttttaagttatatatttttttaaagggccaaataataatattgaaacataatatattttagggaaatttcatttaataaacataaaaaaaaaactcctatttcaaaaaataccctcttaaatattttgtacaatactaacctattaatttctcattttttctttttccaaaaatacccttattatttatttattttcaaaacctaaataaactcaaaaacaatccctctctctctctccagccgcccctctcgttttcttcttcggctccccaagtcaaccagccatcccccagtcgtactccagtcgtcccccagcctcggcccccaaccgtcccccagccgcgtccccactcccccagccgcgtccctacctcccctagctgcttttcctctctcgcaacaagctttcggagcctttgctttcggagtcgtagcgtacttcttcgccggtgcaaaagtggatttggcagatgacatcgtgaaggagcccttgaccttcaagatatttttcaatagcaagaaggtattgttaataaaaagtttatttttagcttttttgtggttaatttagagagattatatattatttatgttgaaatacattttatttttatgaatttttcttaatttatagtcgattttgtatggtggttatggtgttttccgatgtagtgtggtggtggtagttatgtat

SEQ ID NO: 268199 - DNA, 789 bp, Cannabis indica
attttttaagatacatgttgataaataaaataaagtttaaaaatatttgttaagtaaaattaatatttttatctaattttttaataatttttttttgaattaataaaatattatgattgctttaaaaaagatagaatattataatttttaaaattattttttgtaataaaatggggaaaaattttgtattagtcaaagttgaggggtaagaatattaattttaatggtaaaagaaaaaaaatctaacaaaagggacataattatgtagctgttatattttaaggaaaattttaacaaaccctatatttataggcaaaatcaaattgtgccgaaattcaaaagtaaaaatactaattattttaaattgaattttatttttcttttacgtgaaatgcttcccagaaagacaccatttctccttttatatgtgtttttcatattgtatgcagttttcattttattttattttgaagaaaaggctaccaaacaagacaaattaaagattcattaccaatcaaaaatcaaaagttacagcatcacgggtgggcatcccggtcaccacacatgcatgctcaactactaaaggaaaagctaatttggctaaagcatgagttacagttgactcttttttacaagacaatttaattaaaacacatggaaatacttaaaagaaaccaaaatatcattaactacaatagtgcaaagagaaaaatccagtccaatgcaattagaactaggcaaaacagctccgcatctgtgtggatcgaaggtggcgtttggttggaagga

SEQ ID NO: 268200 - DNA, 653 bp, Cannabis indica
caattaagtatcgggtcccatatagtttaatataataacttttaaggagtagcgctaaccaatcacaagacgacatatttaaaagtgctaggcaccattggtgtccaataacaatgcctaattttaaaatagtgagtgggaaaaagttatcatctctaatgaaactcatgatctctattattagtccaacaccgaggttatgggggggtctcgagacaactttatttttggccctctaaggaatgcgttgaaccatcaaggttgactttctctttaggataagacaaagtgatgtattttagcgcgatcctaaagaagcgttactaaattaagtcatgaaatccaaaataataagttagagtcataaagtaatgtttctatctttgacaatatgggacataacttgaccaaataagcgatattttattttgtaaagaaaataagagttattctaatcataaattaataaagacaagaatcaattttgtagattactcgatattaatttgactagcctgtgacgaaattcagatgaaaaaaaaataggaaaaagagaaaaaaaaatattcttttatgttatttggtaaactaggagagaaaattttcttctatgaaaatgactatcatgtgtatataattttaattttaataat

SEQ ID NO: 268201 - DNA, 1541 bp, Cannabis indica
attattactgttccttgtgcaatcattacttatatttaaaaaagtttggtattataattttcaccgaaatgctaatatgagcatctccggtaccaaaatcatctagtgctaatagcttaaatgaataatgagacttacatatttatattaattaatttaatttgacttatgttaattagttataatgagttgtttttattggtaccatagtagcttgtatcaatgccctatttaataaagtttgtgacataagaacataatcctaatttaaccaaaccattataattttggtactagctcaatatttttgagctctcaaaccaaattttgatgggagaaactcaaactatcataaaatttggttatatatttattgagtattgttaaagatatatttaaattatacaatattaattaatgtgtatttaattttaatcacggataaatttaagtataaattatattatttttgattttataggtgaaattaataatacataattagatataaatagtgttttgtaattttaccaaataaaattctctcattttttagaggcagcagatccgtggtgggaaaaatcaacaagagcacaagagtcacgcccttcagaaacgactgttaccgttcaaaattgaaaaggaccaattcagcaaccccagaacccaaatccaaaaaacgtacctaaaataatcaaagtaccctaccacaacaaaaagagacccatatacccatgtgtacaaattcactcacaccgttgatatcacttacacatgtactgcccaccaactcattttattttgtatattgttgtaccactaccaccaaaccaaaacactaccacagccgtcaatcattacttttgccaaaatttggatcgtccacttacaataaacaattttcaatgaatagttctcaactttcaataatttactttcgtcctactaatatgattacaaattcacaaacaatcaatatattgagatctgtttcataatgaacgaaccaaacgagtaacaccgttatatatatatatgtatgttggcttcagatacaataattgattcaattatggaagttgctttgtttttatgtgccttaaaaaataaatacgaaaaatttgtggtttaaaaattaaaatttaagtaaatttatagttaaatatctatattttaggtttactcagtacttttttttttttggttgggtaaaagatacttaaataaaatatatatttttaagggtgaaattactaaaaaatggaataacaatatagtggcacgtgatttttaattggtcaaacataaaatttaggggttgacactgaaataaaaaaaaaaatatgacatttttgccactatttttttctacgtatttattgactagtaaatatttttccgtgtatgcccgcgagcgtgcgcataatttttagtgtagtagtaagaaatattgatttaaactatgaggtcaagagatcaattttttaatatctactttttatatctttaaaaaaatatctaatatacaactaaatagagta

SEQ ID NO: 268202 - DNA, 575 bp, Cannabis indica
tcttcagaggttgaagtaatcccactggtctctgatgctatgtctttacttgctgacaagttaggtattttgacacgtactctataatatcatctttcatacctgcccaccagtacagtgatttactatctagatacaatacttacgttgtccccgaatgtaaggaatatggcgtggtaagagactcgtctagaatctcctgtctaatactagccttagctggtacacaaaccctacctttatactacaataacccatctaatgaaattgagaaatcctttactaactcagcttcaagcttctttttacactcttgtaattatagatcactctgttaggtcatcttgattctttctagaaaatcagattgtaatgtcatattggctaatttcctaactgcgaactcaatgtttgctctggtcatatcctcagctatttttggtgcaatcttcttcagctcataaacttgcctggacctttttaactcaaagcatcgactaccaccttgcttttccaggatggtagagaatttcgcagtcacagtccttaacgagttctaaccatcgtcgctgcct

SEQ ID NO: 268203 - DNA, 2501 bp, Cannabis indica
accaaaattattattattattattattattgtaatttttttttcagtatggaccacagccctaaatgcagttcgatcagaggataacccaacagatatcagtcgccacttgcaacacaaaatgtaaagtctccttttatatgaattattgctgttattattattattcatatatttctattttttcactcttgaactcatcatttaaattagtaatttatccatgattagaattccaacactataatttgcaattttctttaattaattagcgcaataatagactcatttggaaattgagtagcttgtatgtaagtgcaaaaactcttaagatgaaaagaatttttttttaatttttaattaataatattattttcaaatacaattattacaaataaactttttgggtagaattaaccagctaaatgtgtaaatatatataggaagagaattgtagcaataaagaataatgttgagctttaatggaagctacccaattcaagcttgttgaccacgcagtacagatggaaattatcagcaatctatatataattatggacccatttctcttaataattatcaccaaaactctcctccttctgttaactactactatatagtatatatatgtccatgtgtgattctcctctctattttccttgaataccccccaatacgcaactattattattattattattattattattattattattattattattattattattaggctaattagaatttttgccccttaaactattgagatggttggatttaaggattttcgtctaattttatttaattttactatttcagttatagtttatgtataaacccatgctcctcacactttgacgatatcgatcaaattatggtcttcgaactttgatatgtactaaatcatgtccctaaactttcatccatattagacttttttactaaaattggaaaaaaagtctttaaatctaacaatctcaataatttaaggaacatttttaacgaccttaaaagttcaatgaacataatttaataccgtgatcaaaaatcctaataagcatcatgatcatgatcatcatcatgatcattattataatttatattattattattattattattattattattatgttttcccaagggttagctactacttatgaccctcttcccttagcatatcatatagcacaaaaagtaattgtgataattagtacctactaatgaccccacaagttatatttacaatacaaacgttcgccaaactaagcacgtgtacgcacgcacatacatatatttatatttatatttatataaaaggataaataagtgcatagtcaaaattttaagtttgtaaatgccataaatttaatatttactttttgcattataagtacacatatttgtaaaacagtaagttttctttaattttattaatataaactttgttattatcttaaacaaagtacacacaaggtctaaattttaaatttattaggtttaaataaaaacatgtagtgtcagttattttaaaatattcttttgataaatttaaaacggaatcagacgaaattggaaaaaattacaattttacaaatgttggatatttatgccgctaaaaataaacattatatttatgccgcttataaacttaaaattttaggtacttatatgtaacaattgtagtggggtgtggctttagctttagtttaaaggattttcattggatcacatccaatatatataggtctatccagatctgatctaattatatattgaatgttgaattttaacaaccgatctgatctaattaattttagttactcgaacatatccaatatctattagatattggattggatcgattctatgcatttgcattttcagtcatccaatgatttagacttgatatttttttggattggatcgaatccatccaatattttaaatccagaatctattggattggataagatccatccgatctaaccaaaaaaattaatcctaatttttatataaacatatatattgatacacaacttttaccgtaagcgtatagtgttgttataaaaaagttttaatttaaaaaaagttgtcaaaaccatagagattgattattaaattttaccaattattatactattttagttttatgctttaattagataattaaaactaaataataattaagaacagaataataatataatgaaaagtaaacagacaaacaatgattttaatctaaaaataaagacctagaacaataatttctctatttcaaactatgaatctcaatttaccaattatcctaatttattctataatttgtagttttaagaatcttaatttaatctattaacttctctcgaatgataataaaattaacctatattgtttaccgagatttttgaaaaaccaattataagaaattagaactaaagaaaaaaataattttgtaaagtccttttttggctagttgacaaaatattttttctt

SEQ ID NO: 268204 - DNA, 679 bp, Cannabis indica
aaaaattctactccacaataaagttataaattttgcttcaaaatttaatattttgtaaaaattacctataagattctctatagctagtaaatgaatttatcatctcatttatataaatataaatgttagcagtattagataattttttttacaatgaaagacataaaatttacttgcattaatgttaaaaataggataaataatagtataaatactatttaaagttttgattttgtaaccggtatagagtcgtagactcaataattttctttcaatgacataaatattcaatgctgataaaagtataatttttgtctagctctatccattcgtaaggacttagtttataattttattaaaagaaaatttgaaatgatactaaatgttatgcagtaattatctcttaaaaaaaataatgaaataatttactattttattcgttatatatagaaaggaggaattaaaaaaaatggttcagttaagtggctatactaaaatatacataaatctttagaacggccatattctttaattttaaattcctatgcccttttttttttggtgtgtaatcaaactcacattggcagaaagattatgagtattaaagatggatactatttctattggtacgagatttttggcaaggtgctcaaaataaaccgtaaggacttaatctcaa

SEQ ID NO: 268205 - DNA, 510 bp, Cannabis indica
aaaaaaagaacttttagtttgagattcaattatccaagtagagctaggacaaaaggataggtacaataacttattgggaccatttttgagacaatcgtattaatgtattggtgaaagaactgaaatattcattgggaatatgggtacactcacagcataccaaaaaaaaagttgtggttcaagaaaaatacacaaaattgtcgaatcagttgatagcgaaagtacatctagttaagtggtaaaagaccaaaaaccaaaagcaatgtcatgtatttagtgaagattcatccatccccatctcattagagaagtttagatggacaaaaataaacaataattaatcaagacaaagtgagtaatagtatgtgttatatgaacagaaaatacccaataattgtatgaccagtaaaaacttaccactagtggtttaggagaaacaagagccttaagagcaatagagtcaataagtggaccacaagctggatcttcctcgacaccagggttatggac

SEQ ID NO: 268206 - DNA, 727 bp, Cannabis indica
tctgatatcaggaaacaaaaagggagttatacaattacatcagaacgctttgagggtagaaaacgcaaagatcttgataaatggaggaaggccttgaacaaagctgctagtttatcaggatgggactcactgagtattaggtaataactaactagtatattcatttttgtgttttattattatagaatttctacttataattaattagaaatcttaagtgactaattaatgtaattgttgcatgtgtatgtgtttaggccggaatcaaaatttataaaggaaatcgtcaaagatgttaagaaaaagttgagagttcttgaggaagaggatgctgcaatcatggcggcagcgttttatatatatttctgtgggtaaatataaattgaaatatatgtataaatataaaatatatgtattccaacaagtcaaaatcggtacatactagaattctatcatattagaaatcatacaagtcaattaattttgaagacatggactcaaattttgcatctcatttttaacgattactcaaaatgcaccatttctctacttaagatttaaatgtgtttgaaacatataaatctatacttttgtagaaaaattatttatgtgagtcatctctctgtttttcaaacttctttttgctgctactaagttgttcttttcttgttcttgttcttgttcttgttctttctttttttttctttcaaattacattaataaaaat

SEQ ID NO: 268207 - DNA, 1509 bp, Cannabis indica
atcaaactaaacctcaatgatagaatttcgatttgaaggaacaagcgagcatcctcaaggagtcgttttttcttgaatctcctttttctttgtgaggatcattggtcaagtgatcatctttatcaatacttctcagatacagtcaaattgtcttactccatttcaaatacttcgaaccaaccaatttatggtctgtgattttagacatcacgggaaccacatcagaaacaactagtggttttggatttgattttgtctctacctataacttgaaaaacaaatattggaagagataagacaaagtcgaacaacgaagaacaaataaagaacacccaaatacaaagtagggagaaaaaaaccaaactacaacctaagacaaacgcgagtaggtttgagaggagctaaaaacgaatcggagaagattttttgtcgaaatctccatcacatgtgcctccacgcgtcggcgcgtggcgtagctcgcagaagaaagaggcggcacgtgagccacatgtgtgaggaatccggcaattggactttggggtttggcagatcggtggctgggcaatcctcttcagtggtcagtgagaataaacttgcactccaaatagggttccgaaaagaaccctaaactcaaatcctaatctctttttaattatgaactctagttttttatttcgaatttcaaatcacaattctaagtatgactctgataccatgtagagaatagtaaattgtgttttgtatctcatagaataatatatatttatatacaaaactagaagactaaatgagaaactactaaatataaataggaaactactaaataaaatttaccctaatttttacaattaatattctaatagtcccctatttgttgggaccacttgtattcaagagccattagagctccgtataaatacctcactcttccattgaagagggagatgatcatattttgctatgagtttaaagattcaatacaacaccaattttctccattaatgttttgagtttctcttaagcttttgatcttcacccctttgcattttgttttgaaactaaagtttagttgacgagtttttaccgtcaacacgatctaatcaatttgcggtccgtgattttagacatcatgggaaccacatcagaaacaactagtagttttggatatgatttcgtctctaccataatctcataaacaaatatcgaaagagacaaggtagaatcgaataacaaaaaataagtaaagaacacccaaatacaaagtatggagaaataccaaactacaacctgagacagatgtgagtaggctaaaggggagctgaaaaagaaccgaagatgaatcgccgtgataggcattgggatataataaaaagggcataagtgtaattgtaataggggtattgttattatatataggactcaatagtgaaggaaaaggtgtgaagaatttggttttagtttgtaactttgggagagaaccaggctctcgaaatcctgggttttaatgaa

SEQ ID NO: 268208 - DNA, 834 bp, Cannabis indica
acacgtagattacataaaaaaaaaaataaaaaaaaaaaaaaaaaaaaaaaagaaaaaagaaaagaaacgacgtaactgtaatttatgcatactagacttggacaatgttgatatgttatgggggatcattagttagtaccattaattgtaatgatagtcttattagaaagtaaaaatcaagtatgaaattgggataatgggaatgtaggatatgtaatgaaaagtgttaggaaactctcaattgcactttattttacactctctttctttgttgacaagtgaaatttagcattcattcatttaagagtgccaaaaagagtacaatataatagtatttatagcatttttcgtatttgataagataatgtataagagattggaaatcgaagcaaaccatcgttgtcccaaaaaaatacaagtaattgtgtaatattaagaaaaaaaaaaggccgtaggaggtagtatggctgaaaaaatgacgcgtaggcgtaaccaaggtatagtatatacatacaaaatgaaagtgaagattcaaaaggtaaaatgagtatgacaacacaataagaagattcataagcaagacttgttaagaagaacaaccaatatataggaggagattattttaattgattgatccacttttgtaactttgcttacgtttaccaattgtatttcgctctataatagatacaagatatatatagctatttgtgattttagaacaataagctgttgggttgggcctcacacgtgcaattaggggccattggagttttgttgcttctactgttttttccaatctcacaacccacgccatataaatatattttgctt

SEQ ID NO: 268209 - DNA, 1072 bp, Cannabis indica
agatcctgcttaaaatatttccaacagtgtattggatcttctacggtcatgaaactttcaatgaacttcatgacgtagtatccacattgtttatcgtcaagttgtttaggacatataggagttatccattggatatgtctaacaggctatcctatcattcaattctatatggtgaatactctacacaaaaagtaaagttagcatatataaattcataaatataaaatacgtttatatattgggatgttggatataaaacttatgttaaatatttttttgccctgctctgttgggcctttttcctcctcaccacaaagtatggactcaatctcgtagccataaattctctctatttttgcaaaccaattatgcactcatacagttttggtggcttctcaagaagttagggagctccatctttgaattttaaaataccatatgttagggtaattttcctatctgtctccggtacatagaatgaggcctgacaaactgacaatcgtagttataagaacaaattacaattatttacagatatttttagaaactgattatatttatagcttaagaaaataatagatattaaatagtagacagatagattttttaagttgttcaggaatgaaccttagtgcacgaatcaatagtattagcctctttgggaaaacaattagttattacaagtatttacaataatgatctctcattcttcttgtttctcggagagaaagctctctaggaatttcagaagagtgactgtaaatgaaaaattgttctccctttgctgaaagaaaatggaagtatttataagcatacatggggtaaagggcatatcctttacctacctaggattttgtagtcaacactctactaaggtcagtactgcgaaaggatgatttgaccattggcttgtaagaaccttcttcatcgagtgttgtacagttgtagtgagggtttttgaacaaaccaagacacgtgtcatgcaaaggtctctcctttgtaatatactctctaactaggccgttgggcaaaaagcatgtccagaggtgcgtatgcgcactaccatggcctg

SEQ ID NO: 268210 - DNA, 693 bp, Cannabis indica
tttaactccatcttctgtccatttgttgtttcttctgggacgaagatcatattatactctatcatttcatgccaccattgtaggtattaattgctctcagatattgtcaatcttatcactcttctacaaaatggtgaataatgttttagaagtggctccatagtggagattttatacaactttccatgggtaacatactcataacctgttctttgatgaacctttagcatgattcaagaataaatattgtgccttattttttttattagcattctcactaacttcggaaaggtaaggaatgaattagatcattattagatcaaaccttgcatctatgcaaacacctatgtgccaaaaggtaaacctaatacaacacaaagaaaaactacacaaaaaaaattcgtttctagccacctaaacataaattgacttaaaaactaaaaaattaagtactacatcaaagcatagacaaccaatcaaattgtaagcttaaaactttctctcctttagtgtgggttctgcgatatcacatgtattaggatgcaattgacaaatagcagttcaaagacagaacattcacctctaaggctctccatcactccaatgtttgtcagctgcaattttcaatcttgactctgctttgtccttcaagatctacaaatgttagcataaccaaatatgagcaaaaaataa

SEQ ID NO: 268211 - DNA, 508 bp, Cannabis indica
tgatatgactgttgtttagtagcggtattctactgattattaacaatggattatggatggaaaggacgatgactactcaatctacaatctttctactgattttttttttcttacttcctttttcatataacgagttttcaaaagaaccgatgccaaaggttatacatgattttgcatagatgcacaagggagagacttgaacaatttctaatgtcactatcatacagcataactaatataattgtgacactcaaatttatatttatcatgaaatgtacgaattattcaagtaggtacttttaacaatttggaggcaaaaattctatttaattttatctatattaagaagaagaaaaaatggtcactcctttcataagaatgtcattgttataaaattaataaaatgtcattgttagtgttagaggtcacaagactcaaccaatatgttttgtagttaactaaaagaaaatcacataaatgataagtgatagaaatcggctaaatgaga

SEQ ID NO: 268212 - DNA, 792 bp, Cannabis indica
ggtgatggagaaatcgaacttctcgtaatcgccattgcaacacgttcaacaactattcacaaatgcaaaaccctaaaatcaactctaacccaaaacacaagctaaagtataacaaagaaaacgaaaaacaaagaagaaaagattatgatcttgttggttcatatcacaagatatatatatatatatggagagagagagagataagtataccgagagaaaatcaaagaaaggaagatagaaaataagtgagaatctgagaggacaatattaaagaaaattggatagattatcaacaacatttatggtttgaattatgaagaagacgatgtaacattacatgttgatgatactgaaacttgagcatcatttatgtggtgagttcgacaaggacgtacaccaactttagggtgaatattgagagaaatattgtggctacactgctctgttgtatttcttttaccctaatttctctattgatctttgatgtgatctttgtgtgtgattctgctctagaaaccctaagtttttctctgtaattgtgtgtgagagagtgtacctcgaatggtctaatcaaactttttagtatactagggtttaggtgttgattgtttttgggttgggtcgtgtgtattggattacttttgttaaaggatttatggacgcataatttctttttcatttttaccaatttaaaatctatttggacttattgttaattgtgtaatttggtctgcgtattattgagttgaacattgctgatatatatgggatcatttaaaaaaaaaaaaaaaa

SEQ ID NO: 268213 - DNA, 511 bp, Cannabis indica
caatttatacatgagtgtgtcccatatttttaatagatactataaaataattcagaatttcatggtacgcagcaaagcatccttcactccctactcgatgtgtaggtgtggagaaattatatatctagccaacttttcttttttctccttataaagagttcgagcttaaattttcatgcatctcttttatttgtatcataatcactaagtttggtgcctctcactctcatcccacaattgatattgttttttttgcaggattatggagtcaaagtaatgcttgaccgaaatgtttatttggtggatgttgtgaaagagaaaatcggtagagtattgaaattggattcaattgagggaagcaagctatggcagggaattgacatgcttattttctaacacatggcattggtggaaccgtaggggtcccagtcagccgtatgtctctctctctctctttatgtatatatcaaaagaaaatagttgttatagtataaactatgtcttattcaca

SEQ ID NO: 268214 - DNA, 1776 bp, Cannabis indica
gaatgacaacaccaagtaggccgcaacaacacaacaacaattgatgataatacctaaaaactcggggaatgtagcccgagcaaggaggacaaagaagaggagctttctaggtctgcgttggctatgttccgagccaaggaagaagagattgaaagaaggaaaatggaggttagggaaaaagttcaagctcaaatgggaaaagttgaagaagcaactaagagattggctgatattcgtggagtaagtttatatattattaatcaactatatattattattattattattatttaaaaaattatagaccaaaatatagaagaaaaaaaaattatattggtagtttttgttaagatgagctaataaggattttgaagtttattgctttattaagtgttttagacttagatttaaataacttttgacaaagaagttaaccaagaaaaaaaataagagatggtttttttattattattattatttgttaataactactcactagactataaactatgaaacttttatttattttttcttaacaaaataaagaaggaaaagatattaatgttaagatgatagcaattaaacaaggatatttttagctctattgttgagataattattggtttgaaagttttacaaagaaaagaaaaatcaaataagaaaagaaagatatagtaagtgatttattattaatcaattatgttatttatattattaagtatagaccaaaatatagagaaaaaaatatatattttagattggtacaagtttttgttaatatgaaataataaggatttttaagtttattgaagtgttgtaaactactcacttgactatagtataaactatgaaactttcattttattttttcttcatgacaaaaacaaagaagaagaaaaatactaatgttttatgttgatttgtattgaagatgatctattgttgaaatgaaagttattattattattgttattgaaaggttagttttggaaatttattatgttgtatttgtttttgtaggaacttgaagcacttacagatcccatgaggaaagatattgcagtgattcgaaagaaggttgatttgctcaacaaagagttaaagccattggggttgagttgccaaaagaaggtaaaattttaatatcaacatatgaaataattaccaaaatgatctctttttggtctattttcgattaggggaatttttatttttatgatttttaaagtataaatttgtaaaaatataatttttttcaaaaaatattactttatgagaagattttagaaaaatgttaaaaaaatatgaaaaaaaagacaaaaacttagttacctatttatggtaattggttacccctattacaagggtacttagttatctttatttttattttattttttttattttcctattttttaattttttcataaaataatctttttaaaaaagaaattatatttttattgaaaaagataaaaatctataaaatttataattttctgttttgattatatttacatactgaaaatgaccaactattaaacttttttaccactctctttgaaaaaaaatcgactagctatttatagtgtcgaggactatttcgcaatgaattatcgaaaccagattaaatataaaatgaattcaaaaaaagtcattatgcctactttaaagggctttacttttcaaaggttatttttatctattatctatgataattcactaatgctattgtttaaaaaagaaaaaattgagttgattaatcatgttgatagc

SEQ ID NO: 268215 - DNA, 581 bp, Cannabis indica
tttgatgatgccttagtaaactcaagagttgttgatttctcttggtttccaatccgggtggaaattcgtgttatcttgtgatattcgtgttcgattgacatgttttatttgtcaattttaaccagattcatttatatttcgtatcaagaaatcttaattttaaccaatcagctatgttctcatgtcgatctgttgtgtttgcctgtcgactatatttatattacaatacatgttgatcaacatggtatcgtatatttaatttttacaaatataatttaccacaaatgattaatccaatgaataaaatttttaatatcaaatataaatgggcttttttacaaaaatactaaattttgggggtaagatttatatttatattgccacgcggcaaaatttacaaaaatattgccctgatctttttttttcttttatactgtacataccgtaaattacaaacaaggcctgtatcttttacacccacagccaggaccaccacaacaataccaaaacaattgaaaaaaaaccattaaatcttgcgagatgaagtaaaaacattaaaatcaacacccaaaagctttgtc

SEQ ID NO: 268216 - DNA, 1173 bp, Cannabis indica
tgaaagtggatggtacagggtgggatatagagttactgagagatttttttgatgatcgtgaagtaaagccataacaaatattcctttgcaagccactgtaaccgaagacaagttgatatgggctgctgaaaattcaggtatttactcagttaaaagtgcctaccatttacttcaacaatctaatggcagttgggacaacaatgaagatgatgtgtctaaattctgggcttcactttggaaactaaaaattccaccaaagatcacaaataccatgtggagagctgctaaaaattgtcttcctacactctgtctactacaaacaaaaaaggtaaatgtttcttccctctgccctgtttgtaacattgaagaagagacagtcctccatgctttagtcacctgctccagcatcaaaatggtatggaaccgagagggaattggaacaaatgtgctgccaactaccagtacctttttggactggtgtatacgggttttttctggtgtagactcaaaaaaaaggggtctgatttcagctctttgttgggcaatttggcaagctcgaaatgattatgtttggcaaaaaaaggtggttggggttgaaggaattgttgtgttagctaaaggttatcttgatcaatggataaatgctcaaagctctcgtattgagacatcatggtctggctttcaggcgggtgatggggttgagcaatggtccgctccaagtgtaaatagtatcaagatcaatgttgacgcggctctttttgaaggaggaaatagttatgggattggattggtggtacgggatcaccatggattcttattggaaggccgaactaatttttttatgggagctactacaccagaaattgcagaagcaattgggattcgagaagccttgagttggataaaagaaaagaattggcataaggcgatcattgaaactgattgcttgacggttgtgcaagccattcgaagctcaatccaaatgatatctttgtttggacaaatcattactgaatgtaaacaactctaccttgagttaagaaatgtttctattatttttgttaaacgatcagctaatgtggtagctcataactttgctagagcttctatattatatcctggttgtcgtttcgatatggagtctgttcctatcgatttgttaccttgtttggt

SEQ ID NO: 268217 - DNA, 793 bp, Cannabis indica
taattaatttcagttacattaaatattttacgtctagtatgtattgggttggatccatcaaatacatatatattttacgtataacaacataaaatttaattactcatccaaaatactaattagtgcgattagatgttaaatgtattgaatttttaaatacttcatccaacattcgatctgattcaattagatatttaaaaataacatcaaatccaatttaaatagaattatatatttaatgtttcacgataagttgtaattgaattatggatcaattattattggattgtattgatttatacacacctctaaatttattgtataggaatagtaaataataatgtttttaagaggttgctgttattttattggaattttatacttcccaaactgtgattctcaaattactcaactgcatacacgtgacagtatcattgatcaaattttttaatgaaaagaaaaattatgattttactatgtttctcttatctacacgccaattcaatccaaacattatggttaggttactagtacaattctatttttggcattttgttgtatcataaattttgtaataataataatcttcaaactttgttatggtactatgttctttataaacttcccaaattatgatttgtgtacggtgaacatgaataattttatttaatatatataaatttcagtcaattaataaagaaaaaatttaaaactagattgatgaatgattcgttattgtccttcaatattttaatatgaggttacatcagtctctcattgaatgaaacttatg

SEQ ID NO: 268218 - DNA, 810 bp, Cannabis indica
aatgaaattcattactttgtttactgttaaataataggaatgaaatatgttaattctacactaattttatattaagaaataggtttgataatctcataagattagtgggattgatactattctttttaaaataataaaatactatttcaactctacatttaattaacaaaaaaaaattaaaaaaataccaaataaaactagtaataaaaaagtatttttataacttaaaactatttatttacaatttacaaaataatataaacacatcaataaaaatactatttatttcaaaaatcaagtaaataactcattttaattatgatttatcaatctcattgagagtaattttattttctttacttttagttattctaattatttataaataaatacaatacattgtaatatagatatgacacctcataataataataataataataatgaatggaatcgatatgtccaagaagtaagcctattagataaaaggcacataataattattattattaatgtaatgtatagtataggaggctataaataaataaatttatagttaaatgtgtctatatttgcatgcttaagaaaaaaacaccaaagagtgtgattacataaagtatgagagagaaactatgaaaaggtaaaagccggtgccgtgtgaaaagcaacaaaatggtgtttaaaggtccaataaaaaagactattattattgtgtattagtggtgcccaatattttttttagagaaatactaaaaggttatgtgtaaatatcgttattagtctaaactaagtatcagataccatataatt

SEQ ID NO: 268219 - DNA, 970 bp, Cannabis indica
gagaacgctagacactactggtgcatttttagcattttttctttaatagtatattttaaagatttatgtagtaaatctttaaagggttggttgaatcttatctatttggtatatcaaaaaataaacttttaattttttttaaaattgtaaaatgaactaaaaaattttcaagcgaaacaaataaagagtctatcgaaacaccgggctctaccatagacttacctatattttaatgatattctcttatatagtagataattgtaaaaaagtactattgatatttatcactctcctcagtatcatattgttattagtattattaaatattaaatctcttataacttgaaaaaataactttagagaatattattaaccattatgagacgctacttatagaagtgattggcacctaagagcatctccaagtgagagctataaatatggtgaattcttattttttttagaacattttgctaaaatttaattttaatggtgatgtaaaatgtgtgtcaaatttgactcaagctaaaaattgtgtcaaatttagtacaaaagatagtatgggctaaattttagcccaagataaatactacattttttaatgacctctttgttatttattaatattattcattaactttgaataaaatatatttctaagatattaagataatataaataaaattaattattttatatattttgaatgagcattaatggtaatatcaacttttatagttaatttgtgcattggagcacaaatacaaaaaattggccaaatataaatttttggtatattttaaatcaaatttaatccaaaatatacattatctatttaagagcatctctaatggtaaaatattaagggatgtttacttaggtggatagatgaagtggcaaaatgttgagatgttatatcattggagaaaaaaaaaaaactaattctaagaatatgtgtgaatgttataca

SEQ ID NO: 268220 - DNA, 532 bp, Cannabis indica
tatttcggtatcggttagttatttcgttaagaaactagtgactgcgatacactacgcctaacttgattacataaattgtgtcacgggactcctaaacatctacaatgatagtgtcactgttgcgagtgtacagcggcaccgctaagttgaaccctatttcggtattgataagtgactttattgcaaaactggtgactctaattcactacatgtaactttattatagattgtacacctcacgagtgtacattggtacaactaagtataaccctagttcggtatcatttagtgggtaacgctgataccctacacctaacatgatttcatgctttgtgtcacgggacccgtaaacatctacagtgatagtgtcactagtgcgagtgtacatcagcaccaataagtggaaccatactttggtatcggttagtgatttcgttacgaaacaggtgaatctgatactaaccacctaacttgattacatactttgtgtcaggggacacctaaacatcaacagtgattgtgtcactactgc

SEQ ID NO: 268221 - DNA, 744 bp, Cannabis indica
tattgtatataacattaacctatatatattaattatttttcaatttatttgtcggctggataaagaaaaataattgatgtaataataatttatttagattctcttagttgataataaacaatcatatctaatatcaataatcaataattaattaagaaaacgcttttacttttgtcacggatttcattttagcttcattcaaacaattatataacttaataatcttgtaattaattaattaactaaaaattgttcactaaatttttagtcaactaaacattaaaaaaaagatattatagggttatcaatttaagtaaaaaaaaatgtcataatttttatgtcgtcgagactataataaattaaatacacaaatcaatagtattaaaaaaagaggaattagaattttagaatatacacaagttctccactaaattttactttgtatcaaccatataataccaaaaaattaggatctaaatactgtcttagctctaattatagaagactgaaggcctgtttggcacagcttttggaaaagctaaaagttgttttttttttgaaaaagctgtgataaaattgtgtttggcaaacagtaaaaaacagttttttgaagaatttttggagaagctacagcgctgcttcaacccaacttttagaaaaagttgttttgattaaaagactataataatttttctgtactaaaaccttatttacttatttattacatattaaaagaataaaaaa

SEQ ID NO: 268222 - DNA, 1560 bp, Cannabis indica
aaaggaagctaccatgtgtgtacgtaggataagattatttgctgtgcgagtgggtgcgggttataatatttctttcaaatgaaattgtatgtgcagtttttataatttttcaaactataatcacattgcgaaatcttaaacctacaaaaactacactgtgaaaatgcgagatggtgcaatccaatttgaacggtttacactattatcattatcaaatattataattaaaattttaaaatcaatcttaaaaagttttaacaatataaaaaaaatcttattaaaattttaatatcataacataaatactaatcattaagttattatgttaaattgtctctaaaaaaaataaaatttctattgtattatactgaattgattttattaaataaataaataaaaaatatattataatatataaatttttacatgaaaaatattaattaacattttatttacaaaaatacttttataaagtgtggacaacaatattatctttaatgagcttttatgtactaaaatatcacttacactatctattcatgtcagctcaaatatcaatttttctattttttttttgtcgtttttctttcatttttcatttttaaatttagtattttgtttcttttttcttttcttctactcagtttttttttttttaatttcaaaactgccttccagccattaccctttcgaaagtcacgttcaaaaccaaagaaaactacctcccagccataactttcgccatcttcttcttccaattgtcttattttttaatttttatatatctttcatttcgtatatatataatggctattacctgtagttctactttttcatctccattgtaaaaataaaaaacttcaaaattgggtcataaatcagttgctagcaaggctaaatgaaaatgcctagtaattgacgatgatgattcagatttcgctcctcatgtagctaatggtgctagtcaacgtaataagaaaatttttctgaaattctaactaatattttaaatatggtgttgttaatgctttgcggttttgatgatatgttggatctgacattcaactacaaaacaactattgtgcaattttttaaaagccaataatgtattaaacgtaataacagtatattaaagtaatatttctgcctgtaaaagttcatagaaaaaaaaaattaaattaatattttctcaacattcaattgcttggttatgggatgtcttctgattttttttttttggcccacatttgccgtgcttattctattttttgtttcccatgcacctagaagtcttcttttccttagtattttagttgcatttgagtgttttcttggttacattctagaattgtgtcagcttgtgtattagttcatcatatttgcaatcaattgagataaattgcccaccaattttgtaatttgcttaattgattccttcatcaaactatcagttgtaaaatatgagaaatggaattgcgtctttttcttaaaagtataaaaattaaagtattgtaagttgttaacggtgaaaactcgtcaactaacttatgggataaaccg

SEQ ID NO: 268223 - DNA, 1355 bp, Cannabis indica
ttggacttattttcaactcgcccaattaacagattgggcggtttgtaattttttcgggttatttcggtttgtaatttttatcgattttttcggttcggtttgggcgggttattcggtttaggcggtttacaaatttttttgtacagccctagggcacactagacgacttttcatgtactatgttgtttttcatatcaatctattattatatcatatgatgatgtcgaggattactagaatatttttatttatttatttggattttaactaaataacttgaaaaatatgaagaaaataataattttttttaaaaaaaaaaaaaaatcattaccagagcatgactgccgaagccagagacaacctaacaaagccccatatattctgaaaagccagccatgaaaatccagaccaagctccaccacaactcccactaaacacataaaccatctgagccaccacaatgaaccaccacgaaaaattcaacaccacggcggctccaaccagtccccacccaagcttcaacattagaagccagctaaaaaaggtgtgaagaaccagagcaactgcagctataacagccatcaccatgatcttgctctgtgcctgtaaaaacttagctataggaaaattcatagcgtaagcaaacagctgaggaatcatccaaagagcaaatctcccagctgcctctgaaatttcctctgtttggccaattaatctcaaaagtttcccagcaaatacataaacagagctcaataaagctccagtagttaaaagaataacccaagatctttgaagataaacgcccaacatatcaatctgaccagccccgaaagcttgcccgcatagagtttcaagggcgcttcccattccaagctgagatcatcaattcaattaaatatcataattaataattaattaactcaaagtttggttttttagtttttttttttttgtaattaccatgacgccgaaggagaagccggcgatgacggagttttcgacggagacggcggcgagggcgagggtgctgacgtggccggcgaagagttgggtgacggcgccgagggagtaacggcatacggaggtgaaaactgctgggcctgctaagtaccataacttctttgattcgaaacaaaattgtttgaagaattcagtggctccgtcgatcggaagggcatcgttggttttgttaatggtgttttgagattcttcttggattgttctggaagagataatcaatggctgttcattctcattctccattttattgtatatgttttttttttctttctgctgaaaagtacgttggtcggaattagcttaaatatatatagttagttatatacactcaagta

SEQ ID NO: 268224 - DNA, 1451 bp, Cannabis indica
tttccttttgcttccacaacaaaacagccaacaagccccaaagcaacacgcaaactttcagcacgcatcttattcaatcttgattccgataagaacaccaattccgaacaccaacactgaattagagacttcaaagtacggaccgtccaagggttccccatcccttgaacgttccacaataaagcattcgtggttgtaggcgaccctggctcacatggttcgcctcttcaacattttaagcaattatcaaatcttcattctgagaaatgccaatcggtttgtccacttttccactctttcttttctttgcatctttcttgactgccactttccttctctgttcttttggtattagattgttccccgaaccaaaggcaaaagggagactttcctttagtccgggtatatccattgagaaaccaatcagaacatcaactagattttggctttcactcatcaccatgtgtttgcttgctgtcctttgaagtttaccagcccccactacctctcgatcttccaccaatcttcttttcccccttccatcttgagccatttcatttgtttccccctcgttttcctcctgctggtactggtcccttgtgtattgcagcttgttaagctccttgctgccctgaattggttcctttccttctattacttcacaccttctctgatcatgccctacctcttcacttaataggggttcaaaggagttacccatagagatattgagactttgtcgacttccaccttgaatgttctgctcatgtacaattacagtctctttaattccacctttcaccacttgaaatccatctcgaaccccgttatcaattttcaaccaagttccgtacaccattgctgtccttccatcttcccctatgatttctttaatttcaagagaacaatccttttgactatggccaatccatccacatcgaaagcacatgaaagggagatcatcatacttgaatgccacccatttcttatggccagtacacggtagtaaaaaacctgggcaaaccggtttattgatcgacatccacacctgaaatctaaagaacccatccgccaccattcgggacacatcagaattttgaattgtaataaccgaaccagccatagatgctaatcttgtagtgtttttctcagtgagataatcaattggaacccccaaagctctaccccaaattggaaatacagtcagatcattcttccaagagtcactagagttccccatcttgcccaaaattaataccccattcgataaataccacggcattcttgctaagattcgggattgagtttgttcggaattgaaagaaaggtaaggaacatacctgttgtgaatttctcttgaatcttgatgttccattccgattccttcaattttccagattcgccccagcaggttcttcaagaatcctctgctgtgatccactttcgagcac

SEQ ID NO: 268225 - DNA, 555 bp, Cannabis indica
taattgagctaattgctaactaagttggttctcaatgggtttgctcacttcattaacctgtcgtgatgatggagtagggtctcagtgaatgtaaaactattatgaattgacaaccatgtttgaaattaagcttctagatgttgcaagagtattatctaccagtgcacctccactagttgcatcaatcatactcctatccaatggtaacaagccttcatagaagtattggataaggagatattcacttatttggtgatgagagaaactagcacataactacttgaaccgttcccaatattcatataatgattctcctataacctgcctgataccatagatttattttctaatccttccaactttagaggctggaaagtagaactccaacaatacaattgtaaaatccatgcttcaagcttctattgggcccttacacccacgtaatgatggctcttatacacgagtacgtcactctgactgcttcgtggactgacgactaaccctacataccaatatgagtgttttcaacatgctttgtcctcactcacacgcttc

SEQ ID NO: 268226 - DNA, 716 bp, Cannabis indica
gtttatttgttttctgtcatgttttgtaggatgacacctacgaagaaacttatatcagtaccatcggagtggactttgtaagtacagtaaagggcaatgagtgttggaggttccatttcatgattataagttcaagattttatttttgttagaactctgctttttctgtgtagaaaattcgaacagtggagcaagatgagaagaccatcaaacttcagattgtaagtacattgttttggtaaagaaatgattgttctccatcctgtaatgaaattgcttcactctaatactcaagaactaaaacttcaacaacagaaactataaaaccagaaacattaacattaaattgggaaaatgaatgagcttttattgaatgtgatcagcacttttacagttagagattacaacacacacttcaaggctatggtgataaacaccatttacaacaaaatcaccctgagaaacacatgatcaaacacacatatgttctatttacaaccctcattcactcttgtttcttggacaaaattatactaacgagagttttatctaggctaggcttagattcatctaactgtctaaactttctaaaagtagtaaaatgttgatgtggcatctattaagtgagtcaaattttttacaatcccaccttttttttttggaagaacaacaaagttcaataaactaggaaaagaacataggaatcacagggggga

SEQ ID NO: 268227 - DNA, 505 bp, Cannabis indica
aaagttcaggggacaaaaatcataattagccttttataattgtttaaaatatgttaatacttgaatacattttattttatgtatgtttatgtataataatcatattttatgtatataattttgattaattaataacatattatatgtatatacatatttacattagaacttttattgtcatactttatgaattatcattttttttaaagaagccataaaatggtaaatgataggatcattatatgtaaagaaaattgtagaaaacaagttgttttaatttttacaaatctaatttattttatttttcagtttagtttttcatactcagtttagtgtgatttaaaaaaaaaaaaaaaaacaaaaaaaactattttaattatgaaagttagaaaaatttatacttcattgaaattttttaagtatcctatatcaatttttaattctattaatcatgttttatttaatgtagtaaaggggagctaatcatttttttattatttatatt

SEQ ID NO: 268228 - DNA, 1402 bp, Cannabis indica
ttttagcatttctcatttgtatccaatagtaattctccaaatttactaattaatgatcatattaattttctagttatactaaaattttacataatttttatacaaaaatactgtattcaagaaacagctaatatatatatatatactagtattaataatatgcaatgtgttaaattttaatatatatgtatatatatattaagtactatctaattattaatttaaataataataataataacaaatttaaattaaatacaatttaattatattttttaaaatatataaaattttatataattttaaatttatttataaaaaatatatctaataactaattttattaaacaataaaataataaataagtttacatatttaaataatataactagtaaatttattataaaatataattaattcattaaattagcatctaatttaaatttaaattaaaatttatataaaaaattattaattgactgatttaaatatgaatttaagtttttgttttaaccctcataacaaacattctcttggaaaaaaattataattttaagcaacataagtatgtgtcatattaattcgtacaatttaaatcaaatttcatatattttaatttcataagattattaaccactgatcgctaatagtgtatcataataggtaatataaagtattagacattttatgggtgacctttggcaattcttgtataattttggcgaaaattacatatgcataatagggtttagggtaattttggcgaaaattttggcaattattcttgtgtaattttggcgaaaattatatatgcctaggcttgaataaattatatctgcataataggctcaacaaattgtaaaagctaattactaagtagaaaacaataatacatgtggtttagggaaaagataataaaatgaaaaggtagaataattgtgggggatccaaaatgggttggaatcactttaataaagtggataatccatttagagacatttatttcaagagtaatgatgagttgtataatccaaagtatgcgaataaaaccaatctaatattaaaataaaaagtgagcaaaggaaagtatctcccaactcctaaattttcactttggtagtcttaattttaattttttatataataattaatatataatatatcgtaattatttatgatatactgtaattttttaaacataaattagaataatttatcgcagtataaataaaatttaatcacaccacaaaaaacggctacttttagtgataattttttagtcacaatataatttttttgtgactaaatgtgacttttaatcaaaacaaaatattacttgtgactaaaacatagtatttagtaagttatcactaatttagttttagtcacaacaagtattgt

SEQ ID NO: 268229 - DNA, 683 bp, Cannabis indica
gagtactagcttccatttacctcttgacttgattttgatattaattttgattttagcttttgagataattcattttctctgtctctccagctatcattttaccattttttattattattacaatgtcacgtattatttctgctatttgtgtaggatgatttcttaccgagaacagctacgccattagaagatatattcaaatcagtcttctggttagaatgcttctctcttcatcatgtctttagttcattggcttgttatatatagatttattggagtcaattattatttttattaatatctcttaaaccaggccttggtgctttggacagcttgccctgcttattatttttggtgtgtttaagagataccttcattccagaaggtagaaaacttagagaccctcgaagactttatgctccaggaagaatgtatcatattgtggagcgaaaattttgcaggtagtaaagcatttacttaatcaaacttaataatccaggccaatttatttattttttaactctaaattcttaccatgtactgtgcttgagtttttagcgcactaggttgcttgagttgacggtagtacatatggttgaaatttttggcttctttttccttatcctagtttgtaaattacagctcacagcaatgtcaaacccaaatattttgattgaacaatt

SEQ ID NO: 268230 - DNA, 776 bp, Cannabis indica
agaacaaaatctgactgaaccactataattcatcgtcttgtttgctttttccagccttgttgtttgttcttgcattcccagtcgagtactcgccattttaggttgaatactcgcacttgtcatctctcaaataattctcttttttatcaattaaattatactttttggtgttgcgaaatttgctcgacaacactattaaagtgaaagaattagaataaaatattagaaaagaaagaatttttattttattcttttatttaattttattttaaagtattgaaatatcattcttattctagctatgttttcactcattttaaccaaacaatacttaatggatcatttgttatataaatttgagttggagaaagtaaaattagaatagactttaattacttggaaacataaactcttgtcattcagaattaatttaaattttacattctcatcaagtctaaatttcatactaaacgtcccattagagttattttacatactctgatgggacgggagtgctccaatgtcgtactgctaataaaaaattttacatttttttgatgattttttttgctttttttttatataaaataaaatgaaaaaaataaaattattttgaaaattttaagaatggctcatgagtttctttttattttagaatatattaagggcattttacaaaaatactggattttgggtaatacttttcaattttactgccacacggcagaatttacatttatactgtcctcctttttttttcttttatactgtcaata

SEQ ID NO: 268231 - DNA, 892 bp, Cannabis indica
ccattgcttaactaaacatgttttggttgttaaaagcatctgatagttgaattgaaaatttaccttatgctgcttgaggatatgtcttttcttttgtgatttgctctctgttgaatgaatttcctcttttttttaaaaaataaataaataaataaataaaactctaaattgaataaaaaattatttaaattattggtattatcgattttatctaactgtaacaatgagtttaaaaataacttcatataaataattaataaaataaattgttaagtgattagaaaaattacatattttgttataaaaattttaaattaataaatttcaactccaaatttttattgaatgagttaggtgggatgcgtgtaacctatccgatttaataaagagataactataatcatcatggaattatgaaaaaaaaaatcaatataaagttgagtagtacaacaatactactattagaaagtaggagatacagctcactctcactttcatttttcaggcaggatcatcgacacacacactttcttttgttccctctttcaaaatatggaggtaaaatcatcaaggtcggcctaaacattttgagagccttgtgcaaaagattaaaattgagccttttataaaaacaaattgggggccttatgcaatgacccaaactgcccaaagcttgggccggccttgaaaatcataaatcaattatttctaatatatatgaatgattctacatttgaataaagtcgagtagtacaacaatactactattagaaagtaggagggataattcactctcactttcattctttaggcggatcatcgacacatactctctctcgttccctctttcaaaatatggaggtaaaatcatcagggttgacccaaacatttt

SEQ ID NO: 268232 - DNA, 1317 bp, Cannabis indica
gcttccttcaatccgatagcttctgcaagaggaggttcaaccaagctataattataatatactttgtcatatataaaaataaaaaagtaataatttttccatatattgaaaaaagaatacatttttattattaggagaaaaataatacgcctacttaaatttgttaatatatatatatttgtgtgccataaaaaaagaaattgcccttccaagtatgtaatagtgagtcaaaatcagaagtaaaatcaagttaagttgttaattaaggatctaataattatgagaagaacattaataatctagtgtcttatcattgagattgtaaatagttagcaatattaatatagtaataataatagtaatataaattgtggtaaaattataggcacgcaattgtaagattaattctagctagtaaatatttgtgtcggtacaaattttcagtagtcatataataattaagtaacaattgttgttaatttgtccttttcagtaataataaataattaattaatatgcttgattattatactgcatgcatagaaaagtagaaaaatacaaacacaaacaatttgtctagctacctactatctatagatagcctactgcaatatttgatgcttatattatatatataatataggaatataataatagcagtatccaaagttttaagtttgtaagtggcataattttaatgtttatttttagcggcataaatacttaatgtttgtaaaactgtaatttttctctaattttgtcaatacgaactcttttattttcttcagcaggccacatataaagttcacattcttgatcattgggtctaaatagaaacatgtagtattagttacttccaaatattcatttaataaatttaaaacagagttactgacaaaactagaagaaaattacagttttacaaatattgagtacttaattataccgctaaaaataaacattgagattatgccacttacaaactttaaactttaagtacttatgccgctatttacccattttaatactagtaaaacctttcaaattcatatttttttttatatatattcactattccgtacgcttaggtaaacatacgagaaatgctaaaaggcactagtggtgccaagtaccctcatacgtgtcaatatcgcattggtctaattaagtatcgggtcccatgtggtttaatataatagcttttaatgagtatcgctagtcaatcacaagacgacatgttaaggttgctaggcaccactagtactcaatagcaatgctcgtaaacataccatagcatactcaaatgtacatgtagtt

SEQ ID NO: 268233 - DNA, 1095 bp, Cannabis indica
tttattgtttaattttggctgtggtaattaaattagtttctatattttgtatttgacttttatgttaattaatttatttttggaatgaaagttgtatatagcttttctatttatgaaaaataaggtaaaaatagtaagtttggttacttaatttttttctatctagctatccatgatgtgatattctgatcttgtatgagtttcctattttgtttgatcatattttttgaggataaaactagatcaaaactttacttttctataaaagaaaagtcgtacttactactcacaattctgtagttacaaaattgaaaattcttgaactgattgaagatctattttagagaattgtctagtgggttgtggtcttgtgtgtgtgagctgtcaataaggtgtatattattataaatacacttatagcatctaggtcttgtacctcttttgtatctttgtatttcactcatatctttagaaaagagagtctttgttttgtagagaagagtttgtttgactcttactctgtttattggtattttgtattgtcttgagtctgtattcaacctacaaagaagaagaacaacaaagctacattcaagaggttttacaaaacttcgggagattgcttttcaagtcttgtctcgggaggaagcaagcactcttcgagaagattgaagggagttcgagcacttgaagttttagtaagattcgattagaagatagaatacatcaggtttgcaatataaaaaataaaagggagtctatttatgcataagtactcaattactttgtatttctaacaatgacaatttatagtcaaattaaagtattttatttacattttctagtacttatgtaaataaaataaaatgattctgatttttttttccgatgtttagtaaatgacaaaataaaatatattcttttcgattattttatattttaaactaatttattttttatattaattattctattttaattaaacgtgcttactataaagggatttacattaaacttacccattattatttttctttttttcttttttaagtaattgttattttctcagtgaatatataaatattaataatattt

SEQ ID NO: 268234 - DNA, 1010 bp, Cannabis indica
gacactataatcatgaacaaatatatacatatttatatatgttttggacttaatagaatttatacattaaacataatcatgaaataaatcatgtgaaccatgcaacaaaaaagcgatttataatctttattaattagtaaatctgattgttttgaaatgagttttatttagagcacaaaacttatgatcattgagtttgattgatagggagtgattgaagaagataggagtgttatatagggctaaacatttagacccgcaaacccgaaaatccagccacccgtcccgactcgttgccaaaaaaagttgaaaaattgaaaacttgtgtggtcgggtcgggtctaacccgaaaatgctccacacgggtgtcgggttcagattttaaagtaaggcaaatattattttttatttttttcctttttactttcatcaaaataaaaataaaaatgttattagtagtactttccatatcacagtgaaatagacacattactatttactttattttcgtttacagtgctccagaaatttaaactatacactgcagtaattttttttatgcaaatattgattcagatgttaatctgaacccgaccacagcaaacccgacatacccgacctgccagatccgactgcccgaaaaacgagttcggttgcaccattttaatacccgaaatttaaaaatccaaacccgaccatccaaaaatccgaaaatccaacccgtgtgcagccctagtgttatatgcttcgcgagtttgtgttcttgttgtggttgggccaaaaccaaaaggtggaccatatcaaatttaaacttagaaatgactttaataccatattagagttgtgtgagaaaatattaaaagatatgaccaagaaagtcattttattaaggaagataacaaactcttaaccaagtaatcctctaactaactgctcaactaacaagtaacttaaactttagcaagatacttatttttcttagttttgtctatgtgtccaaatggcatgat

SEQ ID NO: 268235 - DNA, 576 bp, Cannabis indica
ccacattctaaatatgtcttttttgttagcaattcttctcaagttattatattaaattatataagatttaatatttaattgtattaataacaaagggtgttaaatactactggtgcattttgtcatttctccatttaaatatagaggaatactaaaagagaatgtctagcgccccttcaacctataatatcgttattaatgcaattaaatatcgagtcttatacattttaatataacttttattaaagagaaatgataaagggcatcagtggtgtctagcaccctcctatgtattaatatcgctattggtctaactaaatatcgagtcccatataatttaatataataacttttagtgagtatcgctagccaaccgtaacgtgacatgtcgagaaggtattaggcactactggtgcctaatagcaatgctctttattaaatattgctgaccaatcacagacattcattttaaaatagaaaaaaaggggggtttgcaaagagtagggatttcacaaacgattattttaagtggtgcaccacatatgtccagtagcaatatattacaaatgcaaattg

SEQ ID NO: 268236 - DNA, 1202 bp, Cannabis indica
taggttttttcttgtatttatgtttatccttttcttttggaggttatatctcatgctggtgttagtttctagttgcaacatctctaggtccctagataattgtagtttttttgtaccacaataatgttcttgcattttaataataaagtaatattacgacagtagcaggtttgggagttatcggaaccggttctatttaatttatgtttccgtaattgattttcttagctattgtgtgttatttagttttactcattttatgatttaagtcatttcgaaaaacggttcttgaattatttatttcagaaactaatttttttatttaactaatttaaggaactggtttttaatttagtcattttgagaaccgatttttgatttagttaattcaacgaaccagttttgatttatttgtttttatataactggtttttgtgtgtgagtttttatcttaattgctttacggaacgagtttttttgtctcaaatttttaactagttaataaatataaccggtttcattatattatatttgagtttattgtgtattattatttgtatttatttattttgttatggaactggttctttttatatttatacctcaatattttttagaattgatccatacttttttaaaaaaaaagaattataacccgttttatgaggtattgtgtgttatgaggtattttgttgtggaactaattttgtttttaatttatgtttcagtatttgaagaactaatttcctctttgttttttaattataatcagtttgagttattgcgtgttacttgtttgtattcattatgttatataactgattctattttagctataaccgatttgatttatttcgtgttatttgtttttattcattataataatgttatagaatcggttatatttaattataattagtttgagttattttgtgttatttgtttttattaattatgttacagaaccgattatatttaaattataaccggtttgagttattttgtgttatttttttttattcattatatcatagaaccaattctatttttatttatatctgatcaccacttaaaattttttttaaaaaaattgtaatcggttttatgaggtattatgtgttatgaggtattttattgtagaactagttttgtttttaatttaagtttcagtgttttacagttttaggaactgatttcccttt

SEQ ID NO: 268237 - DNA, 608 bp, Cannabis indica
tttttttttttttaagggaaaaaaaagtttttgcttagagctttttaacatgaaatgtttgttttcattggtgaaaggcattgagagttcgttcttgctctgtgacattcttttgatgtatttagagtgaaattaaaagtgtagatctccactagaaattgtttaaaagttttatataacttattctattgcaaaatgaaaacgtagtttacttaatgaagttttttcttgatgtagttgttcagctttaacccaatgtttggtaggactggaagaaatacagtaggaatatagaaaactaaaaagaaagtatcaaaattttatttcttctttagttgtttggtcatagatatgttaaaataggcttgttattttcctttttgtattcagtttttactttttcttttttactaccactggttttatggaatatttgagttgtattctgttatgttagttacagttggttggttgtcttcttgtaactaactttgtaactaattgtctattgtaatcttcttgagcttgagctatgaaaagctcactcccttttttgattcattaatgagaaattcgttctgtttccttcttctctttctttctggttt

SEQ ID NO: 268238 - DNA, 601 bp, Cannabis indica
atgagtcttagtccatgagtcagcttggaaagctttgatgtattacacaatgataatattcttttctgagcttaagaaccctaatttcaatcttggtatctagataatgatttttcaaccccttgcatgaagatacatccttctatttataggttagggtttcgactgttagagttttttgtataaagctagactcactaatggggtaaatacatttaatattgattttgggccaattaggtaaaattcaatttacaagataacgattatccatatttatatggtgcatttaatgatgacagttgtcgtacgctgccaaatttatacaataaatgtcgaaggatatcgcgttaggtgaatccttgagaatatacaataaaaatatggtttcactataatatatagtaatatataatttagttcaatctaattaattagttagtagttttaaaaggttagctataattaattaatatatattcaatatcccaagagtgtacatacacacgtatgtacgttatatattaatagaaaaaaaaatcgtatgaattcgacaaaatctagaatcctatttttttttatttaataagatttattttat

SEQ ID NO: 268239 - DNA, 1806 bp, Cannabis indica
aagaatcgtaaaccaagaatcgttaaaccaagaattgccgttagataggcacttttaatatataaagatatatataataattatataattaaaccgtgttaagtgttaagtgttaagatatactttgattaataatattgttttgtatgtaggaataattaatgataaaaaagaattaatcaaagagagaattaatcgaaggatatttttttttttgggaaaatcatggccattatgaaagccagtgaagagagaatacactataatcattctaatatgtatatgtaattaaggaaataattaatatcaaataacagaaaactaatgagacaaatatttgtatgttattataattaaaagcagaagtactaatttcattacaaaaaaaaaaaaaagcagaagtacttaaaataataataataataataataataataataataagtacttatcttgaaaacgcggtattaattaataagaaactttcaaagaggttacatattaaattttataatgcatcctcctctaaaagatacacgagcagctattaagcacgatgcttaacattttttagacatgtcgttttgcgattagctaacaatacttctacaaaattattacatttaaatatataagactcaatacttagttagaccaataatgatattgacaagtagaaatgtgctaaacactactagtgccctttaacatttcttgagatacactaatgtatctttatttatttcagtatttgagaaaaacttttagtacaattttttatagtcatatttgttatgagaaatactaaaagacactagtggtctctaacacatttctatgtgtcaatattgttattggtctaattaggtatcaggtcccatataatttaatataataacttttggggagtatcactagtcaatcgcaaggcgacatgtctagaggtgctaggcaccactggtgcctaataacaatgctcatttgttatagttatttaaagatgttataaaattttgagaaatttgaaaaaataattaccacgttaaaaacaaggttcattcaaataacctgttacagcgtgactttttttattttatatgcgtgtgaaatagattgtttgaacattggtttttatattataaattattctgaacttattaaaattttacagaatgtcttaaataactataacgtatataactatgaaaaaaaaacaaattaaaaaattattctaaatattaaaataaataaacttacatcgattacaattttttaaagaagtgtattatagcaacctatatttatgttgtcaccataaaataataacaaaagggatatgaatctttgtccctttgacaaaattgtatatagtttacaagtaacttgttaaaatataaaaccaaaagcaaagaattactgtatattagaatatttttcaattatggaataaaatattaaaattaattttgagataatgaaaatttcatatttattgaatttagacaaaattaattagatgatatactatgatcatattgtgatattcattactcgatttaattttctaattaattgtcaaaatattctgacaattaatgtagtgtagatactgatgtagtatctcacctataaatatagggtcttagtccccgagctcttcactcattctgtgtaaatagcaaattctatctaaagagagttgagaaagctcggaagtctgatttcccatatgtgacagtcagtagtcccgtgatctgtaaggggaaacaccgggtaagttgtgcaatcccacaccgcctggggaag

SEQ ID NO: 268240 - DNA, 2036 bp, Cannabis indica
tttaataactaaaaaaactaccttgagtggcatctggaaggcgcccttcttctactggtttatttgaatcctgagttgaaaagaaattaaacaatataaaatgttagtattaataatatttgaattataatttttagaaatattaagtcatgtttggctgaatttttactttctgcttttaacttctcaggaagaagagcaagttaccaaacatagtttctgttaatagagtttttaaaagctaacagttgaaactcattgacaataaaagtgttttcgaagcttcaaaaacctcaaaacaacttttaaaagcttaacaattttcaatgtaacatatttttaattgttggtgattaaaaaataaaaaaattacataaacggttatttttaataaaaaaaaatcacatttatgttcaaagtttttttttttacatttttacagtattttattaagatataacaaaaccacgtgaaagtaacagcaaaacaacacaaaaaataatatacaaataacaaaataaaaagaatatcacataaaaataaaagtacattaaaaaatcatattttatgtaaatcaaattataaaaatatttaaaatttcgtataactttatttttgtaattttttgttattttaatatatttgaaatattcctatacctttctaccgtagacaaagtcgatagttggacctccagttatttcaacagcaacaacaccagcaagctgagaaaaacatgtcaaaaactttgattaaaatagttgccaaacatatttttattttttaaaaattaaaaaaatatatatgaatatttcaatttttatgtttaaaacattgaagaaaaaaaaacaccctagttttcaaattaaaattatgtaaatatattattgtgaaggcatctccaatgattatgaatattgacctggtataagtctgcatatgtgattattggatgtttggacttcacttgctctgtaaataaacacaacatttaatcattaattattttttgttactatatatttatatataattaaagtcattactcaccacaaagatcaactgcaaatttcaaaccagtgtttgctttatgatttaactcttcaggtagccttatagagccattaggacctccactctttgttttagcatcatatgttccagcatcatgccacctgtattatattatattatattaattatatttataaaatgttaattaatatatttttttctaaattttgacatgtactatcgtgctttttaatttttcagaatatttgttcaattctgctcaattttattaacgagcatttgatgtaaataaaagtttaaaaatatgatttgatacatgttaaaacataatttgatacaaattcaaccaagaattaacttgtttgaaacattgtttatttttttagaattattcaatgaagaattataagatattctaaataacgatgtacacttaacaaaataaagcaacttaaattatgaatatgaatttgtaaagtgtgataaaaaaaaaattacttacgccaaacgaagcatgataggagcacaatttttggccgagataagggctcgaaggtctcgtcgtgctttctcaatttcgttagcatattctttgttgttacttgatgaactcataattaacaaaacaacaaacacacaccttttgaagccctttaatttacccccaaattatgttaacaactacactttgatgaacacaattaattaagataatatatatatataaatatatgtgtgtgcttgtatttattgaagagaagaaagttagggaggatattaagaaaggtatttattattttctcttagaagaagtaaggaaaggaatgaaaaaaataaataaataaaagacttcttttgtcatattccttttcttcctttctttcttctacatattaatattaaagctaattaggatattttttcttctaaactttaatatagtactaaatcatgctccttgaattttttttggttcgtatttaaaaaattacccttttcgt

SEQ ID NO: 268241 - DNA, 707 bp, Cannabis indica
ttgatttggcccttttttaactttatccgtacagttgaattatcctttattgtttgtatattctatttaaacaatgtcgcgaccgacctccaactctgctcgaggtacatttcatgtacgacgtggctcctattctcgagattaggggcttttatttccttcataagatttcacgccatttctcatatgttgtgggggctcccagtaattgtgggagatggacgagttcattccttatgtgaagggtgtggatggtgtttgtgttggtttttaagattcatattagagtcgcaatgaaagagaataaaaaatttggatttaataaaaattattgaatcggatatgaaccataaatcatggatctcaacacaattatacataatgaagcctaactattatttttacagattcttacctcttgttttctattagaattttctcactatcttttcgtattacacaatcgaacatccaattcaaaagaacttgttgatgagtttacactagggtcttccaagctagtatcaacacgctaggaatagagtgggctattaaattcaatttagaaaaatataatttagtgatcacagtgtgtactcaactcatgagacactgtgattaagatagggaagaacacaacacacacactacattagagagagttttgtgtgtggatgagaactagtgagacaaagagagagagagag

SEQ ID NO: 268242 - DNA, 617 bp, Cannabis indica
tatttcttttccaattaaggagggtagggaataatatataaatagatgtaatactaataaatacaccaaaaacaaaaagagtagattaacacacaaactaacatattatttcacttaatcattttcacaaacacataatattccaattagtccttaaaaaaaaaaaaaaacaaaaactacagaattatccaaaccactcactaaaaatcagtcataatttcaccattctcaaccacagaagccaagaaagccttcttctgcgaattcctaaccgaacagttccctctaatctcaccttccttaccggtcaacacattgagttgacccatcttagtcatggcgatcacaaatttctcgaaaaacagactctgattcaccgcgaaactcttcacgatctccttagtcttgctgtaagtgtagagatcttgatcggaggtgaaaagtccctgacgattcatgagatcgacgtagtatttgttgtcgaaggtgttgggtgttcggagatcttggaaggtgaaggcgtcgaagtctttagttgggcatatggatttgagattcttggcgaaggtttggtccatgactggatcttgggttgggtagagacggttgtcgaagga

SEQ ID NO: 268243 - DNA, 1049 bp, Cannabis indica
tactaaagcggtcattacacctaatcatttctatcaatatgtggtttcgatattctaaggaggtaagacgaattacaattctaagttcatttaaatgatctttgaattgcatatcaaatatttctccactcctatcagttcgcaagatttttaacaactttctgtttacatttattttctagaaattcataaaaattttcaaacatttcaaacttccagcataaggtaaatacctatagtaatcgtctaagaatctgacaaattactcataaccactcctagcttgtacatccctatgtccaaggataaacataccatccaagtggttatttaacacgtgttctctttgcaaagaaggattttgtcaaaaccactatgagcaagatatagtgccatagataatctattatcgttgttagtcttttgatgtatatgattcctagatctcgttacaacaaatagttttcatgtaatattaatggttacttggtcttagaatagttcaaattcattttcatacatcaacatgtagtttgatccattgaagtggatattaaaacttgtgaaagttaaacacaatatttgtgtaatttagaaactaaaatatcattctagcttgggctgtcactaaatgatattataactctaagtcaaccatacaaaatgcttaatattgatttcaaaattataatcttaagtttatgtccaatcgatgtttagtagcaatgtaagaatgagattcaatctcattttctaaaaattgaaaatagttatcatttcttggatagaatatctagaatatattcatctgcgtcactcatttcttagaagaaaatagaacaacatcgtcataaaagtttatattctttcttttccaatgatgtatatctttagaaatttcttcacaaaaaagttatggaggaagtctaaggagtaatttcaattaaaataaaaatccaacgatgtcccgtttaggagagagtcaaagttattcttattttatgagctttttcattgtttcagtaccgtatttaggttgttaatcaaca

SEQ ID NO: 268244 - DNA, 618 bp, Cannabis indica
attccaatgtaacaaaaaaaaatttaatgatttttttatatcaattgttttaatgcattttaaattttatttcattcaattcttattcccattctcattcctattcctatattttcattcctcacaaccaaacgctaccttagtttatcattataacactttttatgtaattattttttacccgaactctcaaattatggtagattagccttggatcaatctaacattgggaaattatttgaaaaaaaatgaatgaaatacaactgaaagggaaagtttttattattatttctaaatttcaagaggaatttcttacaaaaaaaaaataatttaaaagaaaaaattctacaaatatcataatttggaagtaaaaatcatttttattcttactaattaaatctcttaatatacatatatgtaggggtgtgcataaatcattcaatccaatgacaactgatcgatccaattacaactaatcaccaaacaaaagatatttgattgtgatcgaattagatttgatattattttttaatatccaattggatcggatcggattggatgttgtggtgtccgaaaatccaatacatctaacatccaatcgaatcaattagtattttt

SEQ ID NO: 268245 - DNA, 604 bp, Cannabis indica
aatttgaattaaattgtttaaaccaaaatatatattatgcatatatccaaattgtataacatatattataatatatatcatacaaaatataatttcatcggcacaagtcgccgatcgacataagccataaaatatgtaatgcatatataatatataactataaaagtgggctgaagcaagaaaccataaaacaaaataaattgaatataacacttacagatgctctaacaattttcagaataaatatacacgcaattgatacaaaagtaataaaatcaaaagcaattgataacacatatctcttcaatcaatcacatgcatcattcattatattactgcataatattaataaaaagaaatcgtaatcatcaaccgcaaaacattctcatcacaatatatatatatatataccataaagaaatatatatcttttgaagccaaaaactcatataattgaaacattcaatatatgtattcaatcaaaatagtgacgccgactgtgaattaaaattacttgatatgttttataaaaatataccgaaccatatatatatatgaaaattaaaaaaccctaattttcaaaatccccaaatttcataaacaa

SEQ ID NO: 268246 - DNA, 825 bp, Cannabis indica
attgatgtttgctagtatgttggctttgagttgagaaacttttagtcctgtgttgcatttgagtgtacctatggaaggacacagtgaggtattcaccatatgtaagtcagtttgtattgtgtttgagggacacaagttgtctggaaacttattagtgttgcctttgggaaaatttgatgtgattcttggtatagattggctgtttaaataccaagctattgtagattgttcacgcaaaagagtgactcttttgaccccgagaggtgattccattgtttatcgagccaacatgagtgcagtgagaaaaaatcccatcttaagggcatgcttgggtgggaagagaaatttagagtgcatggaaatttgtttacaatcgaggatgggtctagagatttagaccagttcccttagatatcactggttagtggttttttgaatatgtttccagaagatttaccagggttaccacgtaatagggagatcaagttttgcattgatttgattcctagagctcaaccagttgctattgctctttaccgcatgacacatgccgagttggttgaattgagaaaaaaatttggggagttaaatgataagggttacattagatatagtacttctccatggggaactccagctttgtttgccaagaaagatgatggaactttgcgactttgtgtcgactatagaaagttgaatcagatgacaattaaaaataagtatcctcttgtaaggattgatgaattattagatcaacttggtgttggaaatattttaccaggatctagatttactaacaagcatatttcattaacatcctaatat

SEQ ID NO: 268247 - DNA, 885 bp, Cannabis indica
tttatgcactgtttgtttttctggatttctctggagttacagagttacattctgtaactacagaaaaactgttttcagtaccagtttcatcatttcgcatttaatttatcacttaattaaataattaagctgaaaatattaaaatacagaatttcaaatttaattataaataaaataaaattattatttgtaaaaaaatatatttattaattaataaacttattatcattatatttgtgattaattaaaatgaataatgatttacatatattattttactaaataatgttacgtgcaaggcacaaatatttagttttatattaagttatatatttttattttcaagtgttacaataaataatattatatataatttaattaaataagtaatatttattttatgaaaaaatatgtttaatataaaaggttatgaaatataaaaaagatataatagtaatttgataaagaaaattaaattaaaatattttttacgaaaaataaaattaaacataaaatgttagtaaaatatattaaaagtaattaattgattaattctttattttgtgtagtcattaactataaagatgaaaaatacataagttaaaatcaaatgtcacaacacaatttacatggccaagtatattaaggctactatatatatgataaaataataacactattttgttacttattattatttgtgtaacaaccaaatccactttttaatggtagaaaatctcaaacttttgactaaattattttactaatatcagcttgaagattttttttttatttaaatttgaaaaaaaaataatattgaattaatcaaaaattaaataatgaatcaaatcataaatatttaaattaatttaaaaataatttaaa

SEQ ID NO: 268248 - DNA, 1266 bp, Cannabis indica
aaaaaaaaaaaccttataaataaggcaacaacaacctcaaaaaattgaagaaacataataataataatattgtcttaaaaaaaatttaaattttttagaataagtaaaaaaaaattatgaaacataatactaaatatatatacattaaaaatgaattgttaataaaatattcgaaagaaagacttttttaaaaataaaataaaattggataacaaaaaatatgctcaaataaaaattccaatgacatgtaagaaaaattagacactatcaactcaaaaatatacttatgaaattttttatttaaacaaaaaccaattaaaaaagaagtaagaattaactttatatttatttactgtaatttaattcaaaaaatataactataagtaatgacttaaaaactaagtatatactaatttttcatttggcaaaaataataataataaaaaatcattacataacaaattaaacatcactaacatactttttcaactaaaatgaaatttccaaactaataataaaaaaattaatcagttagataaattagactacaattaaaacatatgcatatgtgttatcaaacaatatagaataatataaaataaatatgaaaaaaagaaaaagaagatgaagagagaaagagaaactgaatgagtatttttcaattgtttattctaacggggtgaacccctatttatacaaaaatatgactaaaagaatggaaaactaaatcaatgtaataaaggaaaatacaactaagcaataatggtgataattaatttggtaatttggacatccataaataatatttcataacattcccccttggatgtccataagaattgtctcattaaaaaccttgctgaaaaaaattggtcaaaagaaaaagagtacagtgtaaactaacttccgctcatttaggtattcattgagatcttctaatcaacaaattttgatcttgtctgccgtcttctcaaatattgatattggtaataactttttgcataagtttgcaagattgacacttgattgaatatgttggacacctatatacattctcttgaaatgtataaagaaaaatttggtgaaatgtattttaattctatctccttcaatggacgctccttttaattgagcgatgcaagtagtattgacttcatagagaactgcttctgttgatacatctttattgagtgtcatccatatgtttcctgaatatgttatgtcaatgatgttactctcacatattctctacttgtttcataaaat

SEQ ID NO: 268249 - DNA, 940 bp, Cannabis indica
ttttaaaaatagaataaaaaaatccaagatgccacctaaacttattatatgctatcatatagattatagatatatagatagattagggataatcaaaaccaaacaagttatatatttttaagaaagaaaagtagaacaattcagaaggatttataaagacagtgattttagaccattctgtgttattttaaagtacagaggaccattagaattattgtcaaagcagaggtcattccggagagactagaaccacctgttttcccacgttgcatcctttgaagagccctaccaaagcttttggggcactctctaacccttcagctatatcttcaacatacacaatttttccttcttttaagtaaggcacaacatattcgagaaattttgggtataggtggtaatagtcagcaaccaaaaatccaaccattcgagcacttttccacacaagattcgtcagattatgtacaccttcagtttgttcaaggttgtactgtgagatcattccacaaacagaaattcgagcatggcttctcatgttttgtagaacagcatctagcagctttcccccaacattatcaaagtatatatctataccttctggaaaatacctgcccaaaaatataaaaagggattatctctattctatcattgtaacatttcctaaactaataaggattacaatgaattatgagtgcttctcaagaacataatatttggaattccaccaatgtacattgactgacctttttaaagctacatcaaagtcaggctcttctttatagttgaaagcctcatcaaagccaaatttgttcttcaacaaatcaacctgtgtagtggtatgaaatgtttcataagagaggtatattcaaatgaagaattattaagaccatgttagccatatgccatagtgctcttgactctggtataaatgtacggagtg

SEQ ID NO: 268250 - DNA, 1719 bp, Cannabis indica
gataatcaatgagtcagatgtgctttatcacataaaaaaatttgagaactaaaacttcactactctcgttcaaggaaatttggtgcctaacagaaggattacctgcagaaagcagagactgttaagcgctcacacaaagccaagctttgcctagatggtatcacaccaatgttgtacctgttaaatgcaaatattcttaatgattaactatcaacagccattaaaaaagtatatataaccatacatggttataggaacactccaaattctaagatatgatgattgttgaaacacatgcatgtcacatggataaaccctcaatatttacacattgttctctgcaaatcacatctattattagcttttacaaagtctttaagctacactgaaaacacaaccagaagtggaatatactgaacaagaacaagctctcaaatatgtcttttcaataaaactcaacatcattatcgtaactggattaatgacacaaccaatctcatgattatgaagcatattgtcaacataagtacaacaaagtcatgttttttttttttttaaaataaataaaaaaaatcctataaatcactcatttttgttctttcttgacaaatacatatatgtatatataatatacaatatctgaactgtgaccaatttactaagtatttgtgtgccatttgattcgatacctcaactaaaaaccatgtacactaataatctcagcgaaacattcttaaaaaaaaaaggcctatagcattgaacagaatgatagaaaggggactcacatcttctccaagagcatatcagtcatctgaatacgaaaagggtcttttccatccatcttcatcaatatgttaaccaatttatgcaccattcgacacaaacccgaatacctgaacaaaaagcactgatatagaaaaatcaaatagaccaaaaagcataatggaagaaacaaaaaaaattaattacttcttataatcgtcacgaccagtaacatgatagcgctgcataacatgagactctctgtggcctccttcgctcttccattccaaaaaattgactttcttcagtaactttttctcgtggaaacttagctttctcatggttttacttacagttgttctttgtcgttgaaaccttcaatcacttcagaaactaccaattgtaaatttgaaaccttatcgaagaattggatgatggggctaagagcttaaacgatttggaagatgggtccagtccggtaagagattttcagtgaagaaattgagtgaaaactgtgagaatagttcaaattggaacaagggtactttagaacgagctaaggttggtgagagagttggaaagcaaagcaatggtggattgaggaataagaaagtgaataggagaagaacaaggtttaggtctgataaattgaattgctccgaacagagccttggaaggaggccaagattgcctatactaattttggaaggaatgattgtaggtacagtaggagcaagttgaattagggacgggtttcaggttttcgggtttgggtgtctagaattaaaaataaataaaaaaaaaattatttgaaaaaaatagaaattaaactaattttggtatatttacttaaacaaatttaaattttggaaaaaaaattagacaaatttatttttataaaatttagttttgacaaaaataaattttaatacacttttatatttaaatggattttca

SEQ ID NO: 268251 - DNA, 824 bp, Cannabis indica
actattctatgcattggtagaagaaataatatataacattaggtatagtattatatgtgagaaatgctagggagtttaaggtattaagcacatattattagtgcattttaatatcaagtcatacatattttaatttaataaataatataaaaacttactaactaattataggacatcacatcgctgaaatattatcgctgaaatattaagcactttaaaatactaaataacaatattcaatatatatttgccctcatatgcataaaatggtttataggtaaaagtttgaatcatcacacctttatattatattgatggaaaatgaagacatttttggccggtatatatatttggctataatttcactaccaaacatattatattgtaaaggaatcttggaccagtatataaatatatatataatatattaatttataagaaatggccccatgcaagaatgagcattaataataatttggcaatacatttcatttgattcctatagaaggtagctagcttagtccccatacccagtagagacagacccaacctatatattatatactgccttatcaactccacaattaacttcccaaaaattcatgcacgatacatatgactggtatctttcatttcaaagatatatatatatatatatatatatatatatatacacacatatacatatatgtggatgatgatcttcatgtataattttagatagaaacaatatagtgtttatagagcactacaaaaatcttacttttagtcacaacaaaacttgtgactaaaagtaaaaaaattgtgactaattacaaattatt

SEQ ID NO: 268252 - DNA, 663 bp, Cannabis indica
gtttaaatttaaattgtaatattctaaaaagagaacaacacttttattatacagtcacatttaatataatatatatttatatttttttattatttgtaaatatttaaatatttaattatttttgtatcgcgtattggaccttaaagcttttacgagtttcaaaattttttaccacactacaccaaaagtactaaaattattattttgataataattaatatatttatataagggtcctaaaatttaattttatcttaaatctcatatataggcgtagtcaggagcggacccatatagaagcgagacaggataatcacctcccttagaaaaaaaaaaaaaattatataaacataatggtgttcataaaatagctgattcaattcaatttgcacgatccaatccaatccaatccaatttgtaaagcgcggatatccgcacttgtgcggattggattggattggaaaattcaaaattcacacttgtgcagattgaatgttgattgacatgtaaaagtaaccgatctaatccaatctacacatatttataaaaaaattaaaaaattatatatacaaacaatattttaatataaagaaaatagtaatttaaaagtctaatacatatactacaattatatttcaaattttaatagatcaaatgtatatt

SEQ ID NO: 268253 - DNA, 1134 bp, Cannabis indica
aattaaaaatattcaaaaaaaaaaaaaaaaacaaaaaaactcacgtacgtgggattatttattatacagttttatatatatatatatatataaatcagccagtttattattaatccacaaatcttttacaatcaattacgatgaaaatctttatgtcaaagacctcatgagcaacttttttttacaattgattggaatttttatcatactgttagatgggtcaaataatcttgacagatgagattagctagattagttattcagacctctaacatggactagacaaattatacagtctaatctaatccaatctacgtgtcaaacagtcccttaagagaatatggagaatggagatacaaataagtaatggaaagctaaaatataactcacttaataataaatatgttgcactggtgtatcaaaaagtgatataaatttgacagataacaaatcttgtgtcaaatataacacaccgttttctataatgcaaaatttacattaaaataaaagtagtactttttgttaatttatatttgtgttatttgtattattttattagtatatttaaaatttaatgtaaatctaccacaaacttatttatttatttattttgtgaaaataccacaaggagatggtctaagccaaggacattaaaaaataaagatcagatgtatttatattggtgagcactgttactttaaaatggggatttattgttgtgaaattagggtttaatataacaagcaattaatgatgaacagtgttgtactttgagcatgcatttactttcctggccactactactacatttttttttgaaaatttcatattagaaggtagaccatatctgacactaaaagattactcggtccatttgtccaaatttggtttatgtgacgagacataaccataaaaccattttttttatttatttacggtcgtctatacatttggtaatatgtgttttatctaaatacaaattcaatactttgtgtttttaataatatttatttactactctatattttaaaatcatataaatttggtacttaaattcaagattttttgataaaatttatcaatacaattaaactgtctaaaattttataaattttaaattcaaatttaattatt

SEQ ID NO: 268254 - DNA, 907 bp, Cannabis indica
atgaagcactgtgttgaacatcatctaaaggatttctaaagacttgacatgtccccttgtcggagagggatgtgcatcttgccgggtagcaacaggcccttgtcataacattgcagctagcaccaattttgatacaatttttgataggggcacaatatctattctcaccccataaccactcaccttcacaatacagtccgccacagcaaaccttttgttgtgcaatatgacaatattcgccaggtttcatacacctgtcaacattaggttccagattcagatcaacatccggttgtagtcggccaaagcaccccataatcatcacacccactactaacattattacaataaaagtcttcattcttactctataattcgttattttttttttctttttattttgttgtgatataatggccgatggtgcgtgttatttatagagaaattaaggaaaagtagtttggtgagaataagtgagaacaaatatcttatattgtgtggtgcaccaatgttcttataaattataagcttgtggggatcaatagcaaagcttttagatgcttggttggtttatttctgctacagaccactgtagggtgaaattatatttttgctcagtacgtatggatgggcattaaattggttgagacaaaaaaaataattgtgcattatttgctctattttttgtacaaactaattggatctattgtacaatatattgatctgtatttgtcgcatatatatttcatatttttaattacacacttatatatcatattttttttatggattaaatactatatattacaaattttgtttcagcggtcactacaaattttattaaatgatttgctttgcactattaaaaaagagttttaaaagcggttattttacaaaaaaaaaaaaa

SEQ ID NO: 268255 - DNA, 1337 bp, Cannabis indica
ataaaatattcatttatcagaatcaataatattattttatttccttaattagaaatattctaatagaattttcacaaaaacaaaaaagaaagacttgtttttgtctatttataattttttttttcattttatgattttattttactaaatttgttttacaattttttttttcacaattattttgtataattttttggttttacaattttttacaacttatatgagtttttttatcttttgttaccttttgtggtacttaacaccaataatgatatgcaactatttatggtatttagcacctattttagtatttttgacaattttttttacaacagcttttgtgaaggttttttttatttttttttatttttaatgatcttaattctttttttcttatgaaattttttttatatatatgtaatattttgtacaatattttttttttagtgaatcatgtatatattattattattaatataatattattattgaacactttaagatgtctaacattatacaaatatgataatgacacttaataattggttagtattttctcatattattcattaaattaaaatatgtgagacccaataataaaatacaccaataacagtatgccaccatttatggtatttagcacattctttaatatttttcttattatttctaataaatagtgtataatttaagctaaaaaatgagtcaatttatttttggccttaattttataacagtgcttcaatgcatttaggataaaatttactctcttttgatagaaatgtataaaaaattcaacaaagtattaaatttttactaaattatataaaaattctattaaatatataagtaaactgtaaaagttgattaattacattaataagtggccaagagtaaataaaaaaagtaatatttattatgatataaaatttgacacatggtatattatgtattaaatttgacacaacttttagcatgtgttaaatttggacaactttatgtaccactattagagttcacttttatgaagaggactttttttttaaagaattataaagaggacttgaaatatgcctatacgcgatatttttagctctccattaaatttgctcttaatatgtacacattttaatcactttaattataattgtaactttttttattatacataattttttttttgtcatgtttggagttgtgcgtcatgttttgtctgtaccaaatatttatgtttttgtcatttttttaaaacctcaattttttatttttatttttttctcaaaaaaattttattgtttaaaatattttttaagccttttttatatttttttatcatc

SEQ ID NO: 268256 - DNA, 537 bp, Cannabis indica
aaatggtatactgagctaactgaagatgattaggtatagtttagttgagatgttggtcttttctatgatttatatattgttatacaattatatatatatatatatgtatatatataataatcttttgtttctttaataccttccaattccaaatcagtatataattattactaagcaacttggagggtacataaattaaatatatcatatattatatctataatctataactatataaaagtgtcaataatttttaggctttacatattaaattactattttaaccttttattttatgttttcattaaaaagaattatattttaatataaattacattatattttactatttttttttttttgttttctaattaattcctattgataattatatattagccaataataattcaacaaatcaatatataaataataatataatacaatatacatatattataattaattaatcataaacattatcattaattacaaaaattaagtagaatattctaattttcttatataattataata

SEQ ID NO: 268257 - DNA, 808 bp, Cannabis indica
cgcttttcccgctgccttttctgttgtatattgttccctacatcaaaggtcactgggacatcaacaaggattccttttgaccccaaatcctccatttccgcctcactagttcgggctttgcaagtcctatccccgtttggactcttggttgactcattcatcatagcttctcccattctttttcggatgcccattccattctgttcctttctgttatgcatgtcttcttggatgtcctcatcattccggttcacataagaagggatagaattaatgtttagattggtttcatctatgtgtataataggttgttgataattattaatgtaagtagaatgaagggggttacctttcattgattttatgttctgaagtgagtcctctccctctttggatatttgctctatcaaccgagatggggttttgtttttgattccctgactatcgggttgattatgcaggtttgtctctcgtttattagttgaatcaattgtccccgtcatatataccttaagccacgaaccgtatgcctgagccacttctccattttctttaatcacgttagcccgaatttcagaacattggcgtaattcatgcccaatctttccacaattgaagcacatatatggtagctgatcgtattgaaattaaagccatctgcgccttcctttatgaggaaacaagtatcctgggaaaagtttggattgaacggagttctttactttgaatttaaagaatccgttaattgttatgcgattgatatccggttcttggatgtctataacctctcctgccataccagctagac

SEQ ID NO: 268258 - DNA, 676 bp, Cannabis indica
taacatagaaaaaaactagcataaatttagtatacgtgcctcgcacgtaattttttactagtatatataaatatacttatcagatctatttatattttttactgtgatcatatattgtaagacacttaaatatatatatatatatatatatattatactgtgttaattttatgtggcattaaaccgattgaccattataaatttaaataataaaatagaaaaaaaaaacgacaaaaataaacttaaaactgttattgtgtaaatattttcaaatgtgtgtgcagatataataatgctctaactaaattgctcaaaattaaaataattctctaactaataaaggtatatatattttttatttatatattgagacagtttactaaattaattagttccttcaaaatattaaaatatataaaaactaaattagcattattattatagcatatatttaatttaacatttagaaaaaagacatgtacacataattgcgtatcaagttattccatatgtaaagaatacattatataacttttttcacttttttttttatttttttaaccgtacaaactattaatgaataatatatatataatttttttcccaacaccaatctcgataaatattatttcatgatctaattaattatttttaataaattataaaattttattaa

SEQ ID NO: 268259 - DNA, 1634 bp, Cannabis indica
aagaattaaataaagaagtaagtgacacatatatatttgccttgtaatatagggtggtaagttgaaaaaaattgtatatttatgtatatacattattctatacaagtatttgtcctcttgaatggttggtagtgataaagtctagaagtggtagtagctgtttttgttctttttattgttgaagttccaaattttttctttgatgagaaaaaaaaattattaatcaatattttataaatttattttttttaaaaaaataaaataaaatactacataaattttaaaatagtcaaaaattttaaaatcatatgtattgaaacacaaagttttattaggttttttttttttttttttgatgtacatatttgcttttataaacatttattatatacattatacattaattaaaaaaaaaacatttattatattatatataaaaatgaatgataaaataggaggtcttttaatatggaaggctttgtgtaatagtttaaagtgttatatgcttgggtcggcctgaatgttatgtataatttaaaagtaatatataatcaacttcttttacaaaaaagtgacacacattataaaagaaaaagctaagattggaattagaattgggtgtaattaaaagtaattacatagttttatatgtttgtttgaccacataattatataattagagctaattagagacctcaattacactctctaatttctataccccatgagaacataagaatcggttgttactaactattttgtcaaataagatattaggaatttataagtaattactgttaaaattcttcaacactcatacaactgtaaatattcagatctatgaacacatatgtttatataagtgtatttagacaaagaaatctatgtctatagaaaaacttttattaatcatagttaggttattaattttaggtatttctaatttagtcctttaataaattagaaatatcacttaaggtatctacacatttagtacactttaatactcaatgacctataattactaaaatatcacttatttaggtcaaacttcaaataacaatacatcaatacctatgagcccatattgaggattttaatctaacaatctcccacttgagctacatatattttcttatagtgtgtaaccttataattaagcacttaactttgctatcgtaattatagactattttaaaataatctcgtccattgattgtactaatataggatcaaagcggctttttccatatttagcatagctaaacccattaatggtcacgtatatcaatataactaaatgtcatagatcaattatgaatgtgtagcatggaaattatatataaatgtgatcttaacatgcctatctccagggacggagggactttagcctatatgtagacttaagccctcactcaaatatatatatcaaatttttcacatgtagatatatacatatattaattcactttactcaatttattaaagcccaatttataaaagcccttactcaatatcttaatcatgatttatgagtctatcctcattctaatcaagcccattttataagtagcccaatacaaataataaaaaaataacactttattaaaaaaataaaataatactattgacaa

SEQ ID NO: 268260 - DNA, 1676 bp, Cannabis indica
gtgcttgagactttaggaaagggaaatttgtggattttgccaagacaacatgctgaacaaattgaaaattgagaatctttattgacagaggggatattacaagatctaagaacggtttgaacaaccttctcagaaggatgtcccaaccgattatgccacaaagtgaaattgttttgaacacttgtattacatctgaaacaatctgaaatcactacagaggcattatttaaggtgacaacaaatgtacactttgacttgggatgagaatctaaagtggcaactgaagtgttgattggagagttgagactgctagtggtttcacactgatttggctgagtacactggctgctattggtgggaatagggctcgaataaattgtgccaatttgagagggatcaaaagtatataggccattcttgtgcatccccatcagcaaagtagtatgactcacttcctccttcacatagcaaaaatcagcatgaaattcaaaataaacattgttatcttttgcaaactttgctacactaataaggttttttgtgatttcaggcacatgtagtaagttattcaagactaaggaatgagaggaatgctgaggaataaagaaagattgaccaacatgctttatagacaaacctgtaccatctcctacatacattcaatcttggccctcatagtcatagcaattggcaagattttgagcctgtggcgtgcaatgattggtggctccagagtcgggataccaattagcatcacttgtgttgttgttgctagctaagttggcctgtggctgctgagattgtccagtaccactgctgctattgttggctcctgcctgtgagcttgtaaagttcttatcaaatcgataaaaaaatcatgggctgtatgaccgaaccttaaacacagttgacattgaactctattgttcaaattaactccagatctgccaccacgattcagatgaaaattgcctctaccagaaccttgtccagccatgtaaccctgctcatttccacgatttcctctgtttccaaactgattggcaaactgattgccaaaattcccaacaccacgaccatattgctgtttgaatcttctccaagcaagattcgcttccatcatagagtcttgatcatctgtcactatattggcactaaggtccaattctttccctgatttctcgattcttgattcagatgcaagcagaaaagcctcaatttctcctacagtgtactcttcaacttgagtattagtcgaaatgacaaacgtgtcgtactcgctcgggagtcccttgaatatagcagccacatggtcacgatctcttaaagtttcacccacggatgcaagcaaatcaacattctacttgacttttaagaggtaatcattaagactcaaagctcctttcttgagattttgaagtttcgttcgaaattccataatcttggatgaaacctgcagagtaaaatgcttttccaaagttgtccagatctgctgtgctgtgttgcaacctacaatccttgtgaggagactctcggtcatggaggacagcaaccacgacaccagtaattgatcttgcacctcccaatctatgaagatctaattcactctgttatgagcgcgatcatcctcggtaagaaattcagctggaggaggttccttgatgaatttcaaaagt

SEQ ID NO: 268261 - DNA, 931 bp, Cannabis indica
atttacttgcatttctctaaaaaaaaaactaccatctagttaaaaagaacaaatggttaacatttacttttgtcaaaaaagtgtctacttgtacattgtatttttagaatagttgtgtttttaataattcttatttagtactttatattttaaaattatacatatttagtcccttaaactcaaatttaattgaaaaaaatctatcaatactatcaaattatctttaattttatgagttataaattcaaatttaattattaataacatataatgaaaactgtttagttaaattgataaaattgtgttaattaaatttgatttaaggataggctaattaggatttttacccccattaactttaccatgtactaaatcatattccttgaatttttttagctgttaaaaattctccctaaacttttttagctattaaaaatttctcataaactattgagattgttggatttaaagacatttgtccagtttcatttaattttactgattttttggttgtccatgcattaaatcatgctccctagattttgatatctaccaaataatgctcctcgaacttggacatatactaaattaagctcctgaactttcatccatgttagattttccttaactaaaaattaaaaaaaaaaaaattaacaatctcaatagtttaagaagaatttttaatggtcttaaaagctgagatggcataatttattacatgttaaaattcaagaacaaaaatataattaaccattagaatactatatgtacattctcaaactgaaaaataccaaatgaacattataaaaaatcagagtactaattatacttttcaaaaatacatatgactaaaagagtatattccccaattgaattttatgtaagtgtttgttttgtctatgagaagatgcaagtgttacttactgtctgt

SEQ ID NO: 268262 - DNA, 1015 bp, Cannabis indica
tagaaacacttgtgttagtctgtaggatcagtcgtcattccaggaagcaactatagtgacgtactcgtgtataagagctatgattctgtgggtgtaagggcccaatagaggcttgaagcagggacgttacagtttgagctagtttggtgtggttaagaatctatgcattttttaacaatggtgtcttctatttataggtgggaatgaccattgaatatttctctttctctcgttcggattggtccacatggacttgttctcttcatatccttgcatgcactttcctctttgctttttcccttcaaatttcgcaaattttgttctttaattttccaagctctactctgttctctgagcttcctgagctctactccactttctcggtattccctttaatgaaacaatgtgttccatattgttcctgtcacatcatttcattagttctaccatagttattatgactaaaattacttttatactctcgatattatttttatcccttaccccctgtattagcacctaaacataatattaattaatcaattgatctagttaccattggattacaaagacaatcaattttaatcacaatcaacgaccaaaattgaatgcggcaccggtgacacaaaaaagtggtatgtgaggttaaccgggtcttatatatataaaactaggggtattcataaaataccaaattcaatccaatccgcacgattcaatcgaacccaatttgtaaaatgcagatatatgtacttgtacagattggattggattgaattggaaaatctaaaattcgctcttgtacagattggatgttgattgacatgtaaaagtaaccgatctaattcaattcacacatatttggatatatttgaaaaattatatatacaactaatattttattgtaaaaaatagaaatttaaaaaatttaatacatacgatacaaatatatttaaaaacataatatataaaatgtatattctattcatatttataaagaaaatataatttaaaa

SEQ ID NO: 268263 - DNA, 633 bp, Cannabis indica
atatatatatatatatttaagagacacatcatcatcatcagtataattaaatatatatatatttcatattaaattacacacacaacaacaaataattacatttgattatcttttaatttctttttaatatcggccgaaatgttaaaaagatgagcaagctttagaaaagggaatgcattgtcagctatataatcattaattagtatttaattaaacatatctttaattatataaataaatataagttgttaaatttgttctccaaatctcgacttaagacagaagattcttttatcagcttttgtcttgaaaaaagtaaatcacgtaaacaacatgaattggtcttttgcatttctcaacaaaaatatatttaaatttaaaagtaaaggaaaaaaaaaaaaaactaataaatgaagtaaaattttgggagacttagtcaaataaattatttcattaactaatacatactttagttaattaatggttacaaatcattgtcaatgaccaaagaaaatcatattataattttctagaaaatatctaactcacatataattgataggggagtaattacataaaatgtttttttaaaaaaataataacacaaaaattacattaaaataacatctaaat

SEQ ID NO: 268264 - DNA, 1552 bp, Cannabis indica
gaaaatccgagagaaaatcggagagaaaatacgagagagatagtatcgtgaaatctggtgtattattttagaaaatatgtagttttttttttaagttaagcctatttatatactttttggtttctcattttatcattgatttatttttttgttccattatttttttgatgcaataaaatataaatgtcactaaaactttttatatttatgaaaattcctactaaaaaaaaactaaaaatggcctaaacaagccaaaacagcaataaaataatcccaaacaaaaggcaaagatataattatatatgtaataatatttattaaattaaatatgattagttaaaaattaataaaatttatatgattgtaattgctaaagatttctttaaaatttttaataatataataagatcatagatattaactataaaatgttaaaaatatttaaacaaataaaaactataaataatggctctacttttgatttagagtattgtttcgggttgggatgggtggctagaaatcatgatgtttgacttttggaggttgtttccattagtagatcgggaaagcttaattctgctattgtggaggctattggtgtggtcgtcggtttatcttgaaactaattgcttgatggtgtttcaagccattaacaattcagttgctatgtcttctatttttggttttattgtccaagactgtaaatcttcttgcttcttctcctactatatcaagtttagttttgttaaacgtctgctagcaaagatgctcatttatcttgctcacagtttttgttttgtaccagttcgcatatatagtgagggagaggaatgcccctatcttaatatattgtaatgatagatttaattaattcataagtgtcattcttattaaaaatatgtatatattaaatataaaaagaaatctatgaaatagcgaataaaatgatcattatttattgttattacttaatactatagtttcaactaatatatttatgactcgtttagtacattgtattagttcgtattagattgtattgtattgtattatattaaattgggttatataatatatttttatataatattatgttaaattttaatttatactaaaatatcacatatttatatgtccataaaaatcaataccataaaaagctattccctcgtgttttgctctcgcagcttcaggctagtggctatggctaaaacgaggtccaagattcaagggaaggctagatttgtgggcaagaaatcgaagaagaaacaatctcaatcgactatggaagctatttagattggggctcgatgtgaggaaactggagttgaaccgcttgaggtctcagaggaggaggagacaacggaagaggatcctgctcttgtggatttattccagaaatctctatctccaagatcgtccctaaagcttatacagaggcaggaagacgttcagaaggactttatccagtttctgtaggccaacaaccactgtaacagtgatgtgaaacaaggttaatccccaatccttcctgttttgagatctggtattg

SEQ ID NO: 268265 - DNA, 698 bp, Cannabis indica
tcttagagaaggatgtgttagagagtctcacaatgttaatgtatagaaatacaatagaatgtacaagataaataaatcactctttcgattatcagttgattgaaacctcattaacattatttcaaattttaacaaactaaacatccatgatttatgggatctccctttattaaaaaataaaataaaaatatgtgtgtgttctcttgtatagactcaaaaattaacgatgttttatataaatgcagaaaaatttaattaacttcatatatatttatatagcaatataccagcttacgtggattataacatattataatgttttacagagaatggaaactagctagcttaggttgtagttaagagaagcaaaagatcttggtgtaaaaagaaaagatatagttactcgtggagaatcaccaactttgtcggagaattactcatgagaaaagaaatgaaaactgagcaatatacactacttctgtttcagttttcacgaactgatttttttttctattttattatttttttgcttggtttctacttttgctgtttttttctttacagagatttttgtagtgggggctagcaataaggcaagaaatcaaagactccactgctacatgacacctctcacggaacaacaacaagatcgaagaacaaaataacagcctttcatgtctcattttttgctagttata

SEQ ID NO: 268266 - DNA, 1032 bp, Cannabis indica
ttttttttcttcaaatttttggtgtattatgtaaaaaaaattctaatttttataaaatattgattcaataattaatttgaaaaaaatatatttatatacaattaaaaaaaaggtcattcgtatatgcaaaaaaaaaaaactttctccaaatatttattttctcattattaataataaattattttggtatatttcctttataattttttttacaaatttacttatgcataaaagtgaataggtaactcaatgtttgatttgtttatgtatagagaaaacttattagatgtgaaagtaatgattacaagtgagatactgtgatgacagtagttttggatgtagtgacggctagaagtgagattcggtgatgacaacggttttgaaatcatatgatgagtttttttttttcaaaaatttattaattgttatacagaactaattaatttaatttattcaaacgataatatattcaactaatcaatatctaataaataaattaattaaatattataatttatcaggttgaaaataatttgtataatataattttttttgctattaagattgaaaaattaaaagtttactagaatacttacatatattactaaatatatataaaaaatataaatatgtgaaatttaatatatttttatgatttaattatcatttaatagaatacaatataatacaatcgcacgcgaagcgcgacctatttcctagttataagtaggtgaacattttagtacgagtattgctattagttactagtggtatttagtatttttagataaatcgttttgcgatttgttagcgatattttctaaagttattacattaaactatatgagactcgatacttaattgggccaatagcgataacacatagagaattgctaaagggcaccactggtgcctagcactctccttagtgtctcataccgttattggtataattaaataggcagtcttatataacttaagaaaataagttttaggaaatattgctaatcaatcatagggtgacacctatag

SEQ ID NO: 268267 - DNA, 957 bp, Cannabis indica
taaactaatccatcaaaccgacaatttaatattctagaccactccggaatattccaaaataattcatttcatattgctgtgacatcattgaccacaccgtcaagttttcacaattgcctggcccgaaaatactttatttaaaaaaaaaaaaaaatagtacccacgatacccacatatttctaataaaaaatatctgtaattaataaattacgctttatttaatcatttaataaattcacaccaatttccctaagtaagatcataatcttacttcattaccaaaataattacatatttaataaaatatgtccaagtaaacactatattaatttccgagatattacactttgggctcctacttccttagccaattgcatgccaactatcatagcttcgtgttcagcttcattgttggagactagaaattccaaagcggagagaactttggagctgatatcctcatagaaaaatttatataattcctactccaactcccttttcattggatgctccgtcaacgcaaacctttaagactggaaattttgggactagctcatccaggaggtcattcattccagaacactctactacaaagttagctaaggcctaccccttgattggaacctggggctaatattggatatcaaattggctaagttccatagcccattttagaaatctatcgaatgactccagcttctaaatcacttggtggagaggatgattattcattaccttgatggtgtgggcctgaaagtagggtcttaactttctagaagagattagcaagcaaaaggatagtttctctatcataggatacctggactctgcgctgagaagtcttttgcttatgtaatacaatagtagttgaacccttccttcctcttgcgctaaggcgacactcaaggcatgatcagacattgccaaataaagatataacagttctccttccatcgg

SEQ ID NO: 268268 - DNA, 1825 bp, Cannabis indica
agatacaggtacagtataaaaaaataatattataataaattaattaataattagacaaaattgaaaatagattttttttttcgtttttatatttttttttcactctcaaaatgcataccttttcataatcaataaatattttcagtcatatctctttataaattttaacacctcatcaatctttataaacccaacaaacaatattagtatattattaactaactctattgctcttaagtctcttcagtgcagtgccatgtactattattttctaaaagcatatacaatgccactgccatgtaaataattattttgacacaataaattttattagatacacatttatataatagataaaatataaaaaaaaaaaaaacttatttcacatgccttgcatgtcatttgcccctagttatattatatatatcaataataatatgttaacaaaaaaaaaaaaaatgtgaataatttatatgatgttccttaagttttaatgtatgacttaggcttggtaagtacacgagttgttcatatataaaaagaaaaattatagtgtaaaaattagtagtttttgtaatatataatgtggtttgaaccacgattattaaatttaaaatcgcaatttgtgccgcaccacgtagtttgataaaaatacaaactgcaaccgcaccacaaagaattttgaactgcattttttgtacgatgtagtgtggtgcaagcggtttgtgcggtgtggtgtggtgcaagcggtttgtgcggtttgggcagttcgatgaacacccctactgcatacaataaaagcgaagtagactgtaaaatctttgggataccgggatggtgccaggtaaaaggactctgatagtcaaatcagtagtttgtaacatgtagatatatactagaaataaaatagaatgacttagctacgatctttgttggaaggccgaagattgaagcaaaactagaatgttgagaaaataagagttagagtaaatgaaatgcatatagtgtaggatgtagaatgtagaatgtataagatatcaaatgcaagatgatccttccttgagaaggattgatcctttaaatagatttcgctcttgagagtgtgaaaaagttatttctcacaagactaggtcatcaatttaaatgaccctcagaagtatatttattttatttaattagtaggctaccttaataaataaagaagaagagacatttgttgtaatataatagcacccaaatggaaaaaaatcacctgtcccattttacctgttccattcctgtccccaccaattaaatttggccacatcatttaaaatgccaaatagacattgaacaaaccaaagtcttgttaactccgtttgttttcttttgtattgtcagcattaattctttttctatattaatgttaattctctctctaaaactaaatgttaattatgtctccaaaactaaatgttataataactttttatagtttatgtgattcttttacggggaatatttattttagtagaaacatacagttttttaaagagaaaaaaaaataaaacaggtacaatttttaaaagaaatttatacatacacgcagtaagatttttatatatttattaatttattgtgtattcattttttttttttaaaaaaaattactaattcaaaacatcagttagattcaaatagctagtatttttggtatatatatatatgtacgagtacacttttaatggatattacccatttatgggtagtattatgaaaatttaagtttttatgtttaatttttctatttaaattaaaaaaaaaaatacttatttttacattatat

SEQ ID NO: 268269 - DNA, 558 bp, Cannabis indica
taataggaatttctatgtataatttcgtaaaaatgtaaaaaaaaatattttgaagtgtaaaaatgaaaaaactccacaaaaatagttaaattgctctattaattttttcactgtgttggtttggtaactcgtattagattgtattatattgtataatgttagtttacatcgtattgtattatcgtattgtattgtatcatattatattaaattgtattttatgtaatatttttatataaaattatatatttgtatttatttttatagacacctaaatatataatatattttagaacataatattgtataaaaatataatatataattatttaatttaatataatggagtctatattctagatctgtataatagtacttaaacttaagaaagatgatgtaagacatcaattagaaacaattaatctgggcagtgtcaacgctagttaacaattaacatgcttaatcacaattaattttacaatatatatttatatatttatatatagctgcaacttttgaaataaatgtcgtttccaagtctttaaacattttaaattg

SEQ ID NO: 268270 - DNA, 1018 bp, Cannabis indica
cctattggccgaacaaacatatacaaaaaagaaagataaagagaaggtaataagacagcaggagtcccaggctcttggtaaggatcgactgggtccaattgagctagaggatcatcggtctggatttaaggagcatcaatgttctggtcggtaggagcattggaagtggtcgcctcggggttctcattggccgcctgggccatgcagtaattaaggtacatgtccttggaagtgccgaggtagtcaaagttccctttgggattggcctttcagaagtcgtaaaaaatctcgagacaagctgtctctaaggcatccatatcctactcaagcttctccaccttggactattggctctcaatctccttctcgagttctctgatcgctgcctcaagttcctcctccttgttcttcttgttcttggcctcctcctccaatttgcaaagaagagtctagagaccttccctctcatcttggagactggtaacttcttgggacagagaaatgttgcccgcctcaagctgcgtggtcgaaggcatatcctgcagcgccttggtcagctcggcaaccgtagccttagtagcaagaagtttcttgtttgcttctcccagttccttgctcacaacctcgagcttggcccgtgcatctgcaacatccttcttggccaagtccacttctctctgcatcgtgctggaggtggcaagattcttgacagcgaccgacttggctcgagagtaggcataggccatcttcacaccagcctattcggaaaatgtgttaaattccgaaccattcaaagaagaattaaagaaaaattatagagtgaacttactcaagaaatctccttcaggactcctcgtaagaccaactccaatgacaattcactatccgccccagacaggtgttcactcacttcaagaagcgaccgagccacgtagtggtgaagcacctctttgcctctactggcctccacgcacagcgtcagggttggggcaggggccctaacctgttcggatccacc

SEQ ID NO: 268271 - DNA, 594 bp, Cannabis indica
ttttttcagtattcgaataatcagtatactcaatttggtcgatttcttaaattttttgctcacccctaaataaaaaattgaaggcctaacttattcagctaaaggacacagtgggctggaatccggtgctatacaaatatataatatctataatataatacgaatccggtgcctatacaaatatataatatctataataaaatatataatacttatagtattacgtgtgggtccctctaattgaatataataacaaaatcgtttctattcttatcttgaaattttttaatatattgaaggtagtggaaagtgtgtaaatattaaattaatacaagataataaatagtgagtttagtaggaatttgacatatatatattattgaattattgtctcatcttgctattccaactaaagcacaacgaatttggcatacactttttgtccaagcaattgcacagcaaatgatgtaggtcttataaaccaacaattttgatcataagtgtcccataattgattgaagatttcaaactctttaacaacatcatcccaataaaaagctgcaagtgaatcgagtattgccaaaaaggtaaaat

SEQ ID NO: 268272 - DNA, 645 bp, Cannabis indica
taattagttaccactgttaatttctaaaaataggataaaaaaataaaaatagaaaagcaataaaaaaaacacagttaaaaaaaaaaatcatatttctcatttttaattttttgaaaaggtggggaaatttgttgggataaattgaaaaatactttttttttttatcaattaatcaaaaatactctcatattatattttattaaaataaattatttataaaagtgggtatgttttaaaaaatatgaaaatgaaagtaaaaattaaaatgtaatttcttcaaatataaaatttgtttagattagaataaatagcatataaataagcacatcggtctatacacatttcagttttaccatcaacattaaagaaataaaagatttctagtcttggatccattaaagaacatagttaagatagaagaagaaaagagaagaaaagcgatggatagaggtaaataatttattgttcatattaaaataatgaatatctgaataaataaattacatacatgcactagtttgaaattttagagttgatatatgttatcaatatttgactttttgattggttctttgtattattattatttggaatttgaaaatttttgaagttatgtagaaattatagaataattattacagtaaa

SEQ ID NO: 268273 - DNA, 823 bp, Cannabis indica
taattgcatcaatagcgatataacacacctactactcttaaactcttaaagaaagatgaagatttgcttggatggtaatatagttatatacatatgatgctaccaatagaatatgctaagctttaccaatattatcatgtagataatgactcaaagatgtaaacacaaaacatgcatagctcgtccataatttctcacaaatttgttaattcccataataacaagatgtagtagcaataccaacactttcgattctctcttccgcgaaaattttcgttctcagcttttcttatctcactttcatgatgaaacaaaaaatccatccaaacatatgcccttaaagagttgtgcaaagcaagtgtgcaagtttaatttgaaagaaacaaagcaatactatttttctctatttgttggaaaaaaaaaattaggatcatttcacttcaaatcagtcttatcagtaaaacaagacaacaaagagcacattaaattaaacatagtgcagttgcagcatacaacaaagagcacaatgttgccaggaggaaagaataaactaagtgcattgaacaagcacaaaactagtaattttttttcactaatttaggcacttaaatatccatggatgtaagtatctttctcttcagcagggttggtttctaggaacgtacccgtcacgattgatctctcaaggtaaattcttccaaagggtgaaagtatgaagttcttactgaccactgttacgagattgcagcctcttccgttcgaactcaacctagaaagtttgaatacgtcagtaaaaaaccttgcatatgtgtgtgtgtgtgtg

SEQ ID NO: 268274 - DNA, 673 bp, Cannabis indica
acaaagctataaataaataaaattcaaataattttggtgtgatgttctgttaagtcgtggataattattattggtagtagtacattagtactcttattagtctcttaaacgattaatgtctttatcaacttgtgaagttgtgagtgactgaggtgaaaaaactaaattatttaccattaggcacgcactcactacactaaaaattggatttactaacatttgaaaattttcagtaatattaatggttttaataacatttgtgaaaaatgtaagatatattcatgtgagtaaagatgcaaaaatgtcattatgttcttttctagtgtcaattggaaaaacgtcactaattaaaaatacttaaatattaattttataataaaatcttatatatttagaacatatgtgtaagacactaataaggtgctaattaaggtgatgttttataattgattaatgacttactatactctttattaaaatataataaatgagatgatattaattgcgataacaatattacacctcataccttttaacatttctaatatatttaacatatatgaatactacacaagcgaacttactttcgctataaatcattagctagcttaattaacgtatagcatttaatactatcaaaacagcataatatatattatattaattgcatgca

SEQ ID NO: 268275 - DNA, 634 bp, Cannabis indica
ttgttttaatttttacctcaattttcatattctttaagatatactcacttttatagatgatgtccccattagactccttaggttaatgtaaattatacgctagacttaagtaggaaatatgagtatattgagcaaaccactcataaaagtgagtatattttaataaaatataatatgagtgtattttttattaatagatataaaaaaagagatatttcaatttatctccattttattacaaaaataaatcttattaagtagagagttacaccccaagtttcctaaaaaaaaaagaaaaccatcctatttattcagttatttttcttcctcattaatctcattccctctaataaaatttcattcagattaaatctaaaaaaatattaagaactcaataccaatcaatagataaaaaacgaaaatgagataaaagcaaacataacaaaatacacaagagaagatacattcaaagaaaaaaaaataaaataaaacaattgagagaagtaagcaaccaaaaaaaattgagagtggtatataaaactacttgaggctagctcaagtggccataggtgggtgtgtgagtgttggaggtcctgggttcgagtcacaggtaaaacatggttgtaatatataa

SEQ ID NO: 268276 - DNA, 652 bp, Cannabis indica
agtcaagaaccttccaacgatacaccgcctatcatcatagtcattaccatccgtagcaccaacatcataagacaagataacttcctcctcctcctcaataggaatatgcacccttgtatagtcttccataattgtaccacaaccagcagaatcccaaaagtaacaaaaaacaagaaccaacaaaaaaatcgaaccaaaaaactaaagagaaagactaaataaccatgtcaaaagacaagactagtagaaaaaattaattagttttaacacataaaactaataattctaaccgaaaaagaaattaaatggaataaaattaatagcataaaattaaacaaaaaacaaaaatcaaaacctaattacagtaaataaccggatcatcaaaaaaacaaaatcatcaaaaaaaaaaatcaaatacttgaaaccctgtactttgaataatcggttccttaagccttcttcatcaaataaccaatctcggtacacggataatccaccaattttgtactctgaataatagtctcgactaaagactacgcaccacacaacactccggaaaccacctcgacttactcctggactcaactatcgcataaacggccgaccagaaaccaccttgactcgccggggatgctcctggacacaacccgcc

SEQ ID NO: 268277 - DNA, 1153 bp, Cannabis indica
ttttttttaaaaaaaaaagctataattttgcacacataatataaaatctctaaaatttgtaatttgcaaatttgagattaaatctctaaaactaagtgttaagtcttcacaaatttgagattttaaaagtccattagagttggccttcgaaattagttatttactaccatccaatgaaaaaaaagtagtaatcgattaccgctaggaaattaagaaaagtggtaattatttaccatggcaagattttcataatttataaattaaaatttagatctaagagtagatgtatatatatttttttccaacatcactttatcagatagaaaaagataattaagtgtcaccaataggaggaggagtgatgtcttatttcatccaaaaaaaaaaaaaaaaactaagacatgtttagtcaaatcataagtcatagcgctaaaattataattaacatcggagatttctgaagaaagctaaacaataaactttaatgtacataaaaagaatgttagaaatttatatattcatgatcataattgtatatataaatatgtattgggtcattatataaatgagtcaaatttatgtggtctattttaaaataaaatttatgacttaagagcgtgattgtcatgattttcatatgtggataccataaggacaattactaatatgatgagagatgcaaataccaaatggtaatgtggtgatgtataacttataagacacgttttgtagcaaaacgttatactcagaaacaaattattgattatacatagattttctctctaatttcatcgaaagacttttaggataataatgatatttgttgctcactttgatcttgaattatatcacatggatgttaaaataacgtttctcaagggtgacattgatgaaacaatttatatggtgcaactagaaaattttgtgtttggtgacgcaaaaaatagatttacaaattaaaaaatctatctatgtactcaagcaagcttcctatcaataagtattacaaatttcatcaagtgattctctcgtttggttttgagatgaatgttgttgatgattgtgtgtatcataagtttagtggagatatataggtacatatatccagggacggagggactttagcccatgtgtgggctaaagccctcactca

SEQ ID NO: 268278 - DNA, 949 bp, Cannabis indica
tcctatagctataaatttagaaaggagaaaccttaataaattagatattatatttgaacaaaaaaaagttaattatgaaattaaaagataaatgttcttactaatgttattatatattaacagaaatattttagaaaagttatgtgtaggttatagaattaaaaataatatttttgagggtgttttgaattaattttaattaatgttgaaatcttactctataatattgtaatacatacacttaaagataattacttttaatagataagacataaattatattttggaatttaaattaaaatttacttataaatatgcaatttattgcgtaaatttataaaaattggtgcaataaaattaaactgcattactaaatttaaatccacagaattacactgcgtgtcacacagtttgataaaaaaatataattgtaaagtttctgacttaaactatatggaacagcctaaaggttttgaaattgaagggaagaaagaaatggtctgcaagttggttaagtccttatatggactcaaacaagctcccagacaatagaatagaaagtttgatgcttttatgttaaagcatgagttcaacagaagctaccatgacacttgtctatactacaaaggaagctctataaaagatgtcatctatctattactatatgtagatgacatgcttattataagccaagaaaggtctagggttgatatggtcaagaatctgctcaagacaaaatttgaaatgaaagatcttggaaatgctaccaagatccttgagatttctatcctaagggatatagacaagagtaaactaattcttagacaagaagactacattgagaagatcatagataaattttctatgagagatgctaaggttgttaagcaaccaattactagtcagtacacactttctaaggagcaaagtcctaaaacagaaaaggaga

SEQ ID NO: 268279 - DNA, 1241 bp, Cannabis indica
gaccatgcattacccatggtatattcattgggaacacccaactttattgatagttacaaaaatgcatgtactataattctgggaatcaccccacaaaaaatactataaataccccctcaaagctcattaatggggtcgagaattttgggttgtataagtggaagaagagtaaattctcaccaagaacattctctgtaattaatacactcattaatacacagactcgtggactaaggtttattaacgccccaaccacgtaaaaattcttctcttaatttcttacagctccttaatcttttattatttgttagttaccgaaaacctcggtcaacaataggtaagagaaccaaaagagaagtaattacacactatctataaataggtgtaatgtacacatttccttcattatttcatagaatatatggttacattaattaatataaaggactactctagtagcctagttaatgttatctacaaaaatgtatggatgatcacttagatagattactatatataaaataaataaataaataaaaaatcacaaaaaataaatttggtagtctatctctcacaattaattttattataatttatgattaaataaatatcatttcttattaattactaataataataattaatattttagtaattatgattaccattaataattgtactatatataatcatatataatattaattttgctatgtgattaaaatgttattaactccaaattaataaaaatttatttattatttatttattgtaattattaatgattgataaatattttatttgtcgtttcatatatgtaatatgtctacgtcttacatattataaactttggagaaaaaaggaaaaatagaagaaaaattatacatatgtatctatcagtaaacatctttcttcttaatcctatcaaatctaattacaataatttaaattgaatattattatgacaaattatacattgactatacatgtgataaatattgctaatatatattataaaatctcaactaccaccaatgctaatagcctaatacgtcacatatgacatgtcatcatataaaaaaaaaagtaaaaataaacgtaaagctaattaaatggactacatatatataattgtgtttaatattaaatacaaaagaaaactaacgaaaattcagtctcccctaaattctatcttacatcaaaaattactatatatttctcttttcaactagtaataataa

SEQ ID NO: 268280 - DNA, 680 bp, Cannabis indica
tttttcggtaaaattatttctgtattgaatttgtctagctagtttctttaaaaaaagtttgtctagctagagaagtatgttcgtcttaattgaagtttttttttttttaaagatagatttatgataattgagttaaggaaatttaggattagctttatcatcggtagattagtagatttgtagtgtcggtcggagacctataatatatagacctttttttttagaaagtttaattggcctcataaaaccacctgttcaggattgtattttgtttagttataattaaattattaaattatattaactttcaaattttggaattttaatttatataatattttaaataatatatttatgagtgattctacaatgcacctcttaaaatagaagtattaatgcaccatctacttatttcggtatctagaaaaaaattttaatctaatatttttttttcatattcatgtacgttataattatttaagatatcctacaaaattttgagaaattcagaataacttacaatataaaaaataatattcaaacagtatatttcacacacgtataaaataaaataatcacgcttgcaacagactgtttgaatgtaattttcgacgtgttaaacttttccgaatttcttaaaatttgtgtaggatgtcttaaataactataatttacataac

SEQ ID NO: 268281 - DNA, 1157 bp, Cannabis indica
acttttttccaattttagtaaaaaagtctaacatggatgaaagtccagggaccatgatttagtacatgtcaaagtacgaggggcatgatttggtagatatcaaagtctgggaagcatgatttagtatataaacaatcactgcagcagtaaaattgaatgaaattagacaaaagtccttaaatccaataatctcaatagttcagggggcatttttaacgaccttaaaagtttaggggcatgatttggtacatgtcaaagttcagggggcaaaaatcttaattagccaatcttttaagatacctcatcaatttttttattattattatttattctttttttaaattaattctttttaaatgataaattagatattgtcttatctaaaatgatactaaatagtaccctcaatttaattaaaatgaaattaaataataatctaacatgaaaaatttatgactagattagttatatttttttaaagggaaaattacttatcatatattattaagaaacaatgtttcgtttacaatagtaaagtatataggcggagggataatttactatgaacaagtctcatctactcttaatgcaaacttagcaaggtcatgggccgcttcatctgcagaacgtttgacatgtaaaatatttacattaggaaaaaatgataaaagactaataacatcaactattaaatctgaaaaagaggaattatataaaaaaaatgacaaaaattaaatttgagtattattttgtagtattttacaaaatacaaagttaaattatagtattttgttttttaatcgcactaaggtcatcttcaatggcacactaaaaactcatataaagttttttttattttacaaaatgctccaatcaaactctaaaactcatcctaataagaatctactgcgtttcactaataatagtaagatattatagtaaatatttttgttatattaataaaataatataataataaagtttatactttttagtgtaattttaatgttgtggttaaaattgaaaaaaaaaaaaatagggttcttataaaaatattggattttggacaaaaatttataattttactgtcacacggaattttttacaaaaatactatctttttataaaataaccataaaacaataaaacaaaataat

SEQ ID NO: 268282 - DNA, 735 bp, Cannabis indica
gcaacatggaacgaaagttaataaatatatcaaatttatattttcccatacctaattactacttttaattcatatattattattgcatatttttgcgtcaaatattctcaccaaagctaaattctgagaaggtagctacaaatactaaaataaataaatattaataatgtggacatatgcatgagtctcaatctatattcccttagtctagtcatggtcgtatacaattaataacaataggtttcctaaagcaataacaataaagagggaacacaaacacacacactacttttgaaaataatattatataagagttttcattatagagcgcctagtattctattgctctgtaatattattattggtttaatttaatattgagtctcaaatatattttacaatttttattaaagaaaatcgctaaccaaattatagagagacacttcataatagtgttaagcaccttggtacctcgtaataatatttttgctattaaagcaactctaatagaagtatatattttggtgcttattggactcgatatatataaataatttttttatttaagtatatacataaaaaaattagtttgatacttatgccaatggatggcaatttttcctgtcttctctataaaatatattattttataaaacatcaatatacatatttttattggaattggtctttgatatttaaatgtatcaaatactatacactacaaaaaactgctac

SEQ ID NO: 268283 - DNA, 664 bp, Cannabis indica
gtttttgcagccacagaattatttcaatttattattattataacaaaataaaataattgtgggacccaagtcgtacaaggcaacccaaagtttttgcatttcacaaaaacggcatatgttctagaatcagcactaataaacacaatcaccgactcttttcttccatgtggcaagaatctactggttcatactaattttaattagatggctctcaccattaattattaattaataaaaataaaaaacggaaaattcaattgcaccaccttaaaagcccgttttcgcaaaatttttaactctttctgcatctgaacaaatttttattcaatttttataactacgtatattatagttttgaaaaataatctgaaatcactaaaaaaaattaaattaaaatattttaaacactataaattatttaaaatttacaaataattttaataactataataaacatgatcacaaaaaaaataattaaagtgaataacttttggagatgcaagaatgcatcaaaacgatttttagagatgtattataaattcaatgataatgtaataaaatatttacatttaatatttcggcattataaattatttaaattttttgaaaaatttacaaataattctaacgtaaataattacaaaaacaatagattaaaaaaact

SEQ ID NO: 268284 - DNA, 1554 bp, Cannabis indica
ttatgattatttatgaattttcataaaattttagtactttataatactaaaaataaaatataattattttattattttttttttatatgtatgtgtagtaagtaattgtttatgttttatctataaatgctcttaaataactgcaaaatagacgattataaaaaacaaattgaactaaaaaaattctgaatgtcgaaacaaatagttggtctactaaacttcccttcaaagagtctaatgcggaaaactgcaaataccatatgtacaaaaataattttatccaattcttcgaaattcaaaaaatttcaaatgtggatttggactatagtattcaatctcatgaatcaaacatgacttaattaatatagaggcgtaaatattattacacatattaaaaaataaaaatataatttaaaaataataataaaaaaatgataacctaataaaatagagtgaaaaaataaatttcattaccaatatatataatataaatatttataacgaaaaaatagattacacattaacaaaataaggacgtataatttcaaatgaaaacataaataaattgatatttattttcattattacatgttaaataaggtgtaaatacatctcaaaatttcattgaaatattacataatgatttataataataaccatttcaaaaaaaaaataacaaattaatggaataggaatgattttagtgactttaacacaaacaaataaaagtgaacattatttattatatgacgtatttctgtggatgaatataatttttaaataaaaaaaaatatttttatagagtaatggagctaacaaagtagcaagaaacggaagtagttgtgaattaattgacagagaatataaaaaaaatgtaacacttatttattggagggacaggatcggaatagggtaattgagacaggtgattttttttcataatagacagcctgtatgaagacaatacccaacccacttgaatcaatggcggggcagggcagggcacaagtgtgtggggactgggggactctatccccattttggaaaatgaatttgcaaaaatattcaaaccaaatgaacatcaaaaagcattagcacagttgctctttctatttgcttaaacagatactcatgattaaataacaacttcaagcattatttaggatagaaaataataataagtctggcaaaaaaaattggtaataatagtacacactgcaaagacgtatttgtattttacattcccatttcttcaatactcactttaccacttatttgtatgcagtaattttttttttaaaaaaaaaaaaaaaaactacagtaacatataacattgcaccccaaggtcatttccaaagatcacttatgaaagaatagactaagatttgcgtttataagagtgaaaataagaataagaaaatatataaaatgaataataaaaattgacaaaatattattaatttttttccctcatgaatcaccttttactttcattttataaataaaatagtcattttatcaaaatagtagaaaataatattctaattttttaaa

SEQ ID NO: 268285 - DNA, 887 bp, Cannabis indica
tatttttaaaaatatgttatttacaaatagttttaataaattttttgaatttagtttcaatatgtcagcagatgtagcttcttaccatggtggagatggtggcggagaagatccccacgatccatctaggattcctactacttgcgaggacgactctggtagtttatattgatatcaatctttttgaaaataaaaaatattatatgttgattatagttttcttcttcttattcaaaacataagatacccgaacaaagggtcgtggtccatcaattcatgaacaattggagaaaagaaggagggaagcaaaagagccattgccattggagtactgtccaatttcacagaagatagtgggagtagagcatgcagctttcccacgcattttgagcgattacattggttccttttgtcctacacattacaaaaattggaaggtagtgccccaacagttcaaggatcaagtgcttgcaagagctcggataaataactttagacaatttatccttgctataattaaatttgttagtatacttaaacattatttaatttttttgtagttttaccataaaattgacgagaatcctgatgctgaacaaatattgagttgtctcgacaccgagtgcgctaatagatacagaacaaagaaaactagtcgacatgtgcatttcaaacgtttttatacaaaacctgaggattacgaggaagcgctaaaacatcatccgatttatatgactccggaacaatggcgacaacagtgtgaattttttacaagcccagcttttcttgcccgatcagaacaaaacaggataaatcgaggaaatatgaaatatgttacaacacaaggaacaaaatccttagctcagaggcgtcatgaattagtaagt

SEQ ID NO: 268286 - DNA, 721 bp, Cannabis indica
aaaaaaaaaaattaaaatgaaaagagtattgagtgccaatatatccaatcactataaaaaataatatagtgtcgatttaaggtgacttatttaattaaagttaattacagttgtatttctttctctgtcttttattaatttctaaaatatttacagcaaagcattttttgctgaatttttcattcgtaattcttgaattgtttattttaaatataaattaattgattaaggttccataaaaaataaagtaagaacatgcaatttgatgattgtacgcttgtttagcatctatgatcacaacattcaatttcatgtttaatgtttgcaactactaagttaaatgatctataccaaacaacacacgtcacacaatcaattttccttaaagaatttagaaactcattatcattttcagatttcaaattatatggattgaataaaaaagtccttaataaaagagtaggttggaatgttgaagttttgataattaaataatttatttatttgactttaaaaatgaataacatgcaacaagtcttaaaaaactgaccagaacaaaatcacacaaatcttataagtaaataaccaaacaaaaagtaccccacaccgatacaatccaacaaaaatatacaaatgtaacgttcccgcttcaagctttcattgggtctttccacccacggactcatggctcttatacacgagtacgccactctggctgctt

SEQ ID NO: 268287 - DNA, 742 bp, Cannabis indica
ttcgagtcaggaggaagcttagtgttattatttttgttatcattaccctcattcaggaaaaaagttacttggggttcttgctttgcctctagtcatggcagtagtagcagtgcattttcaaattttggattcttttagccttattactgattttatagcatgtaaaaaataaaaaaagatgtatgagtggtgactctattaaaatctatacacatgataattttaacattgtcaagggaaactccttaatgggttaatcttagtatattcagtatataatatagtcaactttttgtaaaacaatgtagcttaggtgtttgttgaattgacaaaatgggaatcttttggggatgcaacaactgaacaacataaatataaacacacacacacacaaataaaattgtgatttgagatgatacatctaatttcacttttgagagggcatgtgaaactttcacagctaatataaatcttcataatttaaaatagatgttctacttgttgtattatggctcattgtttggtgcttttttctcaattgaacatgaaattgataggaactcagatctaaaattagctataaagctttctctattgatactcaaacacagaaaataaaagatagaggagaaatttgaggatcccttaagcctcccaatgaattctaaagaattcctacaattacgtacaaagtaattccacaaccatactaacctctcttcctctacttatatccctcaaa

SEQ ID NO: 268288 - DNA, 592 bp, Cannabis indica
gtttatattttcataataaaatttgatggtttattattgttagataaatactaaaaatttagaaacctacctaaaaagtacaagctatctagttattacaaaaaaattaaataaataagaagtaaaaatactgtcaaattgattattaagatataataaggtagaatactttgtgaaataagtaataaatataaaaaataataattttatttatttatttttaaaaaatattgctcatatgcatgtaaatacataattttcactaaaattattttataatatttataaataaataataatacattaaattaatatatatcatataaatgaaaatatatatatatatatgaaaattgcacataattttttaacaaatataaaggtacccaagataatactttaaaatcattatgattcgtaaagtgtgtaatataaatgtatattttaaaaaatcacacagggtctaactataaagatctatgcatatatacatttataagaattatatagtttagttaatataaaataaatttaaattaatactcatggataattttttagaaacaaaatttaccaaatactgtatatttgg

SEQ ID NO: 268289 - DNA, 501 bp, Cannabis indica
ccctaccctacctattatttatttatttaattttattttattttagagtttgacaaattagacacctttttaatgccttgtgtccttccttgttgtgtcaatgaatctacgcgcataagtttggtttgttcataaatttagctgctattcttccgttacgaccgttgaaaataatattaataagggggctgggctgggctgcttctaatgttgcaaaaggaaaaagtaatttgacacgattagctcactattcaggttaggtgttaaattaatgaatattaagacatatcggcggtgtctaaatcctattttatataataatatatatatataggataaatataaatactatttgaactctgtattttataaaagttgttaattggactatctattttattaaatgacaaaataaaacttatattttctaaaattgtaaaattagaacctgaactcaatttttaacaattttattttttaatataactagctttaagataa

SEQ ID NO: 268290 - DNA, 757 bp, Cannabis indica
tatattcacattaggcaagataattaagctcgagctagagagctaggaaatgtatcttcttaattaggttaccctgatcaaggagttcatggatacaaaatacccaacattttcaacacctatatacaacatatacatggctccttatgtttttttcctctttttcttcttcatatagtttaagattgaattgcaataccattctcaataatatcaatcataatgttactagaaaaatactaaaaatactctttattatgataaaaaatatgagttagttcaactaataaattttgtaaaggctttaactataggttacatcagctagctaagactagaaaaggtttgaaggtcattgtgaaagcaataaactcaacaacatttagaatgaagaaaaccaaatgatcacctgcaacaaaaaacacaccattcatattaataatgtaatcttaattagaaagaccacaaacaaaaacttaaggcatataattcattttgatcatgactaatataaaatcataagaagttttctcttatgatatgttgagtttaagtagatctttttaccagggaaaaatgatctattttgatgattctgtgcccaagaaaatctgaccaaaaaacaaaaacaaaagcattacttcaacacttgaatcttttcatataagtatacaaattttatttatttatttatttagtgtaatgggtccaatctcgttgaaaagtttaatgacgttccaccgagattgaatcgttc

SEQ ID NO: 268291 - DNA, 771 bp, Cannabis indica
aacgaccttaaaagttcaggggacaggacatattttatacatgtcaaagttcagagggcaaaaatcataattagccaattgaaaacaattgtataacacttaaaattttgtgataatgcaatcgataattgttcgtagattattctagataccaaaaaaagaatgtaagtaacatcaagcaaacactgctaaaaaggaaataaaaaagttgaagtgttgggaattgaagaaattatttgctaaaaattgtagaaaagaaaaaccataatgattggttttaatattttttttgcttcggccaagagaatagtgtaatgtttgtattttgcatttttcatcttttctgggtcggcatataaatggatagtctattttttcattgataacttttctatgatttcttcgataaagttgcggtgttcctgcagaagtatgtattttcaatttaagatgataattgttgatgtaagaaaaactttataagttttataagtaaatttatactaaatttaagattatacctctgctaaaaaaaaaaaactcctataattttgatctggcaactatgtcaggatacaaaaaattgcttatattttatctaggagaaactttctaaaattagtactctgctaccatttgtgtcattaactaaggaactgaaacaactttatcaattgtagttgttgaattaattgaattctcttgagaataatgatcctcaattgtagattattattttctgttacattagattagctatgtcgatgtgga

SEQ ID NO: 268292 - DNA, 1216 bp, Cannabis indica
attttaaaaggagaaaattttttttgagcccctggactaggtgggccctaggtacaggcctagcccgcctatgcccatggtcggccctgttagtatgttggcctgcctagagggattatcaatggcttcctgctgggctctcatgacttccatctctcaatccttccactctatgaactagcatcttttttcatcaaaggcaagattggtagctgctcggatatcttgctggtcatggtgtataatgttattgtggccttgcatgaaccctaatgcagctcctaagttttgaagcttagtatcatctctaattgacctttaggtgtttgtggtggatgagatttcagtgccaggagtggtctgctcggctttcgtactggtgttcccagtttcttgcacacctggagtgaacccagtcagaggggaagtcactccatggactgttgttggtggttgagtattaacttgtccaagggtcatctcaaatggatctcttacatttctaggtgtttgcacgctcagaacaaacaccattggatcgactgtatcagtttgaatccccctttgagtttgcacaaccatctcgtgtcttgtaaaatacttaagacaaaaatttgtttttttactctcaatgaaagtaacaaaatatttaccttgctttcagccaacgacagttagtcttaattaaagtgattagattaaataaacaatagaaggcaaagaacaataagtaaaggaaataccaaaatttctagaggttcgacctcgtgatagtagtaatagcctactcttcctttttgttgtattaacttgtgagacaaaaaaagaattattctttcttgaaagctcttcaaaagatctataagttactctctcttagatcaatatttctctcttaagtgttttctctgattcaattcataatgagatgagaccactattttataggggctgattacataaagtggtttcccttaatctataagaaataaaatatgaaattagtatgtttccataattacaataaaagaattgggaaagtctaggctaattgcctttttctctgaaggtacgaatcaatcccacaaaatagggattactttgtgtcatataagtttggagatatcatcaattactgctataattcccaactcacatctcctggccggtgtatacgagttgatcacacgatcgagctggtcggattttcattgat

SEQ ID NO: 268293 - DNA, 1457 bp, Cannabis indica
ttggactgctccaaaattgtttttttccgtttctgagaaaaaagatttcaatgtatcatcactgataaaacaaaattttgggacaagagaaagtaaacactagaaggttacaaggccaaaatcacaatctggtacctcaatttcaatatttattccagtattttttatctgatccacataagattctgccgtttctacctgcaataatgttcatccaagtatattaggtagaggcagcaattttcatacaggtggctgagtgttgatattgttcttaatattgtagtttcatattaccatttgtcaaagtaatatgaaacaaatggattaatatgaaatcagagaaaaacaaacagcaggtcaatgactacagtaaaagaaaatgaatatagaaatttaatataatgggaagttctcacataccataaacgtagcagaaggagagttgcgaagaccaaaggacttgttcccgctgtaatagcataaacaaatttttagataagcattgtatcttcatgtataaatacaccaaaacagacagcatgcatgcatagttgagcaataatttgtacacttagaaaaacattaaacaccaaaacattgtcaactaataagaaataagatagatcaagtgaatactctgtaataagcacaaaagcaaaaattatattcatgactactgaatctgcaacatgtttccgtaactgaggtgaaatctgctatgcatttaccatagtgggcttagcccgtaataattatgtagattgaatgcatcttcacacgcaatgaggtgagactcaattaagcagacaagaaagattgccaatgacttgacagatagcattcattgcaagtgcaatgtgatgtaaaaaaaaattacaataaaatcttattaaaaacatcaaaaaaaaagagaaagaaagattggaaaacaaaatcttgagttatattttaccttaaaattccagcaaatgtaaatggcacaactacatctccatggagagccaatatccatcgaatgggtctgctaaacataacctacataaaaacagaagtacacacaagccatccgttacttatcaaataaaagtagagcaaaaggaaaccaatctacgtatttctaaaaccttcaatatctgaaaataaaacaaatttcaccagcaaggatatatataaagcatttgccaactatgtttaacaaatttactgatagttgatggttactcgtgatccaaaactctaaaaaatcaataagataaaacaaagccttccattctctcaacaaaccaaccaaaaaaaaaaaagagggagggagagaaggaatcaaactcttttacactcttgagcagaacagtaacccaatgttttaaaaaatttcatattatctagcgagttctctttttcttggtacgatcatatttttttcccaatcaaattgttcacataatagccaatac

SEQ ID NO: 268294 - DNA, 1345 bp, Cannabis indica
ccttcttcacctcctctattgtaattttcctcacaagcagctctgagtgttcttgtgataccatagggcccctcctcaaaatgcctttgaccactgacttcctactctccattttagttcccaaaaaacttttataataatctaaaaaagactcttgcaccagaattgggtcattaactctttctccattttgttgctctatggaaaagatcctattttgcctcaatctttgttttatgctagcatgaaacaaggttgtgttgttatctccatcatgtacccatgccattttttctttttatctcagaaaagaaacataatcttgctgaacctttacatatctttcccaagccaccttctcttcattatgcagctcaaaatccaaaggattttcctgcaatctagtctgaatgttgtctaagttagctttagtcgtagctgtaaaagcctgtaagtccatatatccctccttgttaatgtccttcagaaccgctttgaataatttcattctcgagaccacctggaacatttttgaaccccctatagattgcttccatatctcttccaacctcctatcatatttagaatgagatttccacattctaaagtatttaaagggtttgattccaccattcaaatggggatacaaagtaagaaccttaggagaatggtcaaataattcttcattaagaaatgtagcctcggcattctcataagcatttagccatgactggttagctaagatcctatcaatcttaaagtagattcgatcttccccatgctgtttatttgaccatgtaaagaagttcccactaaatttcacatcctccaactggcactgattcacacaattgagaaaatgatcatccggattgcttttaaccctgtgtcaaattctctcttccttggagagaatctcattaaagtgtcccattagacaccacttcccaattagagccaactcacacacatctctccacagttctcttctctcaattcagctatttgaagcataaactacagtcaaatagctatcaaaaataccatcagcagtcacaattcttagatgcataacttgacttgtgcatctaataatatccactatgaatctcaaaagattccaagctataacaatctttcttcccgcatgccaagcaatgttggaagagaaacaccatcctgcaaacacattagagtacaagttcccaagtttaggagccttgactcttgtctcaaggagaccaacaaaatccactttttgaagactaataaattacttaaccagtccttgtttttgtggattgttagcccctcggacatttcaacatagtagcttatccattag

SEQ ID NO: 268295 - DNA, 885 bp, Cannabis indica
agatcctggtaaaataaattccaacaggtgagcccatcctaaaagcatgcactcatacattatctaattacatcaccaaatccggtgagcatgtgccacaacatgacacaaatatattgcattgtctaatcaaatgacctcgtacctacgcccagtacttatcatatgtcattgatgcccgtagctacacctgatatgtcaccaagaaattgcatcacctaatcaagtgagcccgtacctacgctcggtaatcatcatatataactaacctctgtacctacgccctgtacgtcactacgaaaatttcatcacctaattaagtgagcccgtacctaaacatggtactgatcatatatcactaacaactatacctatgcccggtatgtcgctagtaaaatcacatcaattaaatcatgtgagcccgtacctacgctcggtactcatcatacatcattgacgcccgtacctacgcccggtacgtcacaaagtatattgcatcacctaatcaggtgagcccatatatcacatgcataatatcatcacattatcgatattcaaccaatcaatattttcattatataacaatattaactacatctcaatattaaccaattcataacaatactaattatattacatagaacgtactatgtagtacaatatgcttttcttacctttaatctaggttcctacatgtcagcaatacaagtggagaactatactcgatgatctcggccctatgtcacaacaatggtaaactgataagtgtttatcctaaaacactacttaatattcatataagaaaatctagggtttttttacaaaacgttgtggtataaatacactgaaataaaacttatattttggctctaaaacatacatcat

SEQ ID NO: 268296 - DNA, 725 bp, Cannabis indica
aaaaaatgaaatgaaaaattgaagaagatgaaatataaaattagatttgaggggttcgacgattttaatcgatttttaacaattttaatggcgacatatcactgacgccaaagtcttcagtgatggagtgttcactaggtggcagtccatcactgatgactttgttgctaataatgtttttagagggaaaattcctgccttatctcttgccaatgcagctgcaaaaatcaagtggttgatgtctctgctttcaaaacttcagaatgccctattctatgggtggataatcaaagtgttgttgccattgcaacaagtcctatgttccatgctaggtcgaaacataggagcatatcttattcaagcagctgtcagttcgatatgtgccagccatatcagattgttaatgtgctatcaacagacagattcatgtaccttagatcccaactcaagatgtctgaaatactctttcatttgagggaggatgttaaccatgttttgagatatgttacttaaccaaatattctaacagttagttggtgtactaagcttctgttgttttattcgatttatatttttttttttgttggtatcttttttagtcacaataaaacttgtgactaaaagtgaaaaagttgtaattaattataaattataattcttacgttgtgactaaaaattccgtgtggctaaaagtatagtcacaaaaatcacaatttgttatgact

SEQ ID NO: 268297 - DNA, 1104 bp, Cannabis indica
ttaatcgtgtaaggctaaataaaaaaagaatcgttaaaccaagaatagaattgccgttaggcacttttaatatataaagatattttttcatcttatattgaaataatttttctttttattttaaattatgaaatacttattccaccaaaatgatagaaaaattattataatattaaaataacattttaatactttaaaatacaacaaaataaaagaattgaataaatattattcattttctatttcattctattttattataaacatcacctaaggatactaaaaatacaaatttagtgttatttctatttgaaacgaattcaatagaacattaaaagctattctatttatgggattgtctattgttttagtaataatagtaagacattgtagattatactattttttttttaatttttaatgattaaataatggttttgaatgattaatatttttttaatatatattatttatattgatatatgatatataataaagaatatgtcttatttagtgtaaactaattagtgttatgttgtagttggaataaaaaaaataatgataaattatacttttttcgttcatcactaaatttaactttttatttttttttaatagaatttaactttttattattagagtttgcctaaaaataatgataaattagcatcactttctagctatctatagtgttttatagttgatgagtgatattattttttcaaaattatttttttaaattatataaaattaatatttaatcatacaaataataatataacactaaaaaaaatagtatggaaaagatataagacaggaccaactcgtttccaataataataattagaaagaaaaaaaaaatctaaaagttacctaaaatgtgcttctttaattttattttttttaactatatgtgtcggcaaaacgagagagagtcaaatggagtgcgggaatgagatgaggttaaatttggctaatcccgaaatatgatatgacagctcatcgctatgtgtagtgatgattagtcagatacatgtgattaagacttgcatggtacatgggattctgcctcttgcagacacgatgtcacacgcatcgtacgcg

SEQ ID NO: 268298 - DNA, 1207 bp, Cannabis indica
aaattattttggaccaatgaaaatatgccacgtgtacacatgtgtacacagtgacattcttagttggcacttaacacccaaacttaacatatatatcaaatttgcaaacagaattaaagataagggtgtattaccacaaaaaacaaagaatagggggttaaatgtttaacaattgaaaaatagggggtttggccgcaaatttctctatttttcattaagtttacgtttaaaattaattgatgaacctgtcattgtattgtgcaccatgtcatgccttgtcagcctaatttttaaaaaaattaattgaaggcttaatttttactaattgataaggttaaggggataatttttaataacactaatatgatagagcacgcactagtttaagtgacaaagttcaaagggaaaaataattttttattctttaacaaaagtattagggcgtctttggaaagctacaatataattgaatttgtgtgtaattgaaggtaattacacaagttaatatatttgtgtgaccatgtaattatattgtaattgtgtaattggaggtaattgagtagttctaattatactctccaattctcatagcccccataagaattgaatgtaattacactcaattaccaaaaacttttaattttaaacattaactacaaaaaaatattgtttttcaatataattactaactatgccaagttattaaaaattcatatgtaattaatattttatatccacacacaacttctattttaaaatataatttattaatgaataaaattaagaaagcatttttgacaacgcccatattaattatagtgacaaaatttaagaggctaaataattttttattttattttttaatagagcatgaaggttttactgaagtattttttttttttttttgtagaaatttcactgatattataaattggagtcatttacaacatcagagaaaaaaggatagggaatttctcctatccaaacaaagtcttcatccaaccccaaacgcatatttagctaagccatgtgctgcttgattagcagtttcgtttcacatgaagagctaaaacttgagggaaagaggaaaaaagacaacgaatatccatataagatcagaaaagcatgataaatcggaatttaatctatttaaacgcatttgagacccgagaagcatcagtttcaatatgcgtaagaggaaattgtg

SEQ ID NO: 268299 - DNA, 1630 bp, Cannabis indica
atatctttagcagcgaacatgggtcgattgtgtttgttgggagcagcaagcatggtggtgattaagccaccagtgcttgttcctgagattacatcgaaataatctgcaatccttacatgtgctccatccaattcctgaagttttgattcaagaaaagccagaatagtgcctgggataatgcctctaatcccacctccatcaatacttagaactgtgaacacttttttcacactactagtacgccccattatataattaaactcaaaacaaatcgaaatatgaaaatcaatgaagcatctatgttatgttacttgtctttatatatatatagctagggagctagctagagagagtaatgatgaataataagtcagaaattagatacctttgtactaatgttaatttatatcctaagtacgacgccatggttgattcattattgattctgtcaaaagtaataatatttcatacacatacacaacgggcctacacgctttatatatatatatatattcaatgaatgtgtgagcagtacaaagtgtcaataaatttgttcattgtttttggggtcccaacaaaccaacctctagtgtgtcctgtatttgttgataacaatattaattataaatattatacatatatttatcgtctcatatatgcagctacttaaaaattaactgttaatgcaaattattaatattattcaaatttgtatgctccaactgagggtttgcctagctcgtgtgtgttttttcttaatctcccttcgtgtttctttgggtggttaatttctattgtctgttccttttacgtacctttgctaaaggaaggtatccaaagtattaatttctttctaattttctgagtggttggttactatctcatcacgtgttctcgatcgagttaagattcatggaaggggacaaggggccggtagtaggtgaggatggaagtatccatattcaatgtcaaatttagagaatggcattgatggtgacttagacaatagttaagcagatgatgaactggctctcactacaacaaaaatcatttatctcttcttaaaataaataattaaaaacgtgaattttaaaacaactattgcacaatttaactcttgtgtacgtcttttgatatgttgtgacaagtcttttggtttgttggtttgtcgtgttgttgtttttgtttgatttatggggtcaagtagtcaacatacagatactatatattgatgagagttatatctcaaattcatttggatgaggaggaagaaggaatcctaattgcaggagaatcagagggtgatgtgaactggtatttgatgatcggtggtgtttggttgggaagtttttaacggggagactgatcgatttcgatgcaaaaatcataaaatacgtttgtaaaaatattacttatatctccatttactatatacacactattctactcatgtttattgttttaatgagtgtttatgattgttttttttttttaattctctttgagacatcattttttttaaaaaaaattatatatgtaatgggtacccgatatatgggaatccttctcccaacgagtaatccccgccccgcccccactttaatttaaacgggtattggagcgggtatag

SEQ ID NO: 268300 - DNA, 551 bp, Cannabis indica
atttatcttcatatttttaagtttaatattaaaaattaggtgtgtaattggacatctaattaaaaaaccgatccaatccaattagtaattggatcagattgtattggattttgaggtctaattgaattggatcggataataattgtttaaatctaattactaattggattcagatgaaaagaaaaaaattaaaattggatcaaatgaccacccctaaatccctatatccctctcccttcttctcttccttttaccaaacgtactgtaaatattagggtggaagaaaggagtatatggtcatttgcccctctcccctctccctcaatcttttataatttaattttttaaaaattatattttttgcctcttaatattaatatactttttgtttgtatctttatatatttgtattttttatctctgtaaattttatatttttcataaccccacactaattttttttttatcccacataactttaattttatacttataaaatttatatttgatttttattctcatttcttttttaatttttatctccataaaaa

SEQ ID NO: 268301 - DNA, 839 bp, Cannabis indica
agtcttattttcttataatttttcttttttactttaataatttttttaatatactttaattaatcgatatataattatttatttaaacaaaataataataacaacaacaccaacaacaaaatttctcaagaaaaaaaaacaacaaaattgaagaaaagaaacaaatgtaattacgcaaaaattttgggcttcattgcaattacggagaaaaaagtgtttcatttcattgttttcactaaacaaaaaaaataattgacaacggctagttcctaaaacggtaacctctaacggtcgaaaaaagattcaaactcccttttaatctctcccattatactactcttctcctcatctcactctcattcttcctactcctcctcttcccaaattttcatctgaattcattttggaagagaagacccttcttcattctcatatctctgcaactaattttatccaaaaaaaggtcaaaagtcaaacttcaaaatcgaagatgttgcaggatatgtggaatgctcctcctggttttagacccactaagtctgctccttcttctccagccaagcctattggagtatccagaactcggtccgagtcatttcatgtgactcacaaggtacctgttggtgatactccttatgtcagagccaaaaatgttcaagtaagttgctttgaatttttaatctttttgagaaaattttactgattttttcatcttttgaataatgttttgttatgggttgctttaagatttttgtttttgagagaatttactgtcttttcatgctttgattatttgggttttgattttttttttatttgagaaaattttactgtctttt

SEQ ID NO: 268302 - DNA, 679 bp, Cannabis indica
cttaaaaaccgcctctaaagggtgtttttgtagtagtgagggtgtattaagagttagtcccacattgctaatgtgtggaaataaattgtgatatataagatgaaagagctactcctcccaaccaattggttttgggatggaacctcattcatcttatcctcaaattctaacatttttcatattttaatataaattagaataatagaactcatatatatacatttagatatattattattggtcatgcatatggctacaattattttgttccatatttgttttttattatattatcttcttcgaactccttcctagtttttcagagcacctaattctactaataagtcatacgattggtcccccaatattatcatcaacatatatagcctatactaatattcctatattccataataataaatattctttatcatttttgtagtttcatttctcaaaattctcaaacaaaacgtacattttatttcggtgcatggaattttcttcattattaatttacttttacatttggaaaaaaaattaaataatttaatgtttttttttttggttaatttaagccctatgtgtagttcatgtaaaggtacaaccacttgagactagcttaagtggccataggtgggtgtgtgtcttagaggtcgtgggttcgagtccaagtaaaaca

SEQ ID NO: 268303 - DNA, 955 bp, Cannabis indica
gctcctgtctacacactttgcaagtcgttagggatgcagggcaccctaagactgcctattattgactttcccttattgggcttgtcgaacagcttcttctagcttgataaagctatcagctctatcaagaaaccccttcatgttgttggttaagattctccagttatctttctagaagtcactcaatggaaggattctccccagtatggtcgtatatcgaccttcttttgttaggcctttgaccttggtggcctcagccatgaacctttggatgtaatccttgaaaggttttccttatagtcgtttgaccttgacaaggtgttttagctgtgaaggtatcagtcttgaggatgagaattgagtgtagaattcttagtaaaatgcattccaagatttgaatcttcctgaagccagcttgaataaccattattgagttgtttctaacaaggttgccaggaagatccaacattgcaaatcactagtaatcttctggagatcaagttacctctcgaagtaattgatgtgtgctagagggtcttctcgtctagtatacattttccataccggtatcttaaacttgggcaagggcaggccattgatgtatgtcgagaatggtgtgccccttgacctatccagttcaaggtctgaaggcttcgggcaagccaagcccttaatcatgtctcttatctgatttaattgtgcttgtacacaagcatctgatgttgtaggggtttggttgattggccattctcggatgggttgtagccctgaatgggccaaagtctggctagcaataccctgagaaagggtatgcatgaggccagccagtgttgggttttgtgccctaaataaaacccatttcaatatataatcagatttattaataaagattagaaatcacattttatgttgcatggttcacatgatttatttcatgattgtttaatgtataaat

SEQ ID NO: 268304 - DNA, 880 bp, Cannabis indica
cattattctttttcttttcttttctttttttaggatatatgtgtatccaatctctaacaatggaatttggaggagatattttcaacagaaaaaaaaaaaaacaaaacaaaaaaaatcaaagattattattattattattattattattattattattattattattattattattattattattttgattgtatcttcatacttaagattttatattatagaaatcattcatttttttttcttgacaaatgaaatcatttatcttaaatacttgatgaagaaaaaatataacccatacttttttaggactatttagaatagattaatactaggaagagaataatgatatacattaccttatttattttgaaagtttaaccttacaatgttcttctcttagtaatataactactttaatataagggtaatgttgataacttaaaaaatagttggtgtgattgaattattccttctattatattaatttaaatactatttttgaattcataaataaaatttaaataatattaaaattttgattattataaaaaatattaccatacatatttagtgtgtgagatcgattttttatttttaactcagttatttctatgttattagtaataatatatatgtgcattatacataaattttatgtaaatggtgtacataaattttattagttttagactattttaccactaggccatttattgggttagatacttaagaggggcattttgataatttacttcatggtgattagtgtcccttttctttaatagacaactggtgtgtaattaataaaaagagatgtttaattaaggtattatctcattatttctaagaaaaaggaaatttagaataacaccacctcttt

SEQ ID NO: 268305 - DNA, 663 bp, Cannabis indica
aaaaaaaaaaatgaataaatttatcttgcacaatagtttcaattgtaaatggaacattgtttataccagtaaggcctaacacaattagacatattattttacaattggctagcaataccttttaaaaattattgtatctttatctttatctttatttttatatattaaatgtgattatttaaccgtatttgttagtttaatgtttttttattttttttcatccattaaattttaagttttaacagaatatttcataagatctgtgccttcgggtctgttgcggttaagtatttttaactacctatttttctttttaactaacttcttttttcaaactcatcttttccctcttcttttcggtttttttctcgtttgcctttcaccttcttcatctgccttcgattaactttgtggattactaatctgaattgatgttgttttacctttctgcactgctagttttcgatcatggatcccattatgaatgctctcaacaatactctatcccttacggaagaagagggttctatttttgccttgccagaggaggtcgccacttcatcttttccgacttctgcccatatggtcattgcccaagtcctcactgacaactatgtccataaactgaattttatcgaataaatgtcaggacactggaagggc

SEQ ID NO: 268306 - DNA, 802 bp, Cannabis indica
cggggttgtgttatgcttctcttctatttttccaagcagttttaggttcagaaggtcctcattttacccatctcctcaattgattgagaaaagaaaggcaaatacagtactacactcaacctccaggtccactcagctgatttgtagagcagcagccgagtacaaatttcccgatcctattcctgaattcgctgaggcagtaagttcctctttaatattgttaatctataatcttaatgtacttactatttacttcccttatttgtttttatcaagtctatgctcttctccgttttggtttatcgtctcattttttgttttcaaatgttcggagtgcaggagacagaaaagttcaggactcatctcatcaagaggctctccaagaaagatatatatgaagattcagtcgaagaagttgtaaatgtctgcaccgaggtaaactgaacttacagatttgcgattctatctggttctttacattgagtttgtaaactagagagaaattcaacttacttttactatgtctttccaatagatattcagtactttcttgcacacggagtatggcggtcctgggacactcctggtccttcctttcatcgatatggcagaaactgtccacagtaggggattgcctggagcatcccaagcagctcgagtggcggtcaaatgggcaacaaatcatgttgacaaggattggaatgaatggacaggtagtgattgacccaacattttgtttgtagaaaaaaacatgagttaactttcgttgctgtagtttcttagtgtagatttaggagctgtt

SEQ ID NO: 268307 - DNA, 957 bp, Cannabis indica
ggcatgaattgcgccaatgttctgaaattcgggctaatgtgattaaagaaaaaggagaagttgctccggcatacggtgtgtggcataaggtaaatatgacggggagaattgactcaaataacaaacgagagacatgcctgattaatcaacccgatagacagggaatcaacaacttacccccatctcggttgatagaacaaatttccaaagagggagaggattcacttcagcaagcaaaccaaatgaaaggtaacccccttcatactccttacattaataattatcaacaacctattatacacaaagatggaactaatctaaccattaactctattccttcttatgataatcgggatgaggattgtatccaagaagccatgaataacagacaggaacagaatgaaatgggcatccagaaaagaatgtgagaagctatggtgaatgagtcaaccaagagtccaaacgggaatatgtcttgcaaagcccgaactagtgagattgaaattgcggatttggggtcaaatggaatcctctttgatgtcctcgtgacctttgatgcagggaacaacattcaacagaaaaggcagcgggaaaagcgaagaaaatttgttccataatctaggattcgttcaaagattcaagcaactgagactaaaggatggggaaccagatttgatgctctaacaggggaagtttctatgccaaatgattcaacctctgtgcagactaatgaagtagcaaactctgtggggcagggtcgccgagaacaatgaattcccttatttggaatgtccaaggtcttggcaacccttggacagtgactactctagccactcatgtgaaagactttaatcctggtactgttttcctttccgaaactcgatcgaaatgccattacatggagtcgatccgtattcggttgtgatttgaggggtgcttttgtgtggatgccaaagg

SEQ ID NO: 268308 - DNA, 896 bp, Cannabis indica
tatttattattacttgtatcccaatttttggattaatggctctttaattatgaggtcagactcaattatagataacaatgccaaaatgtgacgtttagtgatagagaattgacacatatatactgttattatttagatctacgttctcttttattttttatcagtattaagaagtagttgctgattgattctcaagttatgtagcagtggtccaataatgaaagccaaaaagaaagtcaaagcaaaataagaaattaaaaaaggtgttgaagaaaataattgattggtctaattccatttgcaactacggtatgtattcttttacaatataaaaactgctttagaaaaattatataatgcacccctttaaaagggatacaccaatacatttttatttaattcagtatctaaaattatattttagtcaaaaattttctcatggtcataaaaattatagttatttaagacatgctgcaaaattttataaaatttggaaaagtaacacaccaaaaaattgcattcaaacagtgtgttgcacgcgtgattattttattttatacgctgtttgaaaattgttttttatattgtaaactagtcaacagaccgcgttttgcgtgcgactgtctataaatattttaaattatatgtatgaatatttattgaataataaaatcatatcaaataattttaaatttatttttatgtataattttaaatttatatttattaaaaaaatttatataaagaacttcgaagaatttcttttataaaataattcatcatacaatttcttatatacaaaataaaacatcatcaaatgtatattataatgaagaaaaataaaaaattgaatagtaatcacacaaatagatataaaacaaaaagaagaccataaa

SEQ ID NO: 268309 - DNA, 1369 bp, Cannabis indica
gaaaaccctccaaagtactattatgtttgtatttttaaggtgtcatccatatagctctgttaaatccttagtttgcctacgtggtaaagatagatcactcaaaaattagtcaacgttgccatatttaccaaaagtcaaaaacttatgtgtgcattcttgtacacgtgacacaattatattgacacacctatgataattattaaaaattatacaaaaaaatatattttaaaattcatttcccattattgtgtgtcattactatttcttaaaaaaaataaataaattaaaaagccctaatctcttcatcatgtctctcctgcttcttcatattctgcctcgaaacctagccgccatagagttaccatcttcctcaacccaacctgatgaagatggctttgcaatggatggctgctcaacgacatggataactttgcgacaatagagagatctgcggtgacaacaatttgggaaaccaatgaaggtcctctagggtgggtcgaggtagtcttctatcaaattaggtgttgccgacgagcttaacatacgccacaatcgatgaccacgtggtcagaattccaatctccctttctcgtttcatctcctctttgctcgcaatttccctctctctctctctctctcccatcttttcccttctcatcgacaccattaacgaagattgctaacacatcaactttctccttttttctcgtcttctttcttcaaacaacttttaactgaaattggagtcttctccaccttgtcacattccttcgcactaactaaatgccttttgtgatgcgactccaccttcacagctccacctaaaatagtcttgccgactaatttatacaaatttcgctctttcttacccttcacaactaccaagccacctttcttgatagttattgcaccatcttttgtggaatagacataacctcgagtatccaaagctcctaaagagattaaactcctctttaatgttggaacatgtctcacatcagttagtgtcctcacaacaccatcaaacattttcaccttaacagttcctattccaacaactttagagctagaatcattgcccatcaaaacgtacaaccatcatatgccttataagtgtcaaagcactccttatatacgggcacatgtggaatgaacaactagaatccaaaatccaagagttagaaaagttttcatcagctatgacagagagaacatcagagtcactttctaagccttcaccagcaacatttgtggaatttgatgtgtctttgcattcttgattcctcattgcttcaagatgcttggtcaactcttcacaattccgcctaatatgtccttttttgtgacaatagtagcactccacttccct

SEQ ID NO: 268310 - DNA, 1021 bp, Cannabis indica
ctctgtgaagcatgttgacactaaaaagtggccaacattagctcgttagattggcgagatggataatgagtttacgtaaataatttagagagaaacacaagatctatagtagttcactccccatgtcgcgttggtaatagagctacgtcgacttcaagtttttattttctcacgagaattacaagaaaattggctaagtttgaaagctttaatttctagagagagattctttgacattagaggtatttttctgaatgtaaaaaaatgagctagagaggttctccttttataggataagaggttctattaaaataataataaagtattgcaaaaaatatgaaaaaaatatatttaggctacattaaaatatccacatcacccagaattaatatccacatgtcttgtcacatcattttttatttaaaataatactgtcatgtaagtcattcaacgacaaaattaaacagaagtgaacggaaagactatgtttttgtattcgttataatttgagaactattcgtaataagtagtatatattagggggtaaaatttagtaaggtaaaaagttgagagaacaaaaatactatttattcttaaataaactcaacttctaactacactattttgttttatttaagggatgtgattgttgaggtattagataattggcctttatataataacgaaaaagaaaaggtcaattaagtaatgattttgtcgacagaagtaaataattatatgtaactatgtaagtaataggtatagtatacgtgttgttgatggtgctcagatataaggaccaaaattatgtgtttccttgacgccactatatgatacttatttggagtttgaagtcctgaggatccgcgaccctacataagttccttgacctttatgtcttttccaaaagtaagcggaaacagaggctaaaatggcgaccagaaggaggggtgtacccgtcaattactatatatatatatatactatagtagcatttactaacacttttatttttaaattt

SEQ ID NO: 268311 - DNA, 1040 bp, Cannabis indica
taataaatgtatattatattttttaatattttttattatataaataatttttaatatatataaatgtaattggattggatcggtttttaattagattttgagattgacatccaataaccgatccaatccaattagaatccaatttttagcattcgatccaatccaattgtaattggatatccaactttttgcaattggattggattggattggttcggttcaattgaattgaattggatgatgcccaccccctaacccaaagcatacaaaaaaatatcaatcaaacaaagtgagaaagaaaatttaattagatgtcacctttttttttacttgtaattaaacaatagtgatattccaaatgacaaattatcgtataattttagaggatatatatgtcttttaattttttaatatataaaattaaaaatatattaaaaaatttagtagaaatgtcataacttagaaaattgggtgaagaaattctcccttacttttaggatccactagttttctcatcaatatagaacctctctttaagaatactctattcaagaataacttctaattttttatatataaaaaaaatcaagtcccaatttgagccaattataaataaaaaataacctctaaattataattaattatacattttccaagtcccgtattaacaaagtatacatctatataagaataattacatcttaataaaatatatattttgtaaatttatttccgtaaaattaataattttattctaaattgtaatacattttattttgttttgttgttgagagaagaggaaatcattggttctacaaacattcagagagaaccaaagaaatgggcaaccatttttcatgaaaacgatccaacccattataagttggctctgtatgagagcaaaacctcattctttagtttttatggctaatgtgtcttttggttttgtaaggcaatatgtttagttttgtaagtggcctgttttttgtattttgtaaggcctaatgtgactaattttttggtatggccaatgtggctag

SEQ ID NO: 268312 - DNA, 529 bp, Cannabis indica
tttattatttaatacaatactatcctcatacggcgtaccaaatgagccataaatgtaatataaatgccacaaagcaatatatcataattcaatttatgtatacacatgttttttgtacttgagttcatgtagcttgcatgtgaaattaattaatgagctcatctgatcattattttgaatcacaatctttttcttttagagggcactacatttgtagtgaaagacttgaaactctttcgtttagttagataaatgataaagtgtttggctttatgaggcgataaggccgagatcgctatcatatatatatatatatgctcattattgttagcctttttaatatttgctcataatcttgacataatattaaaaaaaaaaaagaattatttgcaaaattctttatatatatatacacttatagtagcaaaaaattaggtgtgagggacgcatattaaaatttatgttaagtattttttactttatttaaaagtgatacaattaaaaattaaagaaaaaatattattagtta

SEQ ID NO: 268313 - DNA, 846 bp, Cannabis indica
ctctctctctctctctttctcaacttctcactttgctatttctcttcaaattggatttggttgatttgtgcttggtgaattgtgattgtggaacttgaggtagttttccacctctttactttatattttgtttctgataatatgttgaatttgtgcatttttttatgttgttagttgctagttgcatgggtgtttgaacgaagagtattttgatgttaatcttgtgtttgagcttgaattggcatttttaattcgctgttgagatggctataatctgtgggaaataaatttgtgtttgttcatgtatttgggtgagttttggtgtgtttgggcttggaaatcatttgctgtaaagtggattttttgggtttggaatccaggtgtcgtggctccctcattgagcgtcactgcccgcccttcaaaatcctgggtttttcaacctaagtgtcgcggctcgcttggggtgtgtcacgacccacctagttttttttaggcagttttgatgctatgtttttttgttcataactttttgatttagactccgttttgggtgttccatatatcgttggaaagctctttttgagctctatatgtttattgtgttttgaatgccaattatatgattatgtgaaagtgaatttagggattaaccctatttgtgaatcctaggaattatgactaggattaccagtacttggttaggagcacccggggattcgaaatctccacatacgtgggacatcaggtaagacagtagttagcacgtagagttaagcgaggtggcgctcatgtttgatattaaaattgtgattaattgagaactaggattaaggttattaccctaaa

SEQ ID NO: 268314 - DNA, 900 bp, Cannabis indica
atcttgattacttttcactgtgttgataacacaataaataagaatatcaatgtgataaggatttggatgaatttataaatcaaataaataaatgatcacatgaactaaataacacattaaataagtaatgaaaataaatctgtgtctttattaataattgaatagaatagattatattgaaataaaattttatttaaggcacaaacctcaacataagacatatccctagaatgactttggcagttgctaataactaattatagaccttactattttcatcattatgcgattctaaagttctggggaggtaagtttagatataattcgaagttcaacttaatgatctttgaaatgcataaccaaaatatttttccacctctatcagttcgtaagatctttaaccacttaccttattggttttcgccattgctagaaattcttgaaatttctcaaaaatttcaaatttctttgaataatgtatattctacagtgatcgtctcataatttaatgattactcatatccacctctgaatgtacatccatatgttcgaatatagatggacacactttcaagtggatattggcatgttttctctttgcagagaataatcttgtcaaaactactatgaacaagatgtaaatgtcatagatgtattattgtggtcttttgtgattcctaggcttagttacaataaatagttcaagatgattctggtcacaaaatataaaactcataatccataaatttaacatacactttggatgcattgatagaaaatagatattaacaacttgtgaaagttataccgcagtgtacaagtattctagaaactgaaattaaatttttatttggaatctaaaatttaaagttaaaaccataaatttataccaaatattta

SEQ ID NO: 268315 - DNA, 1041 bp, Cannabis indica
gtccacgtagatgcacacgtggacagtccaacatggcaacttaacatttaaaatggacggaaatgttaaattgcaacagaacgcgagtatgggggttttaccactcaaatttaggttgggggttaactgaaacaaaaatgaaaattttagggattttgacgccatttaccccaacaattaataaatatggaggttagttgaatgaacaattgcaattttactaaaatgatgcattaaaaattaacataccaagacataggattaaatagctattcatgtctcaagaaattaacttataactaacttaataaccatcatccctgatattagttcagttaaacaaaattgtaaaaatacaagtgagagagagagagagacaaaaataaagggaagtaagacaaatcctataggatgtgagtaataaagcctttttgtctttcttctctttcttcaaatcgtgcaattcctcttcaaaaattctctttgtattttgttttctttcctgcaattaatttctctataaaatggcagctaatgatgcaatgactgctggtacttttcttttgttaaccaataagggtacactttgtttctcttaaattataaagcccaaaaacgttttttttttttcttctttttggcccacaaagtttggaccacaaacatccaactagcatcacttaagggctactgcaacttaagcattgtctaacaaagaaatacaaggctggcttttagtttccatgtcatcaaaaattactcgaggatgttacaacattctgttttagcaatctcaaaatttttagcttttgcttccaacttgaacttccaaatttctcccattgcagagaaatctaaagcaaaattagttatttaattccattgaaaatttaaaaacttaatagacctcaagatcagattaacgaaaaaaagatagacaacaacttaatatttacaaacaaacaccacattcacaactttttttttattattattttatgaaaaattaagtttaaacgccaaataaataactctatatca

SEQ ID NO: 268316 - DNA, 938 bp, Cannabis indica
ggtatagtagatatctctatcatgccccgtaatattgtgggcaaacgacccatttggccatattatggaccgtgtagttacagtttctagctatacaagaaaaattacaattagtcataaaagtagagaggagcttgcaatgacgcacatagttctcaatcccccaaatagagtcatccccttttcaataccaaaggagaaatgctaaaagggacatggtgtctagtatctttttatgtgttaatattgttattggtgcaaataaatatcggacatatatagtttaatgtaatattctaagacaacatatttagagacactactctgtctaatagtaatgctcaataaaggtattatataggagtattaatggagctggtgaaatttaatctggctatgattcgacttgatccgaaccatgtaataaactgctctaccctgccttgccccgccttgatacaccagttactcggatcgaatcggatcaaatctgacccgtcttatacggattggatcggatctgatccgactcctcttttttaaaaaaagaaataataattttatatttaaattaataatttttttcttcctaaatctgttttttaagaaataataatgcatcattttttatatatattttgattttatctgtctaaatcaataaaaaatattaaattcttatcgcataaaatataaaaatgaaaaaacctcttatttattttaaaatttttgtataaactcacaatcaactctcattttttaaaaaaaaataactatttaacatcaaattttcaaatccaaactaactaatttttttccacatttttcttcatagagtactactactagctagtgaatttaatataatttagaaaatccgaataatatcaagctatttattgtaagtgacggtttcaagtttcaacttgcaagaataa

SEQ ID NO: 268317 - DNA, 582 bp, Cannabis indica
ttaagtgtaaaaaattaaaacataaaaaaaattcgttccaaataacccttttaattttattataagggtttcatggtttaaattgagggacaattcttatgtatatagagatgtacttagtgttttgttgtggatttttttggtacagcaagaaaaatatgagtcaacacaaaaaaaatatataaaattaggcacaataaaaattatgaacttaaaaatggtacagcacgcaaatacaacacaaaatacaaatatagtagcaaaatacatgaacacacttatataaaatatgcattaaatccataaatatttatttatttgtttagttcataagtttatatagttaaaaaaaatatctaaatccctcttgttggcaagtcttaaacatgtgttagtggctgttgagaattgtggggttcagtggagtagcctatatatgttcttatatatggctcaatacttttacatttaatccatgtgggacaatattctctaatatcccctctcaagatggtggctatttttgctcaccaatcttgaatcaccttatcgcatgccttgtcatttgcttgcttatttttt

SEQ ID NO: 268318 - DNA, 592 bp, Cannabis indica
caagggtcttttgatattagttgtttttctattgggctttgtaagctcaccccctattttttttcccattttaaaaatacagtttaatgctaatggatgagaatggtatgattagagaagaaagtcattataagtttagtattattctatttatcaaactttccattgaaaattgattttgaatttaagcttgaatggatggcctaaatgacttaaattagctatgtactagttagaaatgacgaatgatggatgctagatattatttaatattttattgacttattaaatatatctatttggtgagtacaaaattatgggaatattattcttctttaatattgctgagtggtcctgatttggttattaatattttctttataattatgggagctattccattatttttgaataagtattttgtaatataaattaagagaatatttataagctttatcttcctatacaagggtcaaagtgtgatctttgaccacctaaattatggatattacaaatctaccatggcctagggctcgggtcgtgacaaaaatatggtttcagagcaccgggtttaattacctcaaagtgtgtc

SEQ ID NO: 268319 - DNA, 667 bp, Cannabis indica
cagtttttatattttcttataaataattgacatttgtaaaaacatggtttttcaatacattatacgatgtatcctcaaaaaatgaaatgaatccgacttctgtaaatagaaataacaatctaggttttccacgatacaacttactggtaatcttaaggacgtgatcaaatattgatttacgtgaatcaatatgaccagtgaagttagaatctaaaaggttaactatatttccagaatgtcagttcatctcaataaagtatttacgtatgaatgtaatccttagtatcttaaagatagacacttcatcactttgtatgaaaatataaagtggtattaacttaagttattatgatactacttaacattcctgaacaagtgcaatgttagagcttatgcaaactcttaggaatacattaggcttctaaagatagatgtaaaaggaatgtatattcttaacttctccccatccagatcatttttcaaacactgggttgagttgaatttatcaaggtaaaagcaacataaggtgaataatatataattttatttaatcagagattgtaactactctctaattaattaatattatatgtatcaattatattctttatctcaaaaataataatttgagatatgaattatttcaccttatataggaaacttttat

SEQ ID NO: 268320 - DNA, 935 bp, Cannabis indica
tttgaagatttgaattttttttttcttgttttttgattcagaagaggattagttatgggaaagaactcatggaagcgaaaagagttttggaagaaaacgaaagaaaacggttttgtttcaatctttcattttaatattttcatttctcttatttatgaaaataatttgttcttcatttgagtgaaataattagtaatttttttatgtcttagttacttggctttgaaacaatcagataaagaagaagaaaaaagagcaaaagagaaaattaaatggaaacttgaacaagataaggtgctaattataaaataataataataaagattctttggtttaattttttttctttatgccttttgtaattgattctatacaattttttatttatttcttttagggaattttgtggcataaatactctttttatttgttttgttgctaataagtacctaatttctgaaaatagcggtaaaaatcatcaaattatatttttcggttactcccgttagtacccacttaacagcccctttaatagctcaaaaagaatgccacatgttgattcataattggtctaattcatactttttattaaataaatttaaaataaaaaaaaaataaaaaactaattaaataaaatttaaataatatatattaattattcttcttctcagaacgactcatgactccatgaaccaaccccatgaaatatttcatgtatttgaagtaaaacgaatcttggcagccatatctatgccactcagctacacacacccataaatttttggttttcttttataaaaattcattaacttttcaattttcacaaagaagattaataaatcatcttataaatttaatgcccaactaatgtttatacaatacccagtaacaaatctccatttacaacccaagtcgtcaactccactaagcttcta

SEQ ID NO: 268321 - DNA, 953 bp, Cannabis indica
aaactcagcttaccgaggtcactttcttgtaaatttgagctggattggaacattcactgtaagggtattcagaagtaaacatctccaaaacacacatcccaaatgagtaaacatcaactaactcattgtaatcttcctcatacaattctggtgccatgaactctggagtgcctaaagataaaaaaggtagaaattagaggtacaagttttggcactactcaaaaatttatactagttacgtagtacctacctataacactgtgtgctgattgagagccacgaagaactgcagcaagacccagatcaccaatcttgacctgtccaagatgaccatttacaaaaatattgtcacacttaagatctctatgaataacaggagggtcatggccatgaaggtaaacagacctttacgaatctgtctagcccaacttcttaatggccttgatatcaagcctcttgtattttcttctgtatctgtaaaaaaacatattagtacttagagaggctaatatcaaaagggtattattaattatggtaagtaatgaaggtaattacttactctcttaaggtcccagaagtgaacatttctgtgatgaagttgaaagttctattatcaacatcgatccaagaggtgtagaatcgaatgatggagtcatgattgagtgtgctgagtagatgaacctcagaataaagtctctgtaaatcatctggtgatctaaggacttcattcagtttgacttggctccatgccacctccattcccagcttctcatctattgctttgtacactgttttcattgctcctttcccaagaacttcttcaatcttttccagaaagtatacatgaaaaaaaaagattaataatttatagaaagtgtaatcatggcatacttaaaaatttataataataatgataatcaagagcagagatagaaagttaattcatcatcacc

SEQ ID NO: 268322 - DNA, 601 bp, Cannabis indica
aaccatatggttacaataaaatataacaattgaatagtcacccataaatatatttaggtaaatgtatattatatctcgaaaaagttgttatgatacactttttatctatcagcattcttaaaataaaagtattttaataatcatgtattttatttaagactatttgtaaaaaaaatttaaataatttatagagttgaaattaagattcatatagtcgtttgtcactcgtataagaaaaaataattacgtttgcattaaaataatttgaattttatatttttagtgttgaaaattattttaaaaaatttacaaatttaaaaatatttttaaataaagtatatatgattatgaaaaataaatataataaaaaacatgtacattgttcatctttttgattttcggcgaaattaatatgagttgagttgtgacacttttagtttctcaaatcacttatgttatttgaatcacatgtaattcgtatcttgtgtgaagaataaactactaacataaagggatcttagttactagaacaatcataacaaaaataataattaaaaaaaaaaaaaagccaaaaatggaattttcttccgaactttgacat

SEQ ID NO: 268323 - DNA, 1001 bp, Cannabis indica
ggcccaaagtatttttgtaattttttttcctttttgtatttttttgtttttttcccttatttttatcaataaataattttagcaaaaagtcgaaaaataatatttttttttatcaagaaagaaaaaaccttcattaatcaacaagcaaaaaagccaacttacaaactcaacacaactcaagcccacacctacaaagagttcatttttaacaataataacctttcctcatctttcaacttcttaaaaataaaattgctaaacatatactttgcatctttccttatcatttctacaattttttgaacactataagaaaaacctttgaaaatacacgtgtttctattttgccacacataatatacaatggcagaaaaaaccattgcagctactaaatttacccttttgttacccaactgcttagtccagagctgccagtcctctagaaagtagtttacataaatataattgaataagatagaaagtataaaataacaaactgccacgtggcagtaaaaatgtaagaaatgtattattcctcgtaaatttccaacgtaaacaccacaccactcatatatatatatgtttcttctttacattattacgtactcaaacaaacaactcctcattcattctcccacttccattactgttcattacataagaaatttttctactgcactctgcacctgacaagtaagtatcaaccattgtaaccttttctttcttaattattattcttttggttacaaatgtatttcttgaatccatttattgattaatatacataccaataatgtcgattacaaaaaaccaaaaagatacttttttcttgatttcttcaatagttactaactgtataaagtcttaaactttattgcttttgtttcctgtaatgaaatcatattttgtataattataatttcacaagaaatttgcacattctttgacttctttctctcttcattgcatattttatgagtgattctttctcttcaaagaaa

SEQ ID NO: 268324 - DNA, 1858 bp, Cannabis indica
acataattattaatatttataacaatttgtttattattcattaatggataataaccccattaagaattattccatatatataaaaattcaggatttctagttatttttctctcttatttttataaaaattagcacctctgatgtgcctagctctctttaatacattttatttatatttttatttattgaatttgtatttcataaataattataataaaatttatatcattaatttttacatgttactacaaaaattataaaatacatatttaattattatattggtgatacaaaagtaaaaacaaacttgttaaatggatattttaagtctttatagattaaaagtgcctatctaaccatatttcttaattttaactttacaaaatttttaaaataataaatacataaaaatactgaccaggtggttgaactaaatccctatttttctaaacagttttgaatagagatattttaaaaaattaatctaactaacttctcacaaatccttggtctttagcatttatatactaataaaagaatacttgtgagagatgcaagcttcagccataaaattgagcctttcatcaaaagttgatcgactagaaaaatcactataaacatacatcctcttaatcttctccaatgtatcatgcacaattttctgatcgagtagaaaaatcactagaatacctcttgatcttttgacagctttacgctagagcaatatatcatctattggatgtgaaccaatttcacttttacaattttctttcttattagacttgctttgattgtttttaatgtggcctaatagtcaaagtagttcatttgaatagaaaagaatctttaaatatgtattgaagcattttattaattccgcgctgctcttccttagtgtaatggatcctaattattggtatattttatcaagtaaaatcaaaagcaaatgtgctttgaaagtagttattgttaattcatttttccttgggtgtaatggatcgtaattattgtatatttatctttataacatcaaagattacagtgtcaattgcttagcaataacaaactcattaagttgtgtttgatttattatatgaatattaatttttggtttattcttagattaatttaagaataatttgcagttagattatcaaatttttttaaacattaatatattgtattcaatttacttttaatttgtaacactattatttagattaattaaatatatgtaaaaataatctcaaacaataactaataatattttttatttaattatttattatataatttttaaataaaataaaaaatacttaatataaaattaagtatacgttcctcgcataactttcttttagtatatactcatatatatatatatatatatataatatgccaattatttagatatattttacacactatttaatttgatacattcaataaaattttaattgatctgcttaattttttattttttgaattataatttcaaattatttgcaaatttaaatttaaaaataattaattaattaaaaattaatgaactttgagtaccagttatttgaaaaataaagaaaaaaaatcaagtacattaaagtgtgattaaatgcaacacaaaataagaataatcaaacttacataaataattttattaaaattaaaagtggtaaaatagataaaaatattacctaggaagaaattagctttataaaggtcgattggacacatccttaaaaaattaaaaattaaaaaataaccaaaaaggaaatgttagaaaagtcatattgatttgattgtaacaatattgccattaaaaacaatataaaacctaatgagcatagattaattataa

SEQ ID NO: 268325 - DNA, 1196 bp, Cannabis indica
aatagattgaaagaaagaaaaaacaaagagatatgaaattagttttaagtttaggattatataaggaaaaaaaatacgaaaatacattaaaaagaaaagaaaaaaaaagatgtgttttatttttttacttttaatgtattttttgttagttttttttaactaaaatttaaataaaaattcaacgtaggggttttttttaaaaaaaaataatatagggtaaaatataaattagttacttattttttttggagctttttattattattttagatgattaatatttacaaatctattaaaaaattaaaaagtgagagaatttaggaaaaaatagatagatgtttttggattaattctaaacaccatgtcactgttttatacttctcctttatatatatatatatatatatatattgatcctattaattaacataatattctttattaatcttataataagtaaacaggtctcgcttcacgtgcggcagttaaattattatatgattattaattgaataataaaatcggtatcaaataattttaaatttttttttatgcatatcttttcaaagaaaaatatatattattaaaaaatgataaatctatatcgaaaactctaaatgattaaaaaaaattatcatacaatttcttatataaatattaaatcacgcaatttttttaaatgtaaatataaaatcacgtaatttttttaaatgtacaatattatagtgaagaaaataaaaaactcaacaattcttacacaaaatagagatctaaaatataaagaagacaataaatctatagaaaactcatcatataattttaaaacaactatcatcatcatatctcatttatagtcaccactgtatttaaagttgatgtcatcaccgtatttcacttgtaatcattattagtacctagatttattctgtacataaaataaattaaataatgatcgataagtacttatttttattatgtgatgggagatgagctgatagacataatcattagaattttgatttttatggtatattagttaatagttttttttgataaattatattagttaatattaactatatctttctgtgaaaaaaattgtatgtacattaatttatttaacatatatatttatttatttagtttttatattagaaatgtatagttattttttttttaatttttaattaattagt

SEQ ID NO: 268326 - DNA, 1163 bp, Cannabis indica
gaaaatacggtggtacttggattatatattcacaacagaataggggtccattttttactgtgcattaggtcgacccatatatggccatagatatgtcatgatccattggtatcactttagaccaagaacaaagaatttaagaatatatatataatataaatatatatttatatttatatatatttcaggcagggccatcatgcaaaattgcacattgtctccatatctaacttaacttttttttttttaaaaaaaaaaaaaaaaaaaaaaaactttaaacgtaccttttctttattaatgatatccttcttggcagtccaatctgagaaaattagtttctagatatttattagcagatcaccttttttttttttgggttgggaataatcaaggagagtttgtataaatatatataatgcattacaatattgatttctgttgaatttaatttacattctttctgtgtatgcgcatatatgtatattagtattactaacactcgttattatttttttacccgaataataataatctatatatactgattcacaaaataatataatataatataatgaaacattaaatatgtgtatatacaatacaaatagctttaatgaagatctgaacttagactagataaaagaagtgcaaacataattaataattagtaaggctttatattgatcacaataagatattgtggttttttttttatacaactactttaatacttaggagttaagaaatttaaagtaagaagaaaaagaagatcgatctgtactaaactcgtgatgattttcatttatattctgagctctgaactatacattcgtaacttataatataatttatagttgcgagttgttgaagttatatatctatgtctatatatatatatatatgtgtgtgcagatatgcacatgcattaatgctgcttaatttttgttaactttagcatcaaattattaattgctgcaacatatttatttcttttatgtttatgcagtaataattaaaaccccatcacttgaaatattcttttagttattgtgatatatataagggatatttgccgcataaatactatatgttttcggttttatatatttaaataccacatgtttttttttcgacggattaaataccttaagttacatttccgt

SEQ ID NO: 268327 - DNA, 789 bp, Cannabis indica
tccacttttttaagccgaatatacccttttcctccagcaagaaactcattcgattcctgtaataatcgcacaatataagagcttgtagtccaccaacacatatataatggcctattaactactcaaaccataacaaagcacatacagaagaaaattcaaacctttaagaaaattgcatagacgattttgttatcactaaaataaaaaggaaaaataaccaagcctgttgaaaagcagaaaaaaactgaaaatagtgttacaaaaactcactctagagtctacaacagtacgagtctagaaggacaagtgaaagagaatcaatggagattcatgtagaaagtagaaacagcccattacctgcaaccggttacgaatagtagaaagagtagtcccaccatataatagtgcactaacatcatcattaagctgctcctctttctttttaacagtctctgcggctttattatggcactttgacaaattttccagcaccaattttcttaattccagtttctcacgcatttcctcaagcacatttattcgatttattgactccgcttcaacctgcccatcatgttgccacccgctaatacgcgggctaatcaattaaagctcaagaaattttaggaaaagaatataaagactgtgcttctatcagcatccagtggcacgaaaatctgagaatcttacagactataatttcaagtgagagtgtttgcgtgtgggttggtgaatgcatgcacaggtgctattttatgtcctttcaattcgattcatttagtcatttat

SEQ ID NO: 268328 - DNA, 573 bp, Cannabis indica
gcaaccaatctcgatttgtacctgtccaaagatccatcagcattaagtttaatcttgtgcacccatttgttacttatgatgtgcatcccaggttgtttaggtacaagagtccaggtgcctgcttttttcaatgctaagatttcagtttccatggaattgagccatttggggtcttgtaaagctgcttgtaatgtcctgggttcagatggcaacagagattcgggcaaagggtgtttagtagctaaataggctttcggttttgttatgccatttctggatctggttatcataggatgggatctggttgggtggggagtttgtgtgtggggagagacaccagtagcagggagatcatgtgaagctatggtggtgttgggatgatcattgttggggaaattactggtattaaggacaacagcagcaggctgtgagggaaatgtaggttgagtttctggtatagaaggtaaaggctgaactgatgtaacaggacccgatgcagcaacaatatgggatgttgacggcagagtctcagcaccagtggtatgcacataattaggaaaagatgaattagtg

SEQ ID NO: 268329 - DNA, 1236 bp, Cannabis indica
cgacttaaataaaatcaacaaaatgaaaatgaaatttaaagaatacacatttttgttttttgtttttaaaatggaaaaacaaaagtggttatagaacacatttttgtttttcaaaaataattttaaaaataaaaattttacttttatgtttgtgattaaaaaatttaaaaacaaaagtgttaccaaacgccaccatagcaaatggttccaaattataagattatgttagtaaattttctcatttcaaaacttgtagagaaatgattctattagactatttattatttatattgtcttttgtcacatgaaaaaattaatattttttttttcatatttttttagaattagaagtaaattatttagaaattatggtatatttatattagttttgttaaaaaaaattctatttgaaagttctgtcgatttttttattttcttataagttgttgtgggttgttagtatatagattttgttgtacagtatatttctgttttgttctataatatatattattcttaaatgatatttatttgtttattttactatgtataatagtggtatatatttttttagtataacacaaattttctaatgtatttgtagacgcgatttttcgtcaacttgatctaagaagatcgtaaaatataaaggactacgataaattaattttgacttaatgaagtttgcaattaaataaattggtgcttttcatttaagagtgctgcggtgaaaatttgactgttttctctttggagaactcaccaatttactttttttcacaatgctattgagtacgaggaggactagttacgaggaggatgctaaagtcccaaggggggagttaatcaaccccaaagtaaaggaacctttgtccttccacaaccacatggagagggaacctctaggcatcgggaaaagcgtcccatgctacctatgccagaagatgagggacaagtctaagattgtgagagttcctcatctccatctaaggagcgcccaccagtcaggtccatacctgtccatgaagtgtttcaagagaatgaaactctgtgtgtcgagatagtagaaagcttacgccacaacagagagctccaagagcaagcctaaaggcatggggaccaacctcctgtaccgagagattcttctccatctaggagaagaaggggcgcccaaggagagaacatgcccccatgaataacccaacaaggaggggggaccaccaacctttaccaaat

SEQ ID NO: 268330 - DNA, 1585 bp, Cannabis indica
aaaaaaaaaaaaaaataatagcaccccgtgataacaagcatttgggtttttgacacgtggcgaaaagggggcatgtatggttaacttctacttctggctttgtgttatatacgtacgtggacgattatacatgtatcaaactcatcaactactactgttgaataagaggttaaaatattacttcaattattgtttaatatatattgatggatattaaactaaacacaattttgaagaggtattaattgatcccactcaccctttaatctcttgaatgtttcaaaccacatcatcatatgagtcaatgaggttatctgctcccaatttacgtgaacctcttataccagataaaggggagagagaaagagccaatttctgccacatgaccattaatctgttacactacatcaaacaatctattctgtacgtacggctcaactgataattatctcgtgacaaaggtaattgaagcatattacagctgattgtactgcatgcatgaacttagttggaagaagtactctctacatatatgaccgtataccctaagtgatcatgttttttcctgtcggaaatgtttctgtaatttcacatgtatgtataataataacaccggaatggcattctaatatgggtagattgtggtgatatgtaatattcataatttaaacactcaaagatcacattttgttgctgataagaatgtttataaatgatatattaattacaaaataaatatttagaattttaaaaataattcctatacttttatagaaaatattagtaatgaaatcatgattacttatcactataaaaaaatcttactacaaaatttatgactaaagataaaaaaaaaattgtggctaataataaattatcattattgtgttgtgactaaaaggtccgtgagtaaaagtataagtcacaaaaattacaatttgttgtgactaaatgtatttttagtcacaatatttgttgtggctaaaactaaattagtgacaatttgtaactaaatactatcacatttaattacaaaaaatttatgttgtgactaaaaggttgtcaataaaattagcagttttttatagtgaatataaaagaataataatattccaacagttatgtagtcaccaaataaatagatttaataagtcatgaaaaaccaaaataatatttaacatcaatcatttctcattcttaactagtattgtttaccgagatttttcagaaaccgattataattattgtaaagctaagatcacactctacaccaaaaatgccaattagtgacatttcaaaatgttattgttactaatatttagtgacattttatagtttagtaacatttgtataaaatgtaagctatgccactgtgactaaaaatttaagtgtcactaattagttttgtagtgacattttaaaatgtcacctaaacataaattgtggcaattttaaatctcactatactatttattatttatttatttaatgtttaaaaaataatttacattttgaaaatgtaaaaaattatactagtgacatttttctaaatggccactgaaaattatttttataatgtattatt

SEQ ID NO: 268331 - DNA, 776 bp, Cannabis indica
tgcacgcgtgactcttttatttggagaagtgcattgtaaaagcacctttaaatttattgtatctaaaattaaatgtgaataccataattttatttttcttttattaaaaattaatagaataataaagaatattttttagtgttgtggttggagtagaaatagtttttgacactaaatttaatgatagtgtaagaccaaatttaatgtgctccttagagatgcttttaatctttacattacattaacaaaattgtggcaaagaggagtgctaccgccaacatcctattacaaactctgtgtccgaaaatacataccagaatttttttttcacgacggtgttcgttatgcttacagcatcatccctgtaaattttataaaaatttcgaatagtttacaataccgaaaatacgtttgagatttttgaacacgcgtggtaaatttatatatcaggaactctatttcggcattgtaaactattcagaatttttcaaaaatttacagaaatgatactgtaactatatcgaatattgctataaaagaaatttttaaaaaaatattccgacatataatttcaggcaaatatattataatagaaaattgtaattaacaccattcttgtaacaaattacttacttgagaagaaaatacttaatcatttctttcttaattcttactatttaccattaccattacctaggtaatataatattactatacctatataccattttgctaacgtcatcatctctctccttcccttatgaacttaaaacctc

SEQ ID NO: 268332 - DNA, 447 bp, Cannabis indica
tttaggatgttaaataacatacttgtgagtagatctaagatcttggtaaaataattccaacagaaacaacatccccctagacgatgacagggcatcaaatcttgaactagatctaaggttttgggacataggaaataaatttcagaaactctttctcatctaattttgccttcttcccttccctatcagcatttgaagcagacctctttctattgaagaccaacccttcaccctagttctcatcattttcagtgatgacaataatttatgtctatggtggaggaacctgctgcaatggctccatctaaagggcaggagatgcgaaagtcccctgggcacgaacccttggagaaacctctgacaccttggttaggggtgatgtctctttgttccatgaccgggaagaggctctagtattactttgtcctttggcaggcttcgtagctt

SEQ ID NO: 268333 - DNA, 718 bp, Cannabis indica
attttagtttcggtaatttttttgtatttttttttaggaattcaaagcagtcctattttgattgattctaggtcagaaggcgaagttgtcgaaattaatggtggttctcattctggttggattttgtttcggttgtgttgggttgctgggtggttgactgaagattgtattagacgaaggttaatcacaggaagcatggatcatgggttgaaggtgtgagtaagaggtatttgtctaatttttttatttaggctgtatattttgtttatttggttggctagaagtttttctataataatattacatttttttgttaaaacttaaaaaatcccttaatatattctaattaaacatactcttgatgaaaataatagagaaaacgcactatagattttttttactttagccacagcaaaatttatgactaaaagtaaaaaaagtttaagtccgtcttgacaatacaagagttgactgatgggacttatagtattgaaaatgtctataagaagctcattgagaacgaagatacaaatgctcatttttcctccaacattatttggaaaaagtttaatgtttcgaaacattcttcttattctttggcttgctcacttacataagcaaaaatttgtgctcagatgtttccaattggtcgaatagcggataatctgttttggttgatttgtggtgataagagagaagatattgagcatctattttt

SEQ ID NO: 268334 - DNA, 1324 bp, Cannabis indica
atattcttttatttttaagtatattctgttaaaccaagaatgttaaacaagaaatgccgttagataggcacttttaatatataaagatatatatatatttatatatatgatgatcaccatttggatcaacttataacaaaattataattaagggctatttcattacaattaatttcttactatactagttgaaatacaaattttatagtacgggtagtaaaatgcgttcattaaatttaaaatactaaatatttcccttgaattataaaatttgtaaaatcacattttattaattttttttttgtaggataaaaatttccttaaactatagcaactatagaaaataagtctttttattacatttggtttattttgaaaactatttattgatatagtactgatgtgctgttaatatggtgtaattcaaaaatcttagtaaaaaatacaagcataattgtgttataaaaaaagattaagagttaatttttgtatgtttagtatcaataaattaaattttaaataatgtcagatagataaataaattatcgaaatgtaaatatatttgtgacatgtgactacatcaaaagaattgatagaaggtaatagaaattacacttaattacaattttttctagtcgaaagaatttttgcaatagaataaaaatttagaagaccaaaatttacaattgtaataatattggggaaaaattcttatttatcctacggaattgtcctatattctttttgaaaatataaattattaaatactatatttacaaaatatataaaatttaaaaattatgtcattgtaattatggacagttacaattttttttttaaatagccacaaaattattatcaaatacatattttcataatcacttaattgttatagttgtattacaatattatagcgcatatattgatgtgaacttaaaaaacaataacaaataataataataataataataaaggtgatttggataatatagaataagtgaataacctaatgctttaccttatgtgttaatacatatggtgagaataaaaggaacttttggcaattcaattggttaaggacgaaagtattgccacttttattaaggtaatagataatatagcacacacaaatagtgtgtgtgaacacaacagccagtgctcactctttcttttctttcgtcatgcatgcaaagaaaatgtttccttttccttacgagttagtgtaattataaagtaaaaagtaattagttttatggctaattatgattttttctttttcgaattattttttatttaagcatttatatattataatacataattt

SEQ ID NO: 268335 - DNA, 531 bp, Cannabis indica
tgtggtagagcccacaaactcactccattaccaaagtacttactttactttactttctattacaaattggtccctataaaaaccttcacacatgttgttttgattcaaaatgtaatgttttggttagaaagtatagcacacacaacacgaggtactactactatgcagctcatcatatttaatgttccttgtccaaccagaagaatcatatgatccaaatcatatttattttttatattgtttttatggtttggtgtcttgtcaagaaggatcgaatacatgcttcagaatttctctgacaatctctaaaatatcgtcttctttgcaacctgttacaaatctgactgcaacaaatattccttcaattagtatcagctgaaaatgtgatagttctcatacttgatgataatgaaagtcaatagttcaatagaagtgatgtaaataaatccaaacctgaaactaagaggaaaaatgagttcctatatccatttagtcaaaatacttcctcatttttaattagatatctatatc

SEQ ID NO: 268336 - DNA, 831 bp, Cannabis indica
ttatataataatattaattttaattttttcggggccttcgaaattgtgaggcctggggctaaggccccggctgccccaccctctggccggccatgatcaggatcatacctcagttgtaaggcagtgaacatgagcaacatagttgcaatcttcacaaaagtatacacgtattcgtggatctcttttcatttcacaaatatcacagtaaaagtctccataatcattgttgagaacaaaatcaaacaaaataagaggatgtatgtgatattcatattttagagtgctaggtaatggaccacatagcaaatgaactttaaaattacattcttgatcacaaccaaacacagctgaattggtatacttgaattcttcacattcagccaaaattggattcttacaataagaatcataatcataacattccaccagaccagtgtgaattttgtcgagaaaaaaaagaggatgatcatgatattcatattttactctttgcctggatgtgcaagtgacacaattcacacaatagtggaattcacactgaccacatttgtaagcgaaaacaagatcactcttgtagcataatgtccatacaaggaattcttgattcgcaatacgaagggataaagcgtgatgtttgtgaaaagaggcaccttcgagttgtagtggcaactttgcacatgattcatgcaaaaaatacttgcagggtttgcaaccataataagctttgccctcgaagcatggcaagcgacaagcaaagcattcacttagacttactccgcctttttctgttgcaggaataagtggcatgggatgtggatgactgaaatgttg

SEQ ID NO: 268337 - DNA, 1055 bp, Cannabis indica
gagcagagcactcatttcataagctcaagtagccgaactactctgtcactaccagtttatttagatatacgtaataataatttcacttaataactaataatattttttatttaatttttaattgtataacttttaaataaagtagaaaatacctaacataaaattaaaatgtactatatacatacttgcatgtccatagaaaagtaagaaaaaaaaataatgtaaacgcatgaagatatatatggacaaataatgactctacatatatatgtgtgtttatacgcatagaaaaaaaaaataactgacacactgtaaaccaatatcatatatgtatgcatgtgtatatacttgtattcaattgtctttgttagttgttccacgaatcaaatttccagaaaaaaatagcatatatattacagcatagatataaaatctcagaggtatatatatggcttgatctgaaagaataggaaagtggatttcttgtgctaccttcagcatatacgaatcaaagtaatttcttgaggttttaattggatctattttgagcaatacaagttgagtgattatttgtgtatctcatatttaaagaagtagcaaagaaaaaagatattgtggtaattcaaagtgaaattcgaattacaagatattttaaatccttcctattttaatattattctcagaaattaattttaaattgtgagatattatccaatttaaaggcaaattattattatttcctaaattttgagaaataattaattcaaataccaattaagtaatctttttatttgtaaaaaaaataataaaagatttcaaaattcaattctatcacaaaaagtagtaaaattctaaagtcaaacaaaatggcacaaaattctaaatgagctcactaaaataaattgaaatgataaaatattatttcaaaattccaaagaggtctttaaccacacaaaaatctcaaaaatggtaattttacctaaaaaattaaaactgcactaaaattcaagtccataaaaaataacatcccaaaagaggtcattcacctcttaatt

SEQ ID NO: 268338 - DNA, 568 bp, Cannabis indica
accaagctccaacgacccaagaagaaaagagcttgaagagttggagaattaaaaaagtgagattgacgacgagagggccaagtccctagttcgaaaggagttgtggtgcggtctgccttacctaatgttgcctcttccttgctttgttttctctcaatttatttccttcctatatatataattatacattcagtcatttatttttactttcattgttttctagttttgtaagagtgtgattatgttattagaagtcttagataacttttaatttggtattaatttcttttgtttctattttgctgtggttcttgttggtttctgctcttgtaagttggtactataatgttattgttagtgtataaaaatattggtatacaaaaacattatgaaatttaaaaatgcaggtggagaaattgtagagaaatttttaatttttcttatctacaactatgtgtcgttttataactgacacaaaaagtaaaaaaaaaaacaatttgcgttggttacaatttgaagctaagtttcttgcttcatttaagtactttttgcttcagttcttaactga

SEQ ID NO: 268339 - DNA, 1120 bp, Cannabis indica
atttattttattctttttagcaaaatgaggtggtcttaatttgtgtctttccttttacttaacactaataaaattaagcaaaagcattgggactgaacagcatctttcttcttttaagcaatttttgtcgaattggtggtaccttcccctagagaagctaagagcatgtttggtattgttttctgttttttgttttcaaaaaattgtttttagaaatgagaacaaaaaatagtttttgaagtttttaaaaacaagtcatgtttggttagtgttttttaaaaacaatattgactaaaagtgaattggtttttaaaacagaaaacaacattttgttgttttcaaaattcttgttttttgtaactttgttttctgaaaactgttttaaaaaaacaaggccaaacaagccaaattgttttcaaaaaacaattttctgtttttaaaaacaaaaaaacagttttttagttatgatgccaaacatgcactaactctttttggttcgaatgatttttaattggtaaacttctgtttatgttttctaactaaatattgtgttgggcctcattatcatcgacacactttaatttactataataatattatgagatatcatttaattgatttgcatatggtaatgtcactttccccatgctagatctcggcctttccatccccacataataaatataacattaaatagctggaagaattaaattttactaggcacacacaactagatccaccagttactcattcagtgggatcatcatcatcataaatatgcattttctacaaaacctgccaaattataaataaagattctcacaagatatctctctcagtctcatgtgcaagctcgtgctactatattttctttattcaatgagatttcaagtcttagctgggtgtaaacgtgtggggtctttaagattagtcaaactagtttaatgggcaatcctactacaaaattacattatttaagaacttaataaatgttaaaaaatttaatgccaagcctacttactgaagaagcagagtttagaacgacatgtcgttattgtatctgatgatcaaaccgtacatgtcttgattttggactgcagggatggattgcaacacagaa

SEQ ID NO: 268340 - DNA, 601 bp, Cannabis indica
taaattatggtaaaattcttaaaatttttacctcgctaattattaatctttaaaactcaaattttagcggtaaaattccttaatctttaaaactcaaatttttgtataattctattagcaatttgctatttccatctaattttagttgttagttgtcaaggtagattgtccacgtgtacacgacgtacacgtggcacaattttattagaatacctaatttaattatgtaaaaaaaaattgaaataactaatttaacaataaaaataaattattttataaataaaagtaaataaacatttttttctttctcctttttcttcttccttcttatccatgttttgttttcatctgcttcttcttcatagcaacactaccatcaccaccccctcacgaaatacatttctcactcaaatccattcacaaacaaaacaaaactaaaaaaaaaatcaaagcaactccccaaaatccacaaccaccacaactattacaaattatcaatcctaaactcataataacattcaatctcaatctcgtaacaatctgcaagatatcaaatatcaaaagggttaaaaaaacacgtgatggattaaaaagtcttttt

SEQ ID NO: 268341 - DNA, 952 bp, Cannabis indica
aatttaaaaaaaaaaatcaattagttatataattttacaaatttaaacttaaatacctaattaattgattttaaaatggtaaaaagtgaactattatttcttgcatcattaaattctataatatacactcacaacatttcattttctttctttggttttattataatattaatattttttattaaaaaaatatatataactaacaaactactaaaaaatttaaattttttttattaatgaatattgctgactgaaaattaaaaaataaaattaaatatctacataataaaataatattattaaaagattttgtttaaaataactaaccatctatttggtttgttttactaattatatatttttatataataattctttaatatatattcttttaaaaaaatataatataaattaaactaattagcattcatgtaagatctattaaaaaatattcatgtttatattaggtttatatagaaaattaaattaagagtaagttgagaaattagattaggttcacgtacagttgttttattaattagctcattgttttaaatcaattatgatctattctttcatgatttttctttggttagggtgtggttttctaaaatctagattttttctaaaaaaaaaaaaaaaacttattgtaaacaatttggttaacttattttggttgattttgttcgatgagtgatttctacatataatggattatgcccaatttagctattaataaaaatttatgtttatctttaaaaaaaatactaaaaaaactttaattgaaaaaaccctacaaaagtaagtattcaaactttaaggaaaattaagagtatgtaagtaatgaatatatatattatttcattaatatttattttattgagaagttaataggagtatgaatgagagtaaataagtgttgagaatagatgaacaataataataataataa

SEQ ID NO: 268342 - DNA, 1408 bp, Cannabis indica
caacacaaccattatattccaccgcaatcaccaacatacttggcaatgcagttgttcacatccaacagtttcaggtattcgatatttgattactaataaatgtaaaatgtctcatatttattttgggcagtactagcttactttaagcatttagcaagtacggattatattattttgattcagtttatatcccatgtgtatacagcaaaatcaaaggcacttattttatttagattatcttttaagagaatctaagagactcttttattaatatcaatcaaatccctccacaacccccactcaatcttacattgattcacttcttattcaacataacattataaaaatgcaactaagataaagcctagggaaatagaagggatatccacttggattgttttgttataatataatccttcaaatatgtcatatccactagctaaaaaggtaatggtatacactatatacctctaaacccaatactactcaacatcaaaaaccaaaaccacttctcattctctcaagctcaaactcccttgcatttagaaagaaagaaaaacataatgggcattccacaaattaactcttcccttagtctagagctgaaaattatagaagcaaaaagtgtagaatcaaaaccaagaggtgacctgtttgtaagatgttatcttcctgttggaagcaacaaaagaaaagttgggatcgacactaaagaaatccccaccaaaaaggaccacgtttggaatgaaactttctctttggagtgctctgggattgaggacaacaaagtggatatcaccaaattgataaagcaagagaagttggttttggagctgaggtggagaaacagagtgccaattcttgggagaagtggctttggtggttcaaaactgttgggcagtgctaagattgcatggaaagatgttagtgaatcaccaaacatggtgttagacaagtgggtgaccatggctcattcaagtggtgagcttaaaccagctaaacttaaggtgaagatcagtatgaaggttttgagtgaagagcatatatttaagaataagaacagctcagtctcagaggagtgtgggtgtaaggacagtcataatcataatcatgctttatacgcatgtgatgaatactatgatgttcttgctctaactgctgctttaggcgctctttaatttgccacaaaattctatattaaccttctttcttattaggtttacaaaattcattttctaatttgggttttggttggatcatggagctaacaattcttgttgtttggaatacaatatttgttattaatataagttcttatttattcaatatatactttagatttccatttatgatgctgatcttttattattattttttttggtagagttatttctctcacaaatctttg

SEQ ID NO: 268343 - DNA, 1598 bp, Cannabis indica
agagagagagagacgaaatgaggggggtcctcattttgattttttattatatacatatattatattatataattattattaattattacatatatatttatttttcttcttttaactcagtcaaattgaagttttacaatattttttttttctcttttagacatatttttacagactcacttttattttttacacttttttcaattacatttttacagagtcccttatataacataagaataacatgtaaacgataacttataaatacaaagaaacaatatgaaaataacatgcaaacattataatattaatgttttgaaaataacgtaagaaaacaacaatctgtatttttgtggggttcgcccttttcgagtttattcctcaagcttatcatttgacgatcaaacttttaattttttaatcacttacgagttggggttccctaacccctgcaaaaaattctatatttttaagaacttttatctcttttcatgaagacggataaaatatgagatggcttttacattcttaaggctcatccagagaataaaggtctaattcccttcaatttcaaaagaacatcaaagactgcaggatgcgatatttcttctctgctgacttttgagcttttaaccttccatacctttacaccgagtggcctaggtttgttaagtaaactccttcttttcttgccttttcttttcatttgtctctggtaggaaccttatcgtttgtatttcctatttagttcctttcttaggatgagtctcacttaactcttcaaggaccacaaggctgtgttccggactcttagcaaagatgagcgcaatgtgggtgaccaactcactacagctaactgccaaaagactagccttttgacatgataatcaaagataaagtatacttacaccttagataagtgttatgtcctttctaaggcattggcaaagtatgctagtatcgtatgtatggagtgtgtatcgaattagaccgatattgagattggataagatatcataaacttaccattatatctttttaagtcaatatcagtggttaatcttagatcaatagatcttaatccaaaaatggttaggttcgatctcaattgtattattttgttttattagaattattcgtgaaagctaaccaatggttcgggcaaatacttacatcatgagaacatgattgtataattgagtgggagcactaatcatagatatggtatctatagcttctataagtatttagaattgaaacaatgatttccttcgagcttggcttaatagagataaatgattgagatctcatttcagtaattatattagtttactgaaatattatttatacgtagcaaagtgttttaaggataaaatatattgaagggtagaacggtaaatatatccttattcggtgtcgatcatctatagaagatctttgaatatttggattagaaatgatagataattcatagcgtatctatatcttggtacatatagaacattatatataattaagagtacaattctgaatctatagtggcgtaaggaagaattaataagttagagatttactggtaaattctaattctacttatt

SEQ ID NO: 268344 - DNA, 1179 bp, Cannabis indica
aagtttcttagctcaagctaggttaagtgcatatttttagggttttaagttctgtggtttaactacttgtgtgattttataatttgaagtttaattagggatattggaagtaatttgggctggacttggttgttattttggggtttaatggtggattgaatttttgggtttaaaactaagaataattgcttgatgaatacatgtactctagagaaaattgtgaagtttggggttgaattgtggtgtgaggatcgatttttggtttctctgagagactgggtaaccgattttgccctcagaaaacccagtaaaccagttaaccggtttttcggtcggggtttttccaggaacctcaatttttcccaaattattgattttagggtatggtcatgtcttttattgatacagttattcctagttgatcttaaagtccctgagaagtgtttagcgtgtctctcaccaaaattacaatgatgtgatttaaggtcctgtgaaacgtcgagttacaattccactcaggctgatcggcacacctaagcacgggaatgaggtaagatagcataaagcatatatatgtgaatgaatgtatgttattatttgtttgcactactaacactagtaatgatgtagtttaagggtgttagtacagtgtaggattttagagtagttacggtgttaccaacacgggtacagaattggtactctagtgcatgtggtacaacactcggtaacttctaggagtaaaaattggccctaccaacacaagtacaactttggtactctagtgcatatggtacagtggtcggccctaccaacacgagtacagagtcggtgctttagtgcatatgatatagtggtcgtacttccattaagaacgttcttaaccatttggtgggctcgattattgagctcaggatggcttgagcataaagccgatgcagcattactgttatatatattatgcatatcttactgagtctgttgactcatcagtttgctaccatgtgtaggtaagggaaaggctaagctggaggagcagtgagtttgagcttggcaaggattgtacatatcgcagcagtgcaacctggagggcttcggttttataacattttgagttgacctatattttgtgtagaaaaaaaaagaaaattattatgtaactatatattgtaaaggtaa

SEQ ID NO: 268345 - DNA, 1019 bp, Cannabis indica
cgcatataaaataatacagtcatgtgtatgatatattgtttgaattctatttttgaccttgaatgtcgaaataaataaggatgtatcacttttctttttttagggggcgcgtcatagaattttcttataattcttaaacttatagttaaattccagtattattttgactaaatttgacacatattaaaagttgtattaaatttgtaacaaaatatagtataagtcaaatttacacgataccacaataaatattatattttttatttactcttttgataatcattaatataattaatattttttaaagttttatgtatacatttaatgagaaatgctaaaacgcactagtggtgtctaacaacttcctatgtatcaatatcgctattggtccaactaaatttcaggttcatataatttaatataataatttttagggaacgctagccaatcgcaaagcaacatgtctaaaggtgttagacactactagtgatgactatacaatttcgctgccatgtcgaaattcaatatcatatgtggaattaacaaatgatagagagagagaggggagggggagagaaagagttgatgatagtttgtaatatataagtaaaagtatatttgaaaacacgaaaagtgaatatttagattataactatctagatgttgaaaacacgaaaagtgaatatttatgcactcacggaagcaccctatgaattaactttatattatgagtattgttattgggcactagtagtgtctaacacctctaaagtgatactctataaaagttattacattaaagtatctgatacttaattgaaccaatagcgataataatatataaggagggtggtaggcattagcatttctcttttattatatagtattattttcgtttttctatgattcgattatgcattggagatcaaagatccaattcttggaaaaagatagtgtttctcttttttaatgaaaatatgataaacaacaatttatataattatatatagtactgtcct

SEQ ID NO: 268346 - DNA, 637 bp, Cannabis indica
tttttaggttgcgttattaatttattctctttaatttattgttgtattctctttggcgatacatttaattaaaataaaagttttttatatgtcaaaaaaataaaaagcttttttattggcgaagtgaggtttcgacttaggattttcctttttactgtccttatgaaaaaaaatatgaaactattagaatatacttaagatcaatgaatacttttgttacattttgttcaaaatgagtggttatttttgtaagatgatttcttttaggcactatggtgttgcctagtaccaccatgaggtggtgccaaataaatgagcattgttattaggcaccagtggtgcctagcaccttctcgacatgtcgcgttgcgattggctagcgatactccctaaaagctattatattaaattatatgagacccgatacttagttagaccaatagcgatattgacacataggagggtgttaggcaccactggtgccctttagcatttctccaaataaatatatggcagtttttttttataatcattattaaaataaaataattagaattcgatattaaataacattaatattatagctcataaggagctaggcaccataggtgccctttagcaactctctctctctctc

SEQ ID NO: 268347 - DNA, 701 bp, Cannabis indica
tagaaaagtgaccaactagctttacaatagtagcgggaaaaagagaaagaagttggatgccataggtaaggttaattaacttagctttattgctactaagaactatactcaaattatatcttatcgcttaattaacttattagattagaaaaaaataaaaaaaaaaaaaacttatggctttattacactcaaattatatcttctccactaagaactgctctaacaaatgatgcaaattggcatctatgatagtggtcgaaaatggagaaaattggagcatggggcaaagacaattgttttgtcttggaagagcattgctcaagaaaagtaccattctcgtactagatgaagcaacagcatctgtggattctgcaactgatggaataatacaaagaatcatcagtaaagaatttaaagatcgaacagtagtcacaatagctcacagaatccacacagtcgtagaaagtgatctcgttttggttctcagtgacggtaagttcaaatatatactgctactaactgcccataatcctatggcactaaatcagaacaacgtacatcattcacatatgcttcatatgtacacaaaattaatttaaaccatgctttttcttattaatagttaatacattattctctagttcattgtgataaattgaaactaatgtttgactatggaacaggaagagttgcagaatatg

SEQ ID NO: 268348 - DNA, 1774 bp, Cannabis indica
ttaaaaaaccaaataaaaaataaaaataatataattttttcatagcaagagaaaaaactacctaataatttttgctgcaaaatatctattggataagaatttgccaatcattaatacttttccaaaaatctaaaaaaataatagaacaatcaaagaattaaaaaaaaataataatataacaaaaaaattacaaaaaaataaaatagtatattgtcaagtaataaaaataaaatacaacataaaaaaattaagaatggaaaaaaaaattaaaaataaacaaaaattactataaagtttaacttatatttgaacattatatataagttttttataaggaagaatataatagtttttttttttttttcaaatagagaatacaaatggttttaatataataatagaatattaatatacaatgataagagttatataagaatataaataggtttttttaattaaagaatacaaataattttactataataattggacattaatattgcagcaaataagctttcaaaaaatcgtaaaaaagcaatcaaaaaaccttattaaactaaaaatcaacagccacttttctcagcccaaaaaatccaaacccgaaatcctatagaatccagaaaaataacatcaaactcagcaatgggggattcaaaaaccaaatacacattatatattaaaatttcaaaaaatccaaaaactcttaaaagaagatcataatttttcaaaaagaaaaagaaaataaaattactaccactgtagtggagggttcagtggtggtggtatccaataataaatagtttttctaacaagataaaacaaaaaatattaatataaataacttatatatgataatattgtaatatatattaccagtttacagaaacgaaagacaaacgagaccaacggagactggcgaagaccggtggacacaggtgggtggatcggggaaaatgaaaaatttgaaggagaagagcattattatgtaatcgcagaccacatatttgttacaattatattataggaaagaaatcaaaaaatagtaagactagagtgggaaatgcttatggaattatctcaactcaaagaggacaaataaagaaaacaagaatgaaagttgaacgagttaattctatagacgaaatatttattttatttcttatttatttttcaaaacaattagtgtatctatattttatactatatactaatataaaatagtgaagtttttttttttgagataagtaaaatagtgagttgaataagacaaaattttggttgtaaacatattattacttgaggataatataattcattttattattattattttagtcggttttaattttttttactaaatcaattttaagattttttaataaaaggaaaatataatatttgaacttaaagaaaacaaattaggaaagttgaggggcggttgggatttttttaaaactgttttagatatatatttatatttaatattttaaaatatattttaattagaacgttacagttaaaatatgcttataaataagccattcataagtagtactcgaaaactctttattttctgcaaaacttattcttagttcgaacacattaatttaataggttttcataatccttaacatcctagctagctcccacttacttgaatagcatcttagctagtttctcttcacttcaataacatcattttcagatcaactaccaacacagaagatagtaaaaacaaacaagcatacaaagtaaataatcaaatcttaaaact

SEQ ID NO: 268349 - DNA, 728 bp, Cannabis indica
gcttactccgctatggagacgactcgtttcgttattcctttaagaaggccttttgatatgtcggcttaatctgctatggaggtgactcgtttcgttatgcctttaagaaggtcttttgatatgtcggcttcattcactatggaggcgactcctttcgttatgcctttaagaaggtcttttgatatgtcggtttaatccgctatggaggcgactcgtctcgttatgcctttaagaaggtctttcttatcgtcttactttgggttaaatgtgatattggtgaataagtcaaatatataagattttgatctacttttttttttttaatttattctcatcttacttattttaaagtgattaacattttttttaataatatgacgtaaagttacaacttgtgtttgagcttcacagaaagtaactgccaatcaccaaatgaaagcctattcgaaattgttcttggagttcatccaacaatggctacgtctccgtcaagctctcctcgtctgatctttaatcatttttgcaaccaaaaaatagatgcttaaaactttctcgtagcggcctgaagtgtgtttggtcgtggagatttgctcagagaaaattaagaaattttagggtagtgataaagaagttcccacagacggcgccaaactgttttgaccaaaaatggtgataaaaaatggttcattattgataaaaaaacccgtcaacaatttttagtttttggg

SEQ ID NO: 268350 - DNA, 1169 bp, Cannabis indica
agataccgatccttatccaccctaccagaccaccaaaatttcctcattaatgcatccaactctcgacagcttgctaaaggaactttcgaagtggacattgcataaattggcatagccgaggtcactgatttgatcagtgttaaccggccagcatacgatattagtttcatcttccaaccttctagtttcttcagcatactttcctttagtttcaaatagtcatcttttttccgtctcttgaagacaaacggatttcctaggtgtctttcctcacctcggacttgctcaatattaaggaggccaaggatagtattcttcctttctctgcttaagttattagaaaaaagaacacctgattttggtttgctgcacgattgccccgaccacttttcatagagagagagacactccatcatcttttttgcttcagtggaattggcacgggagaacaatatggtgtcatcagcaaacataagatgagaaaccgggattgctgcttgagctattttgataccatggatagagccttgagcttcagccttgagaattaattttgaaaggacctcttgacagaggagaaacagaaaaggagagaggggatctccttgacgcaaacctctctgaggatacaatttcttgagaggacacccattgagaagcactgaataagagacacttgttacgcaccccattagaagcttacgagttttatcattgaaaccattcgccacaagaacctcttccagaaaattccattccatcttatcataagctttatgcatgtcaagttttagagccattaaacctcccaagcccctcttatgcctgatcttatggattatttcctgggtgagaatagatgattcggcaatccatcttccagggataaaggcagattggagaggggatattaagtcattcatgagaggtctgagtctatttgataaaatctttgcaatgactttatacgagaaattgcacaagctgatcggacggaattgatccacactgagaggaaactcaactttcggaattaaacaaataaatgtgttattgagtgagggattcatcacacctgactgaaaaaactctttgactgtgttgctcaagctagctccaactacatcccaatacttccgaaagaaacagcccgagaatccatctggccc

SEQ ID NO: 268351 - DNA, 562 bp, Cannabis indica
ccaaacggcacctaagttaaagattttgtcattcatataagcaagaaaacgagtattaattcttaatgtttaaaaaataaagccaactcgttttaacatataattaaagttattaaaatcaatcataatcattgaaaggacctattcaaaaccaatatgggcctagttggcatgcctagtgcttcggactatgttggtgcgtgtagtaatggactttgccgagtgtaatcggatatgcatacctcggatttcactacacattttttaattaagaaaataagtggaattttttaccacttaatttgtttttatcaaaatttttatttgatatagtttcgaccttttcatatcttacgtaatatataaaatgcttatctaacagtttttgttgtgcatttaacagaatataccaaaaatttaacagaatataccacaaaaaaattatctttaacagacacctattcaatttaaaccagaatagttgaaaaaaaaattttaaaaaaaaaaaacaaaaaatattacacatacacgatccatttcaaaaataattacaaaacaacat

SEQ ID NO: 268352 - DNA, 954 bp, Cannabis indica
acgatctgatctaaaaaatactaggtctaaaatattagataaatttaaattaaacaattaaatatatatgaaatacatccaatggatagaacagatctaatccaacatccaattaatgttgaatcgattggataatgaaaattaattggatcgaatcaaatggtaaaatctaacatctaatatatgattggatcgaatctgaataggcctaaaaatattagatgtgatccaataaacagctcatcttgcttacgcctctatataggtctatcatatcgacacgtgcattgacattatatacaagtggggttgaaattgagagtatttttgtcgttctaagcctgtgattgtgatttcttttggttgcgtccagatgatgataaatatatcatcatcagatgatgatccaacaaatacaatagatatgtcaaggggaatcgagttttaaattccaaagggtttccgtaaaaatccaattgtgccgaacttggaattttcgattgttataacatataggtgatcacggcgtatattttggacaagaggtgtcttggactttgtggtttggagataatctcaaactcacctattttaggagctttgttaaggggcaagcctagcacttttatgacatttcattttatcgttagttattgattttctataatctttattaaattaaaataagacacactcaatattaaatatcttttgtaaattaattattgtgtttggttatttaaaatatttaattagattactgttaattaaattattttatttagttgagcatagaaattttatatatttttataaataaaataaaataataactattacatttcttttaagttaaattatacatcaaataaaataattatatacacatacttagatttttttttcttttttaaaatacctaattcctaaatttctttctttgtattctttttt

SEQ ID NO: 268353 - DNA, 731 bp, Cannabis indica
cttaaagtcgtctttcctttttgacccagaggctcccaactcgaattctccatatgaatcacatcccgattgttttccttgctcgccaacttgatgcctcctgaacttgtcctccaactcatctatttgcaattggatcggatccccttgctttggaccaagttgtggcgaagatcaagtttattccggttcaagtgttctcgtaaatggctggtggatatcattccactcatagaccttatcctgctcatggaccttgtccttgagtgactcgcagccttatttgtgtctatgccttcttgatcattgttgcggcgagtattctctcctcctcgcattgatcgactgtgggttatcgtgtgcctcgaggcaacactcgccttctgacgccccgttcttctccccttggtgtggttcatctcgttccctccaccaggatttgtgcgagctccttccttttgagtttgggaagaacattggcgattccctaccaatgacccgcgtgctctaggttgtgtcccaagatttaccttatttttacgaggaatttcctgttccctggttcctgatcaatcatttggccgttttcttcaagggattccccagttccccaggttatatgttctgtgcattgtaggggttcccttgagctatctcctgccccctggtttgcgagtctcgaggtttgccttgcagtcttctctttcaagggtcaggttgattttgggtat

SEQ ID NO: 268354 - DNA, 1703 bp, Cannabis indica
attacacagtgtaattacattcaattctcatgggggccatgagaattggagagtgtaattggaaccccttaattacttccaattacacagttacagtgtaattacatggtcagacaaacatgccaaattgtgtaattacctccaattacacacaaatccaattacaattaaatgttaaagtcatatgtagttatgacttatcataaattatttatttacattaagaataactactatatgagtatgtatatattgaaattaacgtactttttagtattaataacaatgtacatattataagtttatagatataactataatttacttaccaaatacactgacatatagtttacttttataaaataaatcattcaaataatcataccactttaattatcaaagtctaaaaaaagaaaaaaaccttaaataaaactaatatttacatggcccgacacgtaagcatattgatatatattgggataattgtggcataacccccaatactttcactttacttacacttaattctcaaaacttaaattgtggcggtaaaacctccaaaattatgaaactgttagcaatttacaatttccatctattttatgtgttaagtgccaagttagactgttcaagtgtacatctacgtggacacagtgtacacatggcacaattttatttgttaatgtaaaaaattaaaaaaataaatttgaaattaaaaatattgtaactaaaaaaatatatgtagtttttgataattttagattaaaaaaataaattaaagagactatatgataatttttattgaaaaataaatagaatgaatttgggaaaataattatttttgacaaaaatttattttgaatgaacttgattattattttgaattgatattaaaaaatatttggggtcctaaaatgtgagttggtattttattttacattagaaatttaatttaataaaatggaaaagaaaaaatagtatagaatgaaaattagaaaaccttaatttaaaaatcctaactcatctctttctccctctctctacctactacagccagaccagagatgagcctttgtcggcgccggtggtccaaacggaccacacctcccttcatacaaccatcagaaaaccaaaaactttgatatctctctctccccttctcaccggtttcacccttgctgaaactctctttctctctcggtggagccaccctcgtccaacgaaggccaaaatgaaggccatggctgacctccatgagccacaaaaccccaagaactcatgttcctcgatccctctctcgctctcagaccctttctctcttgtagcgtcaagctcggcccaacgacgaagggtgtctcctaccatccatagaaaaagtggaagccacaaatgacttcactgtcacctggaggcattaaccccatgatctcgagtcgtgtgcccctggggttttttgggcttgaggacggtgatgtgtggtcctctcgtggcgtgggtgatcggagtgcggcggtcccgtcgttctagtgatcgccgcacaaacacagagagaagagagaaagggtgggtgtcgagtgaggaagaaagagaaaaggaattaggatttccaattaagatttttatcatttttaatttatacacttcaaactaaatttatttttaagtttaattgttttcagtttttataagtaaaaaaatatttt

SEQ ID NO: 268355 - DNA, 713 bp, Cannabis indica
atcaaaaataaagatacaataaaagattacacagaaaagagatgctttcattaatttacaaacgagtttaatagttgaggaggattctatatttctccatgtttcaaggacagacaagcaagttattacattgtatatgaaaatctcctaaagaaagaaattaataatttttattaaaaaaataatgtcctcgagaaggggtaatatcaccagtttagttaattttggacccatcaataagaaaaatgactcaacttgtctacaaagcaattgtgaaggttcaatttctgttcacctcgatggagtaaattgatgaatataagaggagtgatgtggatgaagcaagtttttggacaaaacctcaagaacatatcatgcaagtttggggttttacatatcatgttttacatattgtgtgggagtcacgtacaacatcaagggatgcaataaagcaaatatatccgaaaatgttttttgttttttcttaaacatgtacacctttatcatgtttactaattactacaaaaataaaaataaaatcacaatgtttgtttactaattaaagaatgagaaataaaaatggttttacatgtatagtgaagataaaaaccaaatttaaagaaactaatgactcctaaaatcaattctctttataaattaagtatctagtagtaaagggttttttttttaattgaacaactgagtagagttct

SEQ ID NO: 268356 - DNA, 1592 bp, Cannabis indica
ttagacatgagtaaggcgtatgatagagtggagtggtgttttttacgtgttattatgtgtaagtttgggtttccttgccgatgggtggttgattatggattgtgttactacagcggaatatgggtttttagtgaatggaaagcctaaaggttgtatggtgcctacaatggggttgaggcaaggttgtccactctcgccttatttatttctattttgtgctgaggcgttgtcaaccctgcttcgacaagctgaggtcggtggtgatttgatgggatttcggtgctctcagtctgggcctcgggtgtctcatcttttctttgctgatgatagtttgatatttggtagagccaatgggagggaggcggagtctatccgttggattcttcagtgttatgagtatgcctctggccaacaagtcaattttgataaatctgctatcacatttagtccgaatgttttacccgcggatcgtgcaagtgtattgggtatattaggcttggggtcagtcgccactcatgataagtacttgggtttcccaacagttattgggaggaataagaagcagacttttgcgagtatttgtgacaaagttcagaaacgggttctagggtggaagcggagtttcttctctgctggtggtcgagagattctaatcaaggctattctgcaagcggtgccaaactatctgatgagtatgttccagctgcctttggcgacttgtgataaacttcgttcaattatattacaattttggtggggtacaaagaatgataaaaggaaaattgtctgggtgaaatgggagaatgtatgccaacctaaatcaaagggggggtttaggcttcaaggatctcatgcttttcaatcaagctatggttgctaaaaaagtttggcgcttacttcaatcgccaaattctttggccggctgtgtcttgaaacacaaatattttcccaatacatcaattttggaagctaaagcttgccaaggttcgtctcatttgtggtcaattttgatgtgggggttggagttattgcaatcgtgggtgaggaaagaagtgggggaaggccaaagtgttaacgcgtttcgggatccgtagattgcccgggctagaacgtttcgtcctatctcgccttctcctagtgacagtgtgatggttaatgaattgattggtgtggaggggtcttgggatatccatactttgtcccagtattttttgaggttggatattgatgtcatccttggcatctcgttgcggagtgggctatgtgaggatcgttggtgttggcattatacttcaaatggttgctacactgtcaaaagtggttatgtagttgctcttgatatggtgagtgaaaggaatggatgctcttctgtggatcaagctcattggtggaatgggatgtggaatttgtgggtgggcacaaaaagtcaaatttttctttggagaatgtatcaccgggctcttccgactaattcccagcttattaagcttaagcttcctattcagccgctatgtcacaaatgtggtgaggatacggagactccggagcatgcattagttttttgctcttcattgcgtcctttgtggtctaag

SEQ ID NO: 268357 - DNA, 712 bp, Cannabis indica
ctgctattacaggttaaaaaaaaatgtaaccattgaatagtcacccatatatatatagatatataaatatataaaaatctatttacactccacaaacaaagtaataagtacaccttaatattcaaaaaataaaatttaaattaaaaattaatcttaatatatgaagatgtaaggaaagagaatgttagctttaaaatttcaaagagaaaaagggaataacaatggcaaatgatgatgatgatggaacatgaaacttaggtaacaattgttgaagatgatatatatggatggtgagcaccttaatcattctattaaatataacttttatttaaaacttttttataaataaaatttatattagtgcaaacttatatgttaaaaagagataaatgaaaaattatcaattagttttgatgtctacccatctcttacaaatatgttgtgttgttataccaaacttgactagtccatctcttgttttgagccttagttgactactagttattggtctaagtactacgcacgtgaaatacaaatttcataatacgggtagtgaaatgcgtttattaaatttgtaagaggaatgttcattacaacctcttattacaaccttttagtcaatctccacatctgaaattacatgtcgaaatatttttttttcaatttttttaataacggtatttgttatcgttacagtatcatccttgtaaat

SEQ ID NO: 268358 - DNA, 1237 bp, Cannabis indica
attttttgttttttaatgtagaaaacttaaataagtagatccactgttgatttttgtctttctatatttgatatataaaaaaattcaattacctatataaaaaattaattaaagtgtgttctatgattaagaaataacattaaatattatgttggcacactactaagttacaacaaacttttaatatataatagtagaatttatatatgaagtattggaaaattctacaatgcacacccttaaaatggatatattgatgcacccctatctgttttagcatccgaaataattttttagtcaaattttttctcatgatcatgtacattatagttatttaagacatcctgcaaaattttaagaaatttgaaaaagtttaacatgccgaaaattatgttcaaacagtgtgttgtacgcgtgactattttattttatacgcgtgtaaaatagactgtttgaacattgttttctatattgtaaattattccgaatttttcaaaattttgtaggatatcttaaatagttataacgtacatgaatatgaaaaaaaattagactaaaaaatttttctggatgccgaaacaagttaagggtgcaccagtacatcccttttaagggggtgcattgtagaatcacccttaattattttccattcaaaagataagtatatttatgtatttcactagaaaattatagcatcaaatgttgatcaaaacgtggtcttttatatttttcttacactttcgtgagtcatccagtttggattagttgttatttttaactattattattgaaattaataaataaatacctaaaatggttaagacagcatgaccacgaaagttgatgctgaggcatacaccaggagatttcccaactcaacccttgatcgttatctggagctttccatttctacccttggtccccacattttactgttcccctcggttattcagctaatctgtccaaaagtgtcattttgcttgcccccatgagggctcgatgtttccagaggtttctattattgttaatagtattattaataatttcatatttttcttgttcaaagatttttttttaattcatatttttcttgggtataggatcacagcttttcatatcgaccgttggcttaaagtagatgaagaattaaatagtttagagaattgagattgtaacggttatatattttcatttccttttgtggctgtgaaaccctatcatggtccctacaggctac

SEQ ID NO: 268359 - DNA, 694 bp, Cannabis indica
tttacaatatagaaaataatattcaaacaatctattccggccacatgcatagaaaataaatagtcacgcgtaacagactattcgaactttgtttttaatgtgttaattttttttaaaattttataaaatttcttaaatcactacaacatacatgatcataaaaaaatagacaaaaaaattcttccaataccgaaacaaatagagtacatcagtatattcttaaatttaaggtaggagtgttcatctaatccaatccgcactattttgctcatagtgcatgtgcggattttattttttggatctaatccaatctgcacaatagctcaaatccaatccaattcaatccgcaaaagtgtggattggatcgattattttagattggttactttttaatattaaattatttaatatttatgaaaaaaaatattttcttcacataaccagcaacaaaataaaataaattattattattttatgtcttcaacaacaaattaaaataaataaaataacaaataacaattcaaagaaagaaaaaaattgtatgtataaaaaatgtttaaatttgttttacattgtattaaaaaaaattaatataaagaatggaatatacatgtcatttattaagttttgaaatataattgtattatatgtattaaacttttaaattactatttttattatattaaaatattat

SEQ ID NO: 268360 - DNA, 1847 bp, Cannabis indica
ttattgatatcatcaatcaataacgccccgtctttgagtttgagcagaacaatattggttaagcacagtcctagctgaacggaccacatccatagcagagcaagtttttttattccatagaagctcattacgaacagaccaaatcttccaactaatacatgctgcttcctgaaccacggcagccgagtgatgctcaataagagcattgaaccatctgttgaagtctccattattcacaccagtcggagccttggaaacacaccagcagctccgtgcaaatcggcattccagcaagatgtggctgatagtttccacgtccagattacaaaaagggcaatacaaatcgacattaaccttttttgtactgagctgaacctttgtaggaaggaaaccgactaacacacgccacaagaagtgctgcactttcggaggaacttccaacttccatatagccttgaacattttttggtcttgatcagcaacatgcacaccagaaacttgctgtagccttcggtatgcacttttgaccgtgtataagccattgggttcatcattccaacaccacttatcagctgtagcagagccactcaattgaatagacaacacaagattcttatccctttcatcaaagagatcattgataacctcatagtcccagctcttagaatgcaccgaaaataaactagaaacattttgattcactaaacccggatgatcagattgaacaaaaggattagaagggtcgggaagccatggatccaacaaaatacttacattatccccattgccaatagactttctagaaccctccttgactagcccttgtgcttccataatactcttccaaataaagcttgggttttgtcccaaagtagcattaagaaagttacccgaaggataataccgagctttataaatcttgcttaccaaggagtcttcatttgttaatagccgccacccttgtttcccaagaaacgaaagattataatctcgaagatccctgaaacccatcccgccatcagtcttatgtctactcaaccgcttccaacttatccaattcacaccctttgaacccgaacgagattgagacttccaccagaactttgccatcataccttcaagattagaacaaatctccttagttaaaaggaaaatgctcatggcataacaaggcaatgcttgggcgacagacttcaatagaacctcctttcccgcttttgacaagaaacgactctcccaattaaaaattttctttttcatcttctcttgtaaaaaacccaggatagctttcctattgcgacccaaaatgcaaggtaagccgaggtaaaagctattatccccagcctccaacattcccatcagaccacacagcctagtacgagtatcatccgagcagttcttactgaaaaagaccgaggacttggagtaattcacttgttgacccgatgcttgttcataaacttggagaaggtgcatcacatgtgaagcttcaccctcattagctttgcaatacacatagctatcgtcagaaaatagcatgtgtgagactctaggcgcactccgagccactttacacccagtcaaccatctccgttgctcatacaaagttaagagagaagagagaccttcagcacaaaccaagaacaaatacggagatataggatccccttgacggattccacaaccaggaacgatcggacccaacttccttcctccataagtaacatggtaagacaccgtagacacacagaacataatcagagccacaaatctaggactaaagcccatccgaataagcacggcttcaagaaacgccaaccaactcgatcgtaggccttgctcatatc

SEQ ID NO: 268361 - DNA, 1568 bp, Cannabis indica
taaataagtttttttacaatgattattttttgtttttgaattgcttttaagttttgggtaattaggccatctactaataataaaatttaaatttatattaaatcaaatactaagaagcttatatttcagtactaaattatttatgtgattctaatactacaatattaaaaattaatttaaaaaatatatattttttattattatattatttattaataaaataagtagtaatttaatgcttttaattatttggtttttttttttcttaaaagtcattatataattattaaaagttaacaattaaaaaaatattccattatttatctttcctattgttattattattattatcatcagtgggacactgttttttgtagtgtaaaatgagaaaattcacattatataaaatattatagtgttggattagaagataatcttagaatatttgtttctgaaattttgatatgtattaaattataattttaatttattttaggtaattaaattcttgaacggtttagattgtaaaatttaaaaaatttttataattaacgtagtaattatttatgtattaaattatatttttaaaatagtaattattttttagagttcaaatctctcatatttatagatactactaataatgttgctcatactttagcaaaggatactttttcggtggacacagaatgtttatgaatagaggaatttctatctcttctaatgactattgtattataattcatttaatataatagcattttatctaaaaaaaaaattgcattaataggcacaaagctgttacgaatgttttaaaataccaaagagtcttaaaaattaaacaactaaatattttaaaatatttaaaatatattttaatataagtcaaaattcatgcaaaaatcttagttataaatattaaaagaaaaatacatatagtggatttaggttttggattttatttttgggatttaaatattttaataaatgtttattttttttgggattggataaatatatataataataataataataaaatgaatagataattaaataagggatatgtgttataaatatatccactcatgaagcctggtttgtgtacttttcaaaacatgcttttgaaaagtataaaattatgtgtaaagcattcaatgggtgtgttgtgttttgtgttgtggtccttactaccttagttgagaaatccaaagagttttcataaaaccaattcttttttttttattattaatatatatatttattcttttctaaagaggacaagaaatcatttttattagtttttgccattttatgagttaaacattcaatttgaggaagagaagtgttaattacaacttttacaattaaaaatatatttttgatattttaggttaatatttgtgtttaaaaaaatttaaatctgtttataatactataaattactaaaaaaattcaatatgttatagaaaagatattataattataatgaaaatgctgtggatcaaacagagataattgctatggatcaatcaggtatacatacctaattattatatcttattatt

SEQ ID NO: 268362 - DNA, 772 bp, Cannabis indica
gtactccccagatacatgatttatgaactgttcactgcagatttcaatgtgcttggcatgcaattcctgagcaagttttaggccgacaatgagagcttcatatttagcttcattgttggatgctttaaacccaaattcgactgctctgtgtagacgttgcctccacgtgtgacaagggcaatccctgaaccagacagttgatatatggctgacccatctacatgtaatttttaggttggttcaccgttactgttgctcagctgaggttcttatattggctctgggttgttttttgaagtgctctcttccttacccgtacactcaactacaaaatctggtaaggcctgccccttaatcgttgttcggggctaaaacatgatttcatactggccgaactccatcgcccatttgagaaaccgtccaaaggcgtcaggtttttgcaatacttggcgtaatggttggtcagtgtacacccaaataggatgagcctgaaaataaggccttagctttcttgttgctaagattaggcaataagtgagcttctctatcaatgcctcagcttcaatgattcttttgttgatgtagtagaccggatgttggatattgttctcttctctgatcagtacgacacttacaacatgttctgtgagagctaggtatactcctaattcttctccatctagaggtttcgagagtatagggggtttcgcgagttgcatttttagctcatgaaaggcattctcccatttcttcgtccattcaaattgtttgt

SEQ ID NO: 268363 - DNA, 696 bp, Cannabis indica
taattatattacctaaaaacagttacttccaaacacatcctaaagaaacaaataaaaaagaccaattcatcgaaattgacaagtttggattaaatggattatattgaatatgattcattctaattttttttatcattaatttttatatttttggaaaataaaccccactagtataaagtttgtcacatatacgaagtttttttgccgttcggcatagccaaatggcaatgcaagtggcaatggataaaacaacttttggcgccggaaagtaggcggctgaaatggatgtctgttgtgggacccattagtactactcaatctattcttcttattaatgataataattataattattaggtattttattcagaattataataattattatttattttatttttgatattggaggaggggatttgaatttggatgaagagacgtgtaaacactaataattattgttagatatttttatggtgcagtaaaaaatatttgttcaaaattgaaatattgagatagttttagttttaatttttatataataatatatgtcatttgtatatttttagtaaatttagaataatttataatataaaaatatatttaaataatttattattattaaggattttattatttttatattttaaagtaagtttttttaaacaaaaattacacgaataatcacgtatcaat

SEQ ID NO: 268364 - DNA, 1150 bp, Cannabis indica
ttttttttttttttttaacaaatctacgtatatagctttgaattttcgtgttcactttcatttatcaataatgaaaatatattgcataaatattcgttttaggggcttttggtaggagatgtttaaaatattatgattgtaaagtaatgtgtaaattgtatttaattggttgtataaatatgtaattatattcttatttggttgagtataaaattcttatatattattataaaaaataaaaataaaaataatttttttattatatctatttaatattaattatatataaaaattatagaataattattcattaaagaaatattattaattagtaaatattaaattttgttgtattttttattaattaaaataaatatttttatatattttatcactatgttatttatgtacaccatccacataaaatttatgtataataaatacgtatatatgttattgttaactcgattaaaaaaaatcgatctcacaaacaaaatatatatcataatattttctttttaataaatgataatactattggtatttaaatttatttactaattcaaaaataatattcaaattaatataatgaaaggtaataattcaattccactctttttttaagatattaatattaccatcctcaaagatagttatattactaaaggaataacatttcaagactaaaccctcaaacaaaataaaaaaaaaataatgttttatatttctattcccttgctagtattaacctattccaaacacccaattattatttaataatgcttgttatttatatatatatatgtattattttttatatgaaattagtttcaaaagtttaaaaaaatcaataaaaattaaaagattgtagtacatatcaaaatgtcaaatttataatagaaaaaggtaaacttgatgttaaaaattgtttacagaattggggaggaattggtacttttattttgaaaaattattataataaggaaagttttatttacacgaaataaaattataaatacatcaataatttttattttatataaaatatatatttaatttatattaattttttaaaaaattttcttttttatattcataaaaatatacttataaaataaaaataaaatatttttaaatattaagacaaaaa

SEQ ID NO: 268365 - DNA, 1386 bp, Cannabis indica
aagctttttgcgtgtgttgaaaaaatctaaaaccctatgtgaatcagaaaagctttctctcactctctataattcgaactcactgtctctctaatctctctctatagttgattggtaaagacaaatgagattattattagtttttttgtctcttctcatattttcttcccactatcttttctcctcactttttctttaaaattatctttagtcattgcattttgagagagatgactaataatgctgccggctcgatggttgggcagcagaggtccacgcccaagatagctcattcaggtccaaaaatatctttaacaaaagactttaaatttatttttaagaatatcatatttcatggtttctgattatttttaaattataactattttcaaaaaaaaaaaatctaatttatgttttaagatattatatttaatattttattaagaaaaaattctaattttattttttaaataatatattaaaaatttttaacaatataaaaaaaacaaaaatattcatataaaaaactccaattagatttttttatttgtttccaattggcttgagtgggttgggtattaattttttatagaccacacattattagaaaggagttttttcatctatatgggaaaatgtaggaaaatttacttttataaagcataaataataatgcagaaaaatatgagattaaaaaataattaaaatttaaaatatagaaaaaaaataataaatgaagataataaaacttgtaataataaatttcggtgaaaaagtcaacagaaaagtcgtgagtgccagaaaaatcaccagaaaagttgccaaaaagttaccggaaaaatagtcatcgccgtcgaaaattttgccaaaaaagttgccgaaaaagtcaccgttagaaaagtcaccagaagtatatgtctcagatataactaaaaatagaatggttctataacataatgaataaaaataaataactcaaaccggttataataaaatataactagttttgtaacataatgaataaaaataaataacacaaaataactcaaaccagttataattaaaatagaaccggttcaataataatgctataatgaataaaacaaataacatgaaataactcaaaccggttataactaaaatagatccagttatataatataatgaatacaaacaagtaacacgcaataactcaaaccattacaattaaaaaacgtagagaaaatcagttcctaaaacactgaaacataaattacaaacaaattaaaactagtttcacaacaaaatacatcataacacataatatctcataaaatcgattataatttttttaaaaaaattatggggatcaatttcaaaaaatattgaggcataaatatgaaaaga

SEQ ID NO: 268366 - DNA, 707 bp, Cannabis indica
tacaattttctacattagtgaaataaatgacaatcattttaggtttttgagtactttgcatccgttcgaacccctgctggggagatttttatgaagcctgctgacttgatgcgagcagtggtgcccgtctttcctccctcggaatcagatcgggttagagaaggatttctaagaggggaaagggtatcaggggagctacattgtgctccttcaaattttttcatgctttttgacaccaacaatgatggacttatctcttttgcagagtaagtttatgagaaagataggttctttgaaaacaataacaaaatgctgcaaacaataatgagaaacatttcttttacaatcaattttcaggtacatccttttcgttacattgctaaaaatcccagattccagcttctcagtagcgttcaagatgtttgaccttgaataacgggttggtggtcactctggtttccaagccttgaatattaagcaagatagattttttgtgcataaagttctatatagataagataaatgaatgtttttgcctcattgttttaaatcaacagagaaatagatagagaggaatttagcaaattaatggctttgatgcgagctcaaaccagagaaggggctcagtgcaaggatggacgtcgtctttggccaaaagcagtttcaactgaaaatggaggcctccttgagtatttctttggcaagga

SEQ ID NO: 268367 - DNA, 650 bp, Cannabis indica
atcaagtcaacctcacaatagttgaaagatgacttgggggaaaatgcttacatcaaacctagccctagtaacggtgatatcaatgttttacatgtggcaataaagaaaacatcatgggtcggggttgagtagtctcgagtcatagcagtcgacttgggggggggtcccctatccctgcacccaagttgactttgggaactctagaatgggtatttcaatcctccaagttgtccaagttgtttccaactaaccatcttccagtattttaaacaaagaagacaagaaaaatccaagtccaaggccttgaagctgaaaatatacgaaacaacaccccaagaagtgaactaggcgcctacgattttcacccaacacctaggttgacaatccaactagggttttggtttttaggcccatcttagtgtgaatgagcaaaaatttttactaggacatgaactatacatatcactaacatatttgaggaaacagaattagaatcagagcacttttagttttgagcactcgaagcactaggagctctaggcacctagcacccaggttgacatattgtcaacctaaagcgcttccaaccaccatactaaagaaatatcctaagcatttccttcgtcttcatccaaaatgaggaaacaagt

SEQ ID NO: 268368 - DNA, 746 bp, Cannabis indica
attaaatctacttaatttgaattaattttttgtttactttatattaatttacaaaaaacaaacacatacaaacaaataaaaaaatcattttatttagttgattgatccaaataaaaatatgatttcaaaatctgtgtaaatatttaaactaataatctttacaattaaacaaaaacaaaaaaaaaaacaaaaaaaaaaataagaaaaataaataaacaaaaaataaaataaaataaaaataaaaatttcaaaaacaaaaactaaaaataaattgaaaaattatgattattggatatggtttattataacgtcttgaacaccacaaattacaaaatttatgtcacgtgattaaaaagtattacaatataattaaggcaaactatattttagctataagataaaaatatttagaataaataagatattttacccaacttttgtagtcgccactatattcaaaattattatcattataatatcttacttgtagtcaccactacattcatgtcattatcatcaccgaatcttacttcgtcattacattaaaacactttgtcatcagcgtgagaatattataataaataaaatattttaccgaactattgattattgtgattcaccgtgtgctaaataaaaacaatatataaaactcataatcatttatttaaacatatatatgattaatttaaataaatatcaaatacagtagaacatttgtctaagaatactctattcaagaataatct

SEQ ID NO: 268369 - DNA, 1075 bp, Cannabis indica
cactctagtatataccctacctaataattacacacttacttccaaacgcacccttaataaagcagaaaaattatgtgttgcgactttacttggccaagaatctatgacaccaaaggccctatcacatgaagctaattttcatttggcccatgctcattaattgaggtattttgaagataattctactttgttatcaacaattttgattttgaaatataattatctttgtggtcaatagagatcacatgcaattaatatgatatatattagattaaaagtgttcttatgatttattatttatatatataaatataataaaaaaaataacaataggaatacttcatttacccttataagataatgatattatattaactattgattaggttgacgtttttttttttttttttttttgttaaggaactaagagttcattagtaaagatagttgggaatcacaactggagatccctcccgatagtacatagcattaccaggaccgttaattctggccattttagccaccttatttgtggcaagattgtcttctcttttaataaacttaaaattacaaacattgaaatgacaagaaagcaaacggattaggttgacttttaaaagtttacattgtatattatggaatagaatgcacactattttaactaaaaaaagttctttaattttgttagaacttttctaaaagaattagaagaaatattgattggtcaatctttagattttgtacaattttcataaaataataataataattataatattaaattgtttaggatcaaaattttgttgcatttatacaataaaaatggtcatttacaaaaatctatgactctgttgtaatgtcgattaaattttctattactatgttgctataaaaattttctattattattatgttgattagattttgtaataaaaaaaaaaaaaatacattactgttatttatttatatactaaataagtatacattattatagaataacatttatagactgtatttatttatttatttatttatagtcttacgaattcacatatattgttctcttgttattttg

SEQ ID NO: 268370 - DNA, 969 bp, Cannabis indica
gacttgatttttttataacaaattagaggttattcttgaatagagtattcttaaatagaggttctactgtatatatttttggagaggaatactattatgaactataatatgcatgcactagcaatgaaaaaagaaacaaataaaaaatgtgatactagccaacaataaatattgcaattatggctgcaatatgtttataagctagccaataacgttgactgatcgagtaatagtacgtagcaccacattcattcaaatgccctctacccaaggcaaacttaattataacaaaaatgttaacatgcataccgatggaaaatatttagtatatatgtttcccttatacatcttatgttcttttttctaattaacatatgtccacacatatatattattgataatgaaatatttaacttttaattgcaaaaatttcaatagtgctataacatgtgtatatatatttacagttaacatattaatggttcttaattaatttatttatagtgctcaactcaaacacgtacaattcatcatcaaaaatactatttataaagagagacacaacaagaattataagcatcaccaatagtgctattattgagggcaaaatatctttactacaagtatatcactaacgacatttaagtatcatgaaacgataaaaaaaatattcttcacttacgaaatttatcctcattactaaaatatataactcttataatggggagtatatattgatactctccatgattgagagaatagggatgatacgaaaacaagagtaaaaccactataatttataagggaccaaacaccatttattttgaaagatgaatgccaacatttatatttcaaatatataatttctctcgctaattgggattaatttgaactcataaggttatctacggatgatattattatatatgtttaaactataaacattaaatttctttaattaaataatta

SEQ ID NO: 268371 - DNA, 553 bp, Cannabis indica
accgaattctaaatttttatatataaaaaaaaaaaccgaccaaaccgatcgatgctcagtcctagatgaaacaaaagatctcaggaaacaccttgatgagtttaacaggataatcttgggtctcgataacataggagtcaagatcgaagatgaggatcaaggaatcctactgctgagttcattgccaaaaagttatgagcactttgtagataatattctatatgggaaagaatcactgaccatgacagaagttaagtcagcattaaactcaaaagagattcagaaaagaagtgaaagaataatcaaatagctacggtgaagggctgttgttagaggtagatcagaaacaagagaaaataaaggtggttatctctagccgagaatttggagactcatggatacttgactcaggatgttcatttcacatgacaccaagaagagaactgtttgataatttcaagaagcttggtggtggagcagtcctattaggagacaataaagcatgtagagttgttggaattgcaactgtaagaatcaagctccatgatgatca

SEQ ID NO: 268372 - DNA, 674 bp, Cannabis indica
gtgagtgtgtgcttacttggttgcatgtgaattagatagggactggccacaccacactacaagatgatatgtataggaatataaattaagaccaccaaattaaggtgcgacccaaggttaaattcctagaatcaatcctatcatattattaaaggccaataattagtgttttattctatattccacgacttaattaataagctcgagctgtagttggagtgggaattaataaattcttttcgttatgagaaaattgagtttctacgaggactggattctaaaaaagaaaaaaaaatgcatttcttctcttcattattcccctattgttaatggagaaattattggcaacatctaacctactttaatcaaaaatagcaatttttttatcaaataaatcagttaatattttttaatgagattttcctctttgagtttttagtacttcctccattctagtcgtgttttcttagcttttacgtgaacttcttgctttatttataatgtacatttgcatgtatgattgcgttatcattctttaatgttgtaagtgacatgtgtacttataagttgttaattctttaataattaattttatgttatgattatctttcttaagattaattttgtattatttgtacctgggttttttatagggtattttttaattatatacc

SEQ ID NO: 268373 - DNA, 1298 bp, Cannabis indica
atatatatatatattaaatatagcaacataaaatttaactactcatccaaactaaaaaaaaatactaattaattcgattgaataacatcaaatgtagtgaattttcgaacacctcatccaatccgattataattgaatagtcaatatttagtagttagttatagttggattgtagcaatttatacacacctctaaaatacatttcctcatttcattgttggtacaatttgatgttaagtaaatttaataactatatattaaaaaaaccatctactaataactcataagatgttattttataatggtgttggaaactactaataaataggatttaccattgaactacgattattgtagagttttttcctatatgattttttttattggaaaattcccctaaattataaaaactttgtcaaatgtcctcctacagttgcattttagtctatttatttaaataatttgttaatataacactaatataacgttaatctaacttaattcaagagttgagataaaaaaataaatacataattaacagtctaatgataaattatgaaagtatgtattgcattcttaaagttattgtttatatgtttaatgccaatagactggaattttaggtagcttaaagttattaaataagccattgcaattacaattatacctgtaactagagatgcattattttttctatgggaatgggcctccgcggggacataaatggggaaagagcagggacgaggaggacaccccttgccccgacagagacctgcttaatatttttatatatttttaattaatattttataatatgcgttttatattttttttagtatattagtgtcatttttataatattttaagttgtattttgtataataattaatatattaaataataaataatgtgtaatatattaaattttatgtaatacaatatttttatatatgtaaatttttaaaataaaatttatttttacattagagaatttcccgttccgttcccgatggggaataagcgagcaatggggtgtgaatggagaataaaatacttaacttataaccacttaagcaaattgtcataaaaaatgagaaagaataaaattatagagggggatatatttgtaacaatttgcataattcgaagagaattttcgcaagtgataaaaactcaagggagtaaaaatacaacaaattagtcatagttcaagggacgaaaaacttactattattttaatttttaattatatatatataaattaaggtacatatatatatatagatatatatagagat

SEQ ID NO: 268374 - DNA, 657 bp, Cannabis indica
gcgaggttgatttctattgtttttttacttttactaaaaaaaatatattttataatttgaaaatttttataagaataatgacaaaaaaaaaattaaaaattttccttttttatttgtggaccggactattgttatgaaagtatttgagaaatagcatagcagtgagtaggtacatgcgagtacgcaagcatcgacgaaagtacgtctcaaaaagaaaaataaacaagtacaagtgacatgattgggccacaacgacaataaatcaataaacgacatcaaccttagaaaacgccaaaatatattattcaacgagatgtcgtcattgtttgccaagaaaaaactatctatttttgtatgtcttcatagtcatcctaaccaaccaccacgtaatacttgctttggtttgacaagtcaaattgaaatttctttttcatcttaatattttaaaatttgaccataatttttaagggtgtatttgatcggtttgattgcgttataacatattttccattaactcaatataaatatcaagttactaatacttaattgtaatccgtctaattaaaaattagaaaaagtttaacccgtctaatggttttgtcagtttggtcggattaacctgtccaaaccgttatccaattttttttataattatta

SEQ ID NO: 268375 - DNA, 673 bp, Cannabis indica
gtcttgttaaatatttaattaattattttgagaaaatagttaattataattaattaattctaaaaaaggaatgtttacctattagtaacctgctattacaggtcaaagaaaaatgtaaccatatggttacaataaaaatataaccattgaatagtcacccttaacttaattaactaactatataattttaatattgaattagattgtctaaaagttgtccaatcaatccaaaaaaagaagaaagtgtacggaaattgatggaatgttaaagcatattcgaaggttgttgttatatgataattttgttagattgtctaagagtctcacgttgttaatgtgtggaaaaataataaaatatataaaaagaatgagttactcctcccatttccaattaattttgagatgaaaatccattcattttattcttaaattctaacctgatatcagggcaaaaacaaataaaaaaaaaatactctagcgactatctaaaggaatgggcaacttgatttgccaaatcctttataattgagtttgtcatatccttgatatatataaatatatatatatttatatatatatatatatgaattggggttaatctttattgtgtaggccaagttttacaacttaatttgccaaatttattatacttttttgtcattttaaaaattta

SEQ ID NO: 268376 - DNA, 829 bp, Cannabis indica
tagtcaaaaaccgcaccacccgcatcgcgaacacccctaccacgatgatatgcttactctcactgaacatgtgatatatacacaatcatcaaaaacttatatctcaaaactaaataagaaatacttaatgaaaattgtataattattggcgagaagcttacttgagtttatacatagatttccctaatttgcaaaaccatattctttggatctttggatacaaagttttcttggttgcaccatataatttttttcatcaataataccattgttaaatgacacttcaataatttatttgatataactcaaaatcataatgagcagcctgtgtcatgcttgtcctaaaatagtatttcaattaagctaaacgaaagtctatttaaaatgaatatccgctttatgagtaattctttacatacaagacatactttatatttctccacattacaatttgcatcctcttggtcataaatatttgttatatttaattaattttacaccttatagcaataggaaaaataaaaaactttattgtctcacattaatttgtatttcttatttatgatatcaaatttagttttgagagttggaaccttaatggcatgataaaagttgatttgatcatctttcatcattctattatttcattatgtcctttttctcatggatttctttaatggcattggtctttgaggttgttgagtttaattatgtgaaacatttaccatatcttgaatggaaagttgtttaatattgtcttatcaaggttctagattcacttcttggtcaatgaaagacttagaaacctaaacattgtcaaaagtgatag

SEQ ID NO: 268377 - DNA, 1548 bp, Cannabis indica
ggcatcgggccccatcggactcgacctaaaaaatccattttcgaaagaaaactcataccaatttcaaccttattaactaacagatcgcatcttaaatctaaccttaactaacagattttaaagaaaattgcaacatattaatctatttcatcaatttaagcaccaaaaattgaaagaaaaaaaaaaaaaagaagagatgcgagacagagagagaaagagagaaagagaggggacggtagggggcagtcgactgtgggtgacgtggggcgggcggctgcgtggacggtgggggcggtcgtgtgtgggcggtctgcgtggacgagtgtgggcggtctgcgttgacggctatgggcggtctgcatgcggcaaagagatgcgagacagaaagagaaagagagaaagagaggggaaagagagaggtcagatttgaatgaggggggtaatgtgggaatatagtaaatgttgtcccatcttaccaatataatgtattataggtttaaggaaaaaatttctccctaatgtaaggataaaaaatcaaatttccctaatgatattcgcacacataaactatatatacatgtgatacacattcatatggcaagtcactttaactaattatttttattttatatagatatctcaattagagttggataaggtttgtttggcacaactttttagaaaagttattttttttaaaaaaaaaaaaagatgtaataaaaaaatgtttggtaaacatttcaaaaaaagcttattgaagaatttatagagaagctacagctaaaaaataaagttggtacaacccaactttaaaaaaaaaaattattttgattaaaagactcataataaactagtaaacaacccgcgtttcgtgacggatgtttaaaaattttaaattatatatttaaaataaatcataaattttatttaataatgacagctaaataatgaattgtatcaaattttaatctaatttttcatataattttgtatgaaaaattaggtgtgtacaaacagaccgatccaactcgtatttaccgaatttcgttattataatggaagtcagacacaacttgtataacataatgttaggtttgacccctcgaattgttataaaaattaataaatttatagaaaacttatcatattattttaaaaccgttctcattaccgtatctcacttgtagtcaacattacattcaagggtgttgttattgtcatatctcatctgtataacatgatgctaggcttaaccccaatatattttgttgcatatataaaataaatcaaataatgagttaacagctcacttttataaataagtgaatctgcatagttttcttttatgaaaataatatgtcaaacaaaatttattaattaataataagaaaattgatagaattgtatcttttaataataataataacaacgtgtgatagtatatataatcagatttattagttaattaataaagatcagaaataatatttttatgttgcatggttcacgtgatttatttcatgattgtatatatataatgtatgaatt

SEQ ID NO: 268378 - DNA, 837 bp, Cannabis indica
tgtacacaaaagatgagatgaatgttctacaatatcagtgggtagattacgtaaaagcgcaggttgtatgtcaagaaaaatgatgagtatatatctaaaaacatgtatgtaattttcattaagtaattagtttcatataacttatgatttgtatacttttataattaagtaagttaaatacatttctatggttattaagttagtttcttaatattatgaatatttttgtagtaattcttaatcacattgctcgattaattattgaagatgactatataaaattgtaaaaatctgaaaaactaatcttggagaaaaaatagtagaaaatttgctttttctccctattttgcgacgtaatgtcaaaagaaaatcaacgctataaaacactataggcattggttttgaacagtcagttatactatagatgactgtgcaaaactgacgcttatattgtaggcatcggtttcacactgacggaaaaagtgcccactataggcgtcagttttaaagggttagtaatagagctaaggttatagtcaaacatgctaatagaaaactgaaataactatttatagtaggcataaagagactaaatgaaatatgttctttttatacatatgtttttaaaccacttccctaaatttctatttataaaagatactaaaataaataaaaataacaattgaaaatttttgatttatcaattattataattatagaaggcgatcctaacaaaaatagagtaacataggtaagaaatcaattcatcatttgtgacatctatccatttcaaaatttcgaatcaaccgattcattgagcaactcttgagttgagta

SEQ ID NO: 268379 - DNA, 994 bp, Cannabis indica
attctcacacaaattgtataacaaataaaatttaaaatatatgtatatttttaccgggtattacagtaagctagcacccagagttaagtgcagtggcactcatgtatattattatgcatatgttatgtgagaaatcgagattaggattattaccctaaactaagcggttatgttgtctagggttactgctctagtatttaagtgattttgaatgtaatactatactgtacatgtttagataaagaattatgcgcgtaagacataattaggttaaactcagtaattagaaccgagataaatcgttctaagcccttattgtaaatagatgtgtgagcgtaacacataggtctatgttaaatatacgatagatgtagtggcatcattaattatgtgatttctgatttattatgcatattgttatttatactgtcttgctgggctttggctcacgggttttctactgtgcaggaaagggtaaatctgttattaattagccatgagtttgagggcttggcggtgtattgtacatgagcaggccatactagaccacgcgagtaaggtctaccagatgaaatattttgtaatctcaacttttgttgcttaggtcggcgtataatgataacttgtaatattttgaaaagtttttacgagattccgaaacaaaatgtgatcttttgaatgtttgtaaagttaaatagttacaagttataattttactttgtatttgctttaaagtttaaattttcgctcttagctttagtaatcctggtttagcggggtcaacatgtggtagtcactgtttgtggcattcctattattagggcgttacagattagccctccatgtgttggttcataattttggtcaaaatactattttactttttctaattacttctttacctttagtttccatttaattcactagtagaagtataattcaagatcccatctgaatttgtgtacaacattccagttctagattaacacttaaa

SEQ ID NO: 268380 - DNA, 817 bp, Cannabis indica
gcctgacatatgctacgatgtaaggattgttagtcgttatcaatctaatccaagtttggaataatggattgttgtaaagcacattctcaagtatcttcagaaaataagagatctcgtgcttgtatatttcagtggagagttaaattttactagatacactgattcttattttcaatcagacaaagatagttgaaaattgacatctggtcagtaattactcttggtggatgagctatagtctggagaagcattaaacaaactagtattgcaaattcaaccatggaagtcgaatatatagcagcttttgaaacagctaaggaagcggtttagttaaagaaattatacacagcattggaagtagttccagatgtagaaaaactactagtgctctacagtgacaataatggagcgggagccaactccaaggaactaaggagccacaagagaggcaagcacattgagaggaagtaccatctactaaagaatatagtagagagaggtgatgtgacggtcttgaagatcgcatcgaaacataatctggcagatccattcacatagacgctaccaacaaactcttttatgggtcatataactaagatgagactaagggagatgcccaatttacttttagggcaagttggagattggtagagtttatgccctgaaaagcttgtaaagacaatttctgattattaaataaagagttaaacatttgatatatgcatggatgttaagttattaatattattattgaataatttatattaaatattagaaaatttcttattcatatatgaggatgtgacttgtagttgta

SEQ ID NO: 268381 - DNA, 1269 bp, Cannabis indica
  modified_base (1216)..(1216): a, c, t, g, unknown or other
tgagcggaaaagttacaagttctgcgaacataagaaaagttacaactaataaataaaggagaagaattagtacaaaaagagacatagttttcaatagcccaatgagaatcaatcccattgatagcgttgataaccatcatcgagtcattctccacaatagcaaatttggatccgatatctaaagcaacagacacagctaagcagcaggccgcagcttctccgcacagagcatccgagaagtcttctcgagccgtctgaactctaatcactctgccaaaatgattccttgcaacaacagcaatgcacatactattgagtcccactttgacatcacaattcaacttgatccaatccggaggaggaggggaccaagcttccgttagatcaagactgggactaggcagcaaagaagcatgataatctgcataagaagtacaaatattagcaatacattttattatgtcaggagaacagttattatggaccttctcatttcgcactctccaaatagtatccactacaatcgaggcatacaagaaaacatcattagcttcgatccctcttttgtttagatcccagataaacttgacccaatcccaaacacagatgccagtgtcacacactgggaaaatgccccagggagaggagcgccaaagatgaaaagctacatcacaggacaggaaaaggtgttcaaaggattcctcccccaatccgcataaggggcagctagtatcctctatgtggaatctttttccaattaccgctcgtacagggagagcactcgaaaggatgctccatcacagaaccttgtgacgctctagaattttactattccaaagcttattccagagtttcggagcaacctcacaatgaggagctctttccaatgcttgggccagatacaccgatttagtggagaaacaccccttcctttcaagcgtccaaacccatctatcggtaccaatcccagagggattgcctcctttaagaatgtctgagaccgtttctcggtcaaagatgtttcgcagcttttgaatatcccacttcccattatttaacataaggtcagccacacagttcaggttggtaaaagtaccctcgagaggtttcgggtggaaaccttttttatgcggaatccagggatcaccccagatcttcgtgttctcaccattagcaaccaacttacaagctccttcctcaagatgaagttgcctcnccacactttcaaaccaagatctgaatcttgtatctgtcagctaaggaagtctt

SEQ ID NO: 268382 - DNA, 524 bp, Cannabis indica
ataatcgacgttccctcagcttcgaatgccatgatgggcttactagccctatacaacctgaaggcgataacatccatctactgcttttgcctaaaattccaaacaaggcatgatgtagatgttgagaggagaacaataatctgcccataagtgttacaacttggccttatccaaagcaaagaaaaagaagatgcatctaccagatcaaaagcatacaagcttcatgatagacttaggcctgtactactacaaagtcatgcccttcaggcttaaatgatgtaggggctgaataccaaaggcttgtgaacaaaatcttcaatgtacctatcagccgcaacatggaggtgtatgtagatgacatgcttatcaagtccaaaaaggctgggggcatatggaggacctagacaaatgctttaaaatcctttgcagctacaacacgaagctcaaatccagacaagtgactagcaagtgaccaagagacttgcctgcatggttgcttgcagagtacccataccgtacaatgc

SEQ ID NO: 268383 - DNA, 813 bp, Cannabis indica
agacgtcatcccagcaaccactgctaataagattgacaagctatttcgagacttttggtggggcgacacagaagacaaaagaaagctccacacaatagcttgggagcgcctttgcaagccaaaaattaatgggggtttgggctttcgaaccacgaagattatgaacaaagcgttccttatgaagtgggcttggaaagtgctaatcaatgatgactccctgtggcgccaactcatgaacgacaaatacatcaagaactcgaacttctttgatttggagaggaaatcgtcagatacaacactttggaagtccatcctcaatattcgtgacaaatttcaaaagggaatttgcaggagaatcggaaatggaaaggcagcttcgatttggtttgatccttgggtgcctggagataatacacaaccaatgccttgtgtagaagcatctgaaggagtgagcttagttagtaatttcattataaaccagcaatggaatgaagacatggttcagaaatggttcgcaagagatgatgctaaaagaattctcaacatttctctccccgataccaccacgaatgattcttggctctggcttccggaactgaatggtgagttctcggtcaaatcggcttgcagaatgctatcaactcaaaatcaagatgcgcattcggatagaaaatggagaattctttagggagcatcaattcacaaccggctgatatttctttggtggagaatcttatccaacagtctccccaccaaaggcaagatcggttccctatttccaattactgacatgaattgccttttctgctcatc

SEQ ID NO: 268384 - DNA, 581 bp, Cannabis indica
atattatatgatgagcatatcatcgatatattttatactatcttgttgggcttggctcacgggtgctctactatgcaagaaagggtaagactgttgttgatcagccatgagtgcaggagctgggcaaagaatgtacatgtccgggccatatcagaccaagcgggttgagggtctaccagtgttgtgcttttgagactctgtttttccgcttagaccgactgaaagaaaaggacttataatattattttgtaaatgtttttgggatcccaactaccgtaacttttagtttataaagtttaaagtattttaagtttattttcattcctattgttataaaagtttaaattctgggctaattctattagtaatcccatttaggggattagggttttataagtatcttgggtggcgtgcctaattatttagggcgttacattgatgttcactaagagtgctaaacacaagaggtcttagcttgaaagattgatctctcaaatcatcattctcaatggcagctttaagaagctcaatttctatcaccttcccactatgcgccttgtctaagttcttagacttaggca

SEQ ID NO: 268385 - DNA, 727 bp, Cannabis indica
ttaattttgataaatcatccattcttttttcttccattactactactaatattagagatatgtttacgcatacttttcagttagtggataagccttttatttctaagtatcttggacttccccaatgtttttctcgtgctaaataccaatcttttgtgtttcttaaagacaaaattttgtctttaattcagtcttggcatcacaaatggttttctaaggctggtaaagaatttttggtcaaggctgttcttcaagctattccttcttatgctatggcttgcttccgcattcctaccaaaattttcaaggaacttgaatcgattgtgtccaggttttggtggggctcttcccctaatcgtccttcaattcattggaagaattggtctatgatctgtcagtctaaatctgtgggaggtatgggttttaggtcattggttcatttcaaccaagccatgttagcaaaacaggcttggagaatttttcataatcctaattccttacttagtcttactcttaaggctaggtattttccacacacttcttttcttgatgttgtccaaggtcatagtccttctttctcttggagaagtatcatgtggggtagagatcttcttaagagaggactcctttggaaggttgggaatgggcaaattattaatacactagaagatcgttggctgcccaattttgctcttacaagctctgatttgatagccactctcccttc

SEQ ID NO: 268386 - DNA, 514 bp, Cannabis indica
ggttttgtctcattccataattctattagagtattgcttatgcttttcaagggtactgaattcaaaatgtaagtagccgccaaaagtgtgtctccccagaagtttactgatgagtagcacatcatcaatctgaccatgtctaacaaggtccagtttcttctctctacaacactgttctgctaaggtgttctaggtgctgtaagttgggataagatcctttcttccaataaatagtcattgaattcaaaatctaaatactcgctacgacgatctgattgaagtttctgtaatgatttacctaattgcttttcagtcatagccttgaattcttcaaactttccaaaagtttcacacttcttggccattaggtaagtatgatcgtatctagaataatcttcaataaaagtgacaaagtattcataacctccttaagcttgaatattaataggtccgcatacattaaagtgtataaactcaagttgttctttagtgatctatttccttttgtagaaaa

SEQ ID NO: 268387 - DNA, 638 bp, Cannabis indica
aggagattgttagagtggcctaagcgctttcaaattgtatgtggaattgctaaggggcttctctatcttcatcatgattcgagattgagaatcatacatcgagatctcaaggctagtaatgtgttacttgatgaagacatgaatcccaaaatttcggactttggtttggctagaacttttggtggtgaccaaatagaagaaaacacaaagaaagtagttggaacttagtaagtcatctaaaaaaacagtttagtttctttaatagaaatctattacatactaattaaaatgttatgcaaatgtaatggttatatggcgccagaatatgcctctgatggcctattctcaataaaatcggacgtgtttagctttggaacattgatgcttgaaattgtaagtggaaagagaagcagaggcttttatgatgaaaataacggacttaacctcattggattggtaagtgtacacaacctaaaaaaaaaaaactttttattaaagtcacattattattagagtttttagcggctaaaccctcataactattgtttcacttgcacttaactctagcttaaattttggtgacaaaacttttcaaatttggctcttaacaaatttaagttgtcatttgattaactgtc

SEQ ID NO: 268388 - DNA, 584 bp, Cannabis indica
ctctctctctctctctctcgtggacatttgacaaccaaaccacaccctaatccctcaaaaatcattcaccattataattgataagttgtgttttaaccatttttttagatattaggaatagtatgtagtttttttttgttatatgtgtgtggtatttttttgaactagtattattttgctatgtttttggtctgaaatgctagatctagttttctttcgatatttggatttttttacagcttatcgattttttatcagtagaatattgataaaatgtcaatactatgaaagaaaatattaggaatgaccattatcgacaggttgccgattacttgtcaacatattattgacaatatggctaaaattagatttaagcatcatttgtcgatagtatatagacattatgtcaacaatatttggaaaatatattttttcataaattttcaatgatttgtcgatgcgttgtcgatggttagtaaaatttcaatttctcattgttatcccaaaattggcactctgacgtggcatcacaagaatggtgacacgtggcatcaacttagagcacctggtcggatcaacatgcc

SEQ ID NO: 268389 - DNA, 629 bp, Cannabis indica
tttttagtgttttaatttagccatgtttttaatattatcacagtttttaataattaattattctattagtattaaacttgttttataaaatcacacatgtagcgttccctagagattagggcgttacagttggtttgggcaattaggttcgcacgaaatcaactcttgtggaaggtaggaaaagttgggttgagtttgttgttaatttggtttgtatcactcttgatcagtagataaaagctcaagaaagaagtttgtttcctatgtttgatacttggtatctttcggatgggctgagctatggtctaaaccatgttatgaaaaactcaaggtgaatattgatgttgcattgtttgacgaggagggaagacatggttttggtggggttgttcgagatcacaagggtcgggtcgtggctgggattacgagactacgaatttggcaagttcttttagagattgctgaagccatggctctcaggtaagtgttatcatggtttaagcgcgattttctgcgtgtgagtattatcaaatctaattgtctggtattggtacaagctgttagaagtttgaatgtcttatcatccacttttggtggtgtcgttgaggattgtaaacaacttttatctt

SEQ ID NO: 268390 - DNA, 592 bp, Cannabis indica
ggagtctctatgaccagagggtcatggtgaggaaaatgcaccatccttgcgtcttcttccatgaaagtaattggctgatccatgagtcggcgtctctgagctagaagctaattgacttcccacacctcgtcgtgttaaatggccccgtcacagcgctttaattcttttcgagtggtccctcctatatggggcccaccagagatcatagccactcttccgttgcgtcttggtggcaggctaggggtttgctaggggattggttctcccgagggtacagttggtgccgatgctccggacgcacttcttggtgtcccttggggcaatggaccccctgccggaaccgagttgagatggggcgatccgactcttgatccactcatagaggtgacccaatcggatcaagttttcaatcttatctttaagatttttgtcactcattggtaatgtgtccaatgtcgttgtggtattcgcatcattgttgggatcccttctggactatctttgtacagtggaggcggcctccggtagtgtgtattttgtcctgttggcaaatacacacgctcttgtgttccatcaactccgtgtactgggt

SEQ ID NO: 268391 - DNA, 780 bp, Cannabis indica
accagggtaagtcttttttgatacttccctttaactttccacacttagctccatatgctgagttttttcctttgtgcaggccggtctaaagttggcctacacttactcccgggataaatctgttgcttcctagagcgcagatctgtccaacaccttgaaggcggaggcagacttggccaagaaggaggctgaggaggccaggtcagaagctggagctgttcggttggagttgggcgagaccaacaagaagctgttcgctgccgagaaaaagatctccgtgctgacaaaggatctcgaagctactgaccgctttgaggagaccattgagatcttatctgctgaagtaaacagtcttcacaatgagaggacttctttgcgagcaattcttcttcagatgaaggaggagaaggatgccaaggtgagggagcttaacgccgaaaattgacaggttgaaggagaaggtcaatgccttggagacagctggtctcgagctcttctttgatttttggaaggctaatctttgggccaactttgactacttgggcgaggctaaggacatgtaccttgagtactgcgcgacccaagtggcttatggtgggaacgaggtggctgcttcaacctccgcccaagctgcttcaacctccggtcaggctactgatgcttctcctgttcaaagaacagatcctcgtgctccagttggcccagaagaaccgaaccaagagcctgggactccagctgtttaaacatttcctttatctctttttttttatatatatctta

SEQ ID NO: 268392 - DNA, 650 bp, Cannabis indica
aagttcatatttagggtgttagtcaacatacttgtgagtagatctaagatcctggtaaaataatttccaacagaaaggacacctgagatagccaaaacttgaacttcttgaatttggcatataacttgtgttctcaaagccattgtagaaccatccggatatgttgctgatgctcctcttttgattgagagtacacaaggatgtcgtcgataaatacaattaacacaaatatcgaggaaatccttgaataccctattcattaggtccataaaagctgcgggagcattaattaatccaaaagacataaccagaaattcataatgcccatacctagtatggaaagtcgtctttggaatgtcctcctcttggattctcaactgatgatagcccgatcgaaggtcaatttttgagaaaaccgtcttcccttgaagttgatcgaaaagatcatcaatcctaggtaaaggatatttattcttgattgtcagtttattcaattcttggtagtcaatgcacatccacaaagatccatctttcttcttgacaaatagtacaagagctccccagggtgacacactaggccgtgaaaaccctatgtcaagaaacccctacagttgaatttttaagttatttaagttctgctggagccattc

SEQ ID NO: 268393 - DNA, 1455 bp, Cannabis indica
aaataatttccaacacgaacatgcataaaaaaagatactaaaaagaaggcaattaaacagcaggattcctaggctctttgtaccggtcaactggatctaagggggccagaggatcatctgtctggatggaaggagcctcaacactctggtcggtgggagaagcggaagtggtcgcctcagggttctcattagtcgcttgagtagtgcagtagtcgggaaacatgtctttggaagtaccgaggtattcaaagtttgccttgggattggccttccaaaaggcataaaaaatctcgagaccagttgtctctatggcatccactttcttcccgagcttctccacctcagatttctggctcttaaccttagcctcaagtgcctcttcctaagtattcgtgtccttggcctcatcctccaacctgtaattttcttccagtttcgtcagtacagactctgttttgaatttattataagaacatttagaagtaactgatactatatatttctatctagacccaatgatcaagaatttaggccttatatgtgccctgtttaagacaataatagagtctctattgacaaaattagagaaaaattacagttttacaaacattggatacttactgacactaaaaataaacattgagtgattatgccgcctacaaacataaaactttaggtacttatgccgctatttacccattatcataaaataaagtaatggagaagtgagacttgaaataaaaaaaaaataagaactaaaattagtttaataaaattgtatattaaatatgtacataaatattttttttttttggggaagaacatcggtttgttcattagataagataactgggaagcacaacaggggttccctccctatggtagacaccattcaaaagactgttaactctagcctttttagctacaaaatcagcagcttggttgtccaaacaagaaataaagaaaaaattgcaaacattaaaacttggtagtaaatgtaaaatctccatagcaatatgtcttgtttcccaaaaagtagggcatgtccttttttccagcgcttacacaatgaccttagaattagaagctatggcgatggactccaccttggctgccaaggttgattccatatagcaattgagtctcccctccccggtatggctagacttcccaattgaatgatccctctagcctcaaagatacccttccataatgggatccaaggttgattccatatagcaattgagtctcccctccccggtatggccagacttcccaattgaatgatccctctagcctccaagatacccttccataatggggagtcacctccttttccttccacttcccaaaaggacttgtttttgcaatattttgccattagacatttaactcaaggtttattcaccccgtttgccagttgccgcgcaagttttgctaatagagctttgtttg

SEQ ID NO: 268394 - DNA, 543 bp, Cannabis indica
atgttagcgtgatttttaacttgttgtgcagcttgttgctaatcaacaaggttatcaaaaatcgtgattaattaaaattttgattatgtaattaaaaagataaagtaacatacatttaaaattctgggatcccatttaccaaacatttataaaagtttaactatatataaacaaaagtctatcgcctaacgactatacaacaaaaccctgatgtctcaaagatcatacgctccaggcctaaccgccctaacatgtacaatcttcatctgcttgctctcacggctgctcagccttagccttgcccttacctacacatggaaatagcaactgtgagtcaacagactcagtaagaaaagcataacacaaaacataacaatatcccgggttataatcaggcgcccatacacctaatcataaccctgtgtcccacacggtactgattctagaacgttcaaacggcaagactatcgatcataatgtcatcctatactcaatatgccagtcatactctagccatattgatgtgacaacatcgatcagtat

SEQ ID NO: 268395 - DNA, 556 bp, Cannabis indica
aaattaacttatggtatctacacattatttctatgacaatttaatacccttttgatacccataacataattagtcacttaaattgtatcgcactaaaaaagcatatacaatatacatatatatgtgcctagagtaggatttttaatccaacaatctcccacttgtgcaacatatgttaccttataaatgtataaccttatgagctcaaaatttgctattatgtaaaggtattcacaacaatctcatccatcaactatatctatataggatcaaagcgttttttgtcatatcaaacatgactaaacccattaatagtcacatatacaaatatagccaaataacatagatcaatcatgaattcatagcacaaaaattacatgcaatgtaaaccaaacatgcctattctaactggtcctccttaaaccaaagtgaggtcagacttagatatgacaaaacaaagtgaatgaactgaaaacattatttctgataagaaaataactaaatacataaatgtcttaaacaaacataaaactaagaaaatacaaactcccactaa

SEQ ID NO: 268396 - DNA, 702 bp, Cannabis indica
tgtcttgatgggcttggctcacaagtgctatactgtgcatgaaagggtaaatctatctttgatcaggcatgagtgcgggtcccggtcgatgtatatacatgtttgggctacactagaccaagcgggttagggtcaaccagtgatgattttctctaactctgttttgtcgcttaggtcgactattgggaaaagacttgtgataatattttgtaaaaatattcttgggatcataaaccatgtaattttggttataaagttaaagttattacaagtttttattttaattctattatcgtttaaagtttaaagttcctgtactattctgtttagtaatcctgactaagggattagggttcttaatcaccttcgctagcgtgcctaattgttagggtgttacaattagtgagtccaaaagacatcacaagaaatccataatgtccataccgagtacggaacatagtcttcgggacatcttcctctcgaattatcagctgataatagcctaagcgaagatcgatcttagagaagaccgtcttccccttacgttgatcaaaaagatcatcaattcgaggtaaaggatacttgttcttgatggtaagcttgtttaactcttggtaatcaatacatttacagagacccgtctttcttctttacaaacaacaccggagcaccccaaggagagtagctcagcctaatgaatcc

SEQ ID NO: 268397 - DNA, 918 bp, Cannabis indica
tttgacctcagttttctttgttttttttactgtgtgtagggattttttaggaataaaaattcctacagtaacccctaataaggaaagttagctaatattcatggatccttaagcttcatttaactaaaaaaaatttaaataaggtgtcttgcatgcaatttttttttattgaaacacttctgcaacatctaataaattaaaaatctcaaataaataaatgaataaaaatccttcaatcttatataagatgataaataatttcaagaaaatttcatatcatcccggtttctttgatgaattctaaaaaatacatcattttaccaataacaaaaatatatgctaaatgaactatataaatgaggtatgcaactactttattagagctaaataaaaattaatttaaattttgaagagatatttcaatattattacaaaaatcaaccaaattgctttattatacaaaataaaaataaaaaagtaatagagaataataataagcaatttgcacttaccacatacccaattgtatagtagtcatgtcgcaaaatttaaataaagaaaaacttaaataaaatttttaataataaataaaaaaaataaaaattaattacaatacacaattacattaatagatataccttacaactttcactgagataatttatcttctcgctgaaacttgtgtctgacaaggagaatttattataaattgtgttccttccaaactccaatcgttaatcatacagagaacactttttaaacattaatggaatcatcaaacaaacaaagtttataacccaagtctttttatttttttttatgaaagtttttacaccaaaatttctcaaaaaggatatttataatacttcttattaagttaactttttttttgtacaattattagtaaattgttttttt

SEQ ID NO: 268398 - DNA, 740 bp, Cannabis indica
acgttgttttgcagttaaaattctacatagtcaacgagtcaatcttattagatttttgataaagttctagggtcttttctcttatgaattttttcatccctttttcagtgtgacttgcctctatatataattacataatcatgcagttaattacatagttgattgatatcttacaaccattatcccctaaaatcgtgggctttgattacataccacgtaaaataaatgcggttaatatttgaataccacatcgctatgataggaccacttttactgggtcaagataatcatggattaaacacattgtaaatcatatcgttctgggatgtctcgctagaaacataacaacaataactctggcagtgagctagagcttttcccacatctttccgaggttgataatgtaaatcttgtcgcttctgctcatgcataacgaggttgattccttgccttgcacatccaatgtcgtatggtttcttgttaatgcacgaggcaacaatttgtatatctttatcttgcgtaagagcttatagtcagcaagttgtaaatatactctttcaattctgcattttatgagttagtccattttcaaatgtaattaccgttacattcattaattcatatccttcctaatttgacacgtgtcctcctttgacatgatggccgaatttcaggtataacaattgccccttaaaaagttcttttaataagaagttattttaaatgaccattgaaggtac

SEQ ID NO: 268399 - DNA, 1586 bp, Cannabis indica
atataaaggctgcagggttcttaagacaaactcgtatttatagagaatcgttctcctggtttatacaaggacacggggaggatgctcgcatatattcgatatatgcgagctactctcttgtctcggatgcgattagacttcggtcatgctcgccacctctcgctgattctatcttaagcgaggtttaaaacttcgaggagtccctcagggacatctcagctttctttggaaaatctgagtatacgtgtcctctaagtaggggtctggtctcgagtttctaggtgagagaaatctcactataacacatgcccctagtttcgcgatgtgacaggtgcggtcacaagggaaactatactcgagagacaggtgaaaggttgtcacgaggaggtgacctttggttgtcccttcgagggtttcgaaaaatgacggctataatcattacttttattgcatttatggtgccacgtcacaaaactcttcggtttctatgtaggcgtggccatctctggccgttggattgggcgactctaggcattccaactgccacgtgtcgtgatcccaattaatgagggatttgggtatttaaaccccctgattcgaaccaaaaatccccattttccctcatttttcttcaactcccttaactcctttgtttcttcactctcagagaaaccactaagaaacacttccataaattgcccagatttttgcctttcttcgtgggtttttcttgattctacattgctgtcaagggcgattcgtgggaacagatttagcaaagtaaaaggttagttttcgaatcttcaccgtgtttcgttttctgtttgagtggggactgtattttctgggtttttagtatgcatgagggtggtttaagaatgaatatttatagatggtatgtatgaggctatgttttttaggtaaaaacctgggtaatttcatagagaatgacctgtaaattggcataaccgcatacggtgcaagaaatacttgaataggcactgttttatgttttgaatactcgcaggtatgaacacttcgaatactcgcatatttgcgagacttatttacttctgattgttgcctagatcttttagggttctgtatactgtgaacttagtcgcgagaacattaactgagtttccaaatggtggatgtgtcacagtattctaatggtcatatacgcggttatatgccccttgagatactgtgatacacccagccatttgcgacatgcgttaatgttctaatgagcgtactctttggctggtagatattctcgaaacggtgggagtacctcagtaacttcagggttatgcttgagaacgcatgccccttgagtcactgagtttctcccagccgtttctagaggtatatcgcttggcccaggatgcgtgacttgttcgcaggctgcgactttagttagactccttggaatggtgggtgcctcctcgtttcctcagggtcatgtcaggagacgcatgtcactgaggtcaccagggcgctcctgaccattcattgggatgcttttctattcgcatttttagtattctttctacttgcatattgacggggtggtcagtatt

SEQ ID NO: 268400 - DNA, 847 bp, Cannabis indica
ttaattctattcctatgcttaatgggacaatttcaaggattggaaaaggaacttacttatagttctgggatgtatggatttagaccatgcactaaggaatgaacaacctgcacctctcactaaggaaagttcccatgatgataaaagggaatttgagaggtgggatcgttcaaatcgcatgagtctaatgattatgaaacacagcattccagaagccttttggggcacagaatccgaaggggttactatggctaagaatttccttgaacaaattgaggaacgttttgctaaaaacgataaggttgaaatgacaacacttcttggttctttaatgaacatgaagtataagggtcaaggaaatgtaagggagtacattatggaaatgcatcatattgtctcaagattaaggacacttaagattgagctttcagatgatgtacttgtactcatggttttgttaacgcttcctccacagtttaaccaatttaaaattagttacaactgtcaaaaggagaaatggactctcaacgagcttatttctcattgtgtgcaagaggaagaaaggttgaaaaaggacaaaactgaaagtgctcatttggccactacccctaaggataagggcaagaaaaggaaatttgagaatgaagctgctaagggtccagttcaaaagaaacaacaacaggattctaagggttgtttcttttgtaaccaacctggacatgtgaagaaagattgtgccaaatatcacgcatggcgtgtaaagaaaggtattaatcttgctttggtctgttctgaggttaatttagtttcagtacctagaaacacttggtggatagattctggtgct

SEQ ID NO: 268401 - DNA, 712 bp, Cannabis indica
gttcatcttcattttggtgaaagctgtaggttttgattatttgatcaaaccttttgttccaagagcaagaggactgcttaagtccataaatggacctattgagcttgtaaacttttagaattttaatttatactaaaacttgaaataaacaaaacattgtctaaattcaaaaatttgttatgaaacttgaggtgagcttttcctgtagcttggatcgacaccaatttttcattaccaacattaagcttcaactcattgtgacttaaatactcctatgttccaagtagctgcaatgaagagcaaacatggttagtagatctaaaattaacaatccaaatggtttgtcattctctaaaacacatcattcaaagacaaaagaattatcttcattcttagagttgagaagtctgtgacactttgatttaaaatgtctcttctgtccatagtgagaacataaaaaatgtgcttgcttaattattctttaattgttcttattccttgttcaatctcttgttcaagggtaactggttaagtagaagaactttccccaatcttttcaactgagcctaaagttgtagtattgttagaggattctttctcaatattctcaattcttcctttgtcatggtttgaagtgttgggttttatgccctaaataaaactccatttcaatgaaatccattttattcaacatcaataaagaaacagaagt

SEQ ID NO: 268402 - DNA, 991 bp, Cannabis indica
cccaggttataacctgcccatacacccgatcataaccctaatccccatgtcccacatggtgctgagtctagaatgttagtacgacagtactattaaccataatatcagcctatactcagtatgttagtcatactctaaccatagcgatgtgatactgtcaagtagtacagtactatcgaccataatattagcctatactcggtacgatagtcatactctagtcgtactgatgtgatattgtcacatagtaaaaaagtcaatacaaaagtcaacatacatatctaatgtaatctaacaggcttactgacctgcacactaaacatgtatatacatatgcaaactgttatactaatcttaccttgattctgaatttaggtgtgccggccaacctgagtggaacatctgctcggtgaattacaagctcctaaatcacgtcaatcataacataggtaagtgacacgctaaattactttccgaaacttaaacttgaaactaaaagtttccctatcgatggataacatggcaataccctaaacatctcaaaaatgggaagaactaaggttcccaaactcccccaaccggtagaccggttcccaatcagaattccagttttgaggggtttcctggggaccaaccggaattccggttcctacaggtcccgttgaaccagaattccagttcagtgcaagaaaggtttaaaaaatttatatctcactaaaaacaaccccaaatcataccaaactttccagacctgctccatatatcccaaagaacatattcaaagcaacaaaacaacaatcaaagctcagaatcaagactttccattaaagctccaagtttgagttccaaaactcaaaacttggttaaactaataaacaactactaaaacatgattaaatcaaccttgctaaacatataataacttctgaaaactatatcaaactccaacagcaaaaacatccaccaataacacaaaaacatgcatgatcca

SEQ ID NO: 268403 - DNA, 747 bp, Cannabis indica
aactttcactaacttgaattctgtagaaatgtgtatgggattctgagatggatcaaacactaaagatataatgttgtcctttccaagttcatcacaactcaatttggtcatttccttgtttaatggatggcaaatgtagattgttgggtcttgagtagggaagaaacttctgcaacaaatgataacatgacacaatggaaacaccacaacgtcctcagggataaaatcaaatattgtctatttgaattgaaagccttcttcatcaacaggaatgcatgtgacagttttgatatctttgttgagccacgggaacttatcttggaagataaatcctgagagttcaatataaagtaattttccttttagtcttaactgtactgcatagcaagttatattgcaatgtaattaataatattaagaatgatgcatagcagtttttttggtagggcaatagttgactgtatggtgcgtagcagtttttttgttaaagagtttcaattatggtcatttacttgttttgtatagtgacacatgttatacatataataaatgatgaaatttgattttgtgtttcaagaaatgagaaagataaggtgctctaataatgatgaattctttaaagtgctatacctattacctacagagacattctttcaattgaaatgtgtatctaaaacttggaaccacttgatatctgagcgttctcttatccaatctcaattacaaaggacaaaactctctatctca

SEQ ID NO: 268404 - DNA, 754 bp, Cannabis indica
tgtgtgatgagaaatttggtgttataccaataccaataccatgttccaatgaagaagagtttatattgggagaatggaatgaatcagttgctctgttaaatatttaccagatgtgggtgatggttgatgatggtattcgtattaaatggataatgtgtctcaaatttgggccattgccaccattgtattttcccatgaatttttggaaggaagatgaaattttattgaagagctataaagatgaagatggggttgtttcatataatattagtactaaacaacttagaagagtttatgttcctggaaggatgttttactgcactcatgctattccatctctaaaaactttattttcattctagaattgggaatttgaaactctttattattttgtattaagagttctttcttttaagatttgtatatgtggagttcaacttgtaatgttcgatttcaacatttttatatcaatttgaaatcatgaggagtactttaatatgaaacatgcatctgcaagaaatgtcattgagagatgttttggattgcttaagattagatggtcaatctcgaagagcacgtcatttttcccaataacaacacagtgccgaataattacagcgtgttgtattttgcataatttgattccgcgagaaaagtctctagatccagcggaaattgagcttgatagacaagtggatgctgcagaagatactcatcagacaataatgaagatcatgaaataattgatactgtt

SEQ ID NO: 268405 - DNA, 740 bp, Cannabis indica
gttttgtgacacgattgttgtgggcgggaatgtagcaatccagtttgcccaggtaaccgccctggtcgagagtccaaagatgcgcctcagtaaccctggacggagggcttacccacctggcgccaaaggcaccttgccttctatgaggaactgcagcggcaagttcctcactgacgtagtccatgccctcaaccaggacatctccgtcagcatcgactggctccccaacctcattgtactccccgtagtttgggtgttcaacctctgcctcttcctccgcctcgaaggaactgccaggacgtagatcgtcctgctcctaaatcttttggacctcaacgtccccttcatgatccccctccatctggacggatggatcttgttcgacggtgggaaaagtggtgtgccgagccacttgaggatcatatgtgtcagctagacacattgttttctttgtacaagccatcattctatgactgggtacaaggtttcgagaatgtccgtcactagagaaaggtgggctagaatgaagacgaggatgatcctcgtgcaaaagttgaagcaggtcttggtcgatcagatgtctgttctcccaaaactcacctgagttcatctacaaaagacaacacacaagatgagtgtttggtcggaatattgaacgataaacaagcaaatatgccgaccaggagtactcaacaaattcaagaacaagaatgttcaaagagaagtcaaaactcaagaag

SEQ ID NO: 268406 - DNA, 1656 bp, Cannabis indica
ggatatcttcctctcgaattctcaactgatgatagcttgagcgaagatcgatcttggagaagaccgtcttccccttcagttgatcaaacatatcctcaattcgaggtaaagaatagttgttcttgatagtaagcttgttcaactcccggtgatcaatacacatctgtagagatccgtctttcttcttcataaataatatcggagcaccccaaggtgagtagctcggtctaatgaatcccagattcagtaactcttataattgtatcttcaattccttcaattccgctggagccattcaatatggtgcttttgatactggattcggtcccggaaccaactcaattacaaattcaatatcccgggtaggtggcaatcccgataaatcttctggaaagatgtcaaggaactcgcacactaatcttatattctcaggtcctgatgtcacaggttggctggtatccactgtagtgactatgaatcccaaacaacctctgctcatcaggtccttaacttttaacagtgttattcttggtatgcgtgtcccctgaaccttacccacaaacaccgttgggttagcactatcaggctcaaacaccaccatctttcgcttacagtcgatcgttgccccatacttagacagaaaatccattcctaggattatgtcaaaaccaaacagttgcaattcaattagattggcggtcaattcacaaccgtcaatccagaaggacaaagaccgaatccaccaagtggatattataaggtctcccgagggtaacagggtaccaaaccctaaatttagcataaatatcacatggcttatggaaactttctataactgacatgtcactactgacggactagcatcagcgtcagcctgagtcatagtaaaaagtcgccccgggttctaagtagcattcttcttgggttcctctttcttggcctgaggacaatctctaataaagtggcccaccaagccacactgaaaacatgtcttcgcccgacactcactcggatggtgtttcttgcatttgggacactcgagatatgatcaaaatgaagacccgcggccctgacggccacctctgcttccctggaactttctattaccccttgatgctccggaagccttagccttccgtttgtgatcaaggttgccactgtcggtcccattactgacattaccactagcaagcgggttcgatgccgtgacgacatcctttgcggtatgctcttttgctacatgttgctcaacctcctcagtaatcaaggctagctctaccactttcttgtacaaagtgtcatgtgaagtggtaatcttcaagtcctgactaattgtggcattcagtcctctcacatatttctgtttctttgtgaaatctgtgggtaccagatcaccagcaaactttgacagcccatcaaactccagagtgtactcggtcgctgacatttcccctgactaagcttcacaaagtcttccacatgtgaagttctcatagcaatgttgtaaaacttttcttcaaacagatttttaaattcctcccaggtcattacactgccatcccgggtttgacccacaatatcccaccagacgcgggcatgatcttgtaacatgaaggctgcacaattcactctctcagttcccgtcacccccatatt

SEQ ID NO: 268407 - DNA, 1434 bp, Cannabis indica
actattgataataaaacttcaagcttccgccattccaggctctttggattgcagcaccatcgagttctgcaagtcggtatgttgcgttaccaatcttttcagcgatgaggtatggtcctttccaattgtctccgaaaaccccatgcgttgggtttttcgtgtttggcatgacttttcgaagaaccaaatcccctactcgcagaattctctccttgaccttagagctgaaataccgcgcagttcgctgctgataagccgtatttttcaggtgagcctggtcgcgcttttcttctaaaaggtcaacgtggagcaattgtttttcttcgttctggacaatgttgaaaacatctcttcgtagggaacctaccccaacctggacttgtaccatagcttcgcatccataggagagcgagaaaggagtttcaccagtcgtggatcggggggttgtgttatatgaccataaaacttgcgagagttcttctggccatacccctttacgctcttcgagctttcctttgatggtatgtttgattatcttgttgacggcttttgtatgcacattgctctatggataggccactgctgaaaatgcctttttaattcctaactcatcgcacaattgtcacatttccttacaatcgaattgctttccgttgtccgagatgagtttttaagggatgccaaatcgacagattatggagttgtagacaacctcgcgtagtttggctgttgtaatagttgcaagtgcctttgccttagcccattttgtgaagtagtcaaccgcgaccacggcgtattcgactctaccttttcctttgggtaactccctattaggtcaatgccccagaccgcgaagggccaaggactcgtgatggagtgcaagtggctcggaggttggttgacatatgtggctatccgctgaaacttttcgcatttcctggcgaagttgaaagcgtcttgtcgcagtgtcggccagtaatacccttaccgcatgatttttaaggcaagagaattaccgccagtatggtttccgcagacaccactgtgcacttcacgaaggatataatcgcactcctccccgtcaatgcatttgagtagcggttggctgaagcttctgcgataaagtcttccatcataaatgacatatcgagcagctcgatatcgcagttttcttgcttatattttttctttaggtaagacctccttttccaagtaattcactatcaaagtcatccatgtaactcctctggcaatgtctatctccatcacttcatctcgactcaccgttaggtgagttaacacatcgacaggaattacatcgagcaatttagcttctcttgttgaggccaagcaggccaaagcgtctgcgtgtgagttatgagcacgcggtactcgggagacaatcacttttttgaatttctgcaacaactcgca

SEQ ID NO: 268408 - DNA, 719 bp, Cannabis indica
gttcaattaatgtcattcaatgactaccatattgatgcttggatcaatatggaggatgatcttaattggtgttttacaggattctatggggatcctaatccttctcaaaggagacactcttggacacttatgaaaagacttgctagaaactacattgggtcgtggctttgtggtggtgacttcaacgaaattagaggcaatcatgagaaacttggaggaggagggaaaccggggtacctaatgaagaaatttaataccaccatagacaagtgtgctcttcgagaactagaagtggaaggcagcaaattgacctggtgcaatggaaggacagcgaatatggttttcgaacgtcttgaccgggtgatggtaaatgtggaagatatatgcagtagccaaagtgaaacatttaagtagatggtgttctgatcattatccgctattgtcacctttaattccatgccgaatgaggaggagagtaaacaaagatggggatctaggttccactacgaaaaggcttgggtggataaggatggatgtcaccaaattatcaaagaaaattggcaacaaggtactactagtgggtcggctacaaagtttggggagaggattcatctatgtggcaacttactggaacaatggaatcataagcagagaagggacaatcaagccaaaataaaagagttgaaaaaagatatagaaaagttatctcgagaccaaac

SEQ ID NO: 268409 - DNA, 780 bp, Cannabis indica
tctgatcttttaattaaataatatataaatattaaacaagttaacacatttttaaatcttaccataatggaaaatatttaaaattggaaatatttcaaaaaaaggaaatatttaaaattggaaatatttcaaattggaaaaatttaaaattggaaaaatcgaatttcgggaaacaatcccatgaaaattcggatttttggggagaaacccacaaaaatcggtttgggagtgctggctgcccaggaggctgcacgtgtagcccaggaaggctgcacgcagcctcgggcgcacgcggagcatggagtttgcagcctccctgtgcggcaaacctcggcaggtgcagaataggcacgggcggacgcagcgggcgtgcagacaagggatttcccttgtcacgcgcgcggatgggctgccagtccgaggcctggtgtgcgtgcgattgaggcatgtgcactcgttttttcaaaaattcataactttctcaatttttatcggaatcgagttccgtaacaaataaaattgcttaatttttcacaaggaatccaaataaaatatttgcaaaaatatataaaaaatatttttcatgaaaaaatttcgtacaacagatacattcatcacataatcacataaaccaacatgaaaccatccaaatcaacacaaaacatcgttttaattcatatttcatgaaagtaaatcattaccatggctctgatactagttgttagaaatattttaccaggatctatatttactaccaagtatatttcattaacatcctaa

SEQ ID NO: 268410 - DNA, 620 bp, Cannabis indica
tataataattgtgtgttaataatcatacgttaattgaaaaaggtttatatttaacctatttctattatcatagaacactctaaatattttacatggaaattaggatttcgtgggtcaagcatacattaattctcaagagtcactcttgcaatcaaggctaggactccacattcgaggtaaggaaattaagtagaaaaacataagttttctgtatgtaataacattcatagaaagagtgggaatagtaaaagagaagttaactaaggtcttctgcctgactctttattgtttgttatttaatgtactgtataatatatatttaaataatatgtttataagattcatgttatttatgtatgtttacagtattagagcatggccattgctaaaggtatatatttaaataatatgtttataagattcatgttatttaagtatgtatgtaaatagtgtgtttataagattcacattatttagttatgattgttatgttatttaaataatgtatagtagtttgacattatttaaattagatagattatagtttatgtgacatggtttgaccgagaagataatggttaaatacttgactgttgggtctatatggtagatagggggcc

SEQ ID NO: 268411 - DNA, 759 bp, Cannabis indica
ctataagaaaaggaaacttcttccttgttcttaagtcaatacaaataacaaggaataggctattactgaactgcccggggctgaacctctataaaattcctgtatcttatcattgctttcttttatatattctcattacgacatatcatttatcgcttatcaaaaagactcattgtcgttggctaaaagcgaagtcaacaacaccaaaggtaaattataataataatagtaaatattgaataagtgtgagtactcaacccagaacagcgagtattcaaatcaggaacacatatatttagtaaaagactagaaaaatgacgaacaaaagagaaatatagtcgttcagacagatcacggtctacttagtccactgttgaaaagattatgtcccctctcatttcacgacggaccactcctttatatatataaaacaagtgtcctatcatttacacaatgattgcattcattgtcaatctgtttatacattgatttacaataattaagctaaaaaacataaaaataataaatgaagaacaatttccagtttcattcactaagtacagcaacgtacgcaacttctatagtgcaagctggctattcatattcttgcataagctcgcaggcttaagatgcattcgagactagttgagtccaggatgtgtgcgtccttgtaaagtggcttttacggacatcatataacgagctgatagaacctacacatgggagtccatatcagtttatcgaggctattgggtcatc

SEQ ID NO: 268412 - DNA, 822 bp, Cannabis indica
gccactttccttctttgttcttttggtattggcttattacccgaaccaaaggcaaagggaagactttcctttagtccaggtatatccattgatacaccaatcggaacatcaaccagattatggctgtcacttatcaccatgtgattacttgctgttctttgaagtttcccagcccccactgtctctttgtcttccaccaatcttcttttcccccttccatcttgagccatatcagttctgtctccctctttctcatgttgctggttcaggcatcttgtgatttgcaacttgttcatctccctattgtcttgatttacttcgtttccttcaaaaacctcacaccttctttgttcacgccctgtctcttcagttaataggggttcaaaggagttgatgttaggctagaattagtctaagtttcgggtcgtattttcggttagttttcactctttgtttctagttttagggctatattacgcttgattcttttgtttcaggtcctcgggcatttaaagaaagtatgtacaagaattgaggaaaaacggtgaaagaatcgagaagaaaaaccaaaattggtgtttctgcctattcccgtcgcgacggggaatttgccagtcgcgacgggaacttacagaaagtttcaaaaattcaatgctgaactcccgtcgcgacgggggatttgccagtcgcgacgggaactgacagaaaatcttcaaaaattcgctgcttaaccccgtcgcgacggggactgtgccagtcgcgacggggaccctttgacgggatttttgggcaatttcgtaatttcacgaattttgaagatga

SEQ ID NO: 268413 - DNA, 645 bp, Cannabis indica
gagttcaaaaactcaaaagttgaaagcaaccactgacatccctaaattcatgctcaaaacaacatttctaaacatatattaacctctaaaaattataacaaaccctaacagtagctacagcaacaaaaccataaaatcatgcaaaaatctctaacttaaaactcaagaaaacacgagaagaagagctaaaacctttaccttgattaagatcccctaaaaacaagctgaatctccctgaataattgaagaacaaacaaaccctagctgctctagggtgggtcgaaaaagagagagggagttgagagaaatgctttctttttcaattattttctattttataaataaatgagataaaacttgatttattaaatatttcagccaattaatctttaaaattcagattattacattaacataaagtccactaaaggataaaaaatacaaatgggcaaaaagaccattttgccctttccacactaaaagtcataaatagtacttaggggtattttgggaaattctaacatcccgactattcccgacattcttaatgtctaaactattgtcccgctataccaaaaatactaggatgtgatgctattagccaaacaccgggtccaatgtcgtcgggcacaaaacatgcaaaaa

SEQ ID NO: 268414 - DNA, 1568 bp, Cannabis indica
attatcaccctaattccaaaaaataagaagcctcagaacatgaaagattaccggccgattatcctctgcaatgttatttcaaaactcattaccaaagttcttgttgcaagatttaaagttgtgctcccatatgtcatttcagaaacgcaaagtgccttcttgcctaatcgcctcatcacatataatattctagttgccttcgaacttgttcatgcaattaagaacagaactgcgggaaggaaggggatttctcttaaattggacatgagtaaggctttcgaccgagttaagtggagctttattcaagcagttatgaggaaaatgggcttcgctgaacaatggatcaatcttatcatgacttgtctttcaacaaacactttctcttttaatgtcaatggtgaggtctctggatctttgattccaactcgtggtttacgccaaggctgccctctatctccatatttgttcctcatctgttctgagggcctttcgagattgttacaatttgaagaaaatgaaggacaattgactgggttcaaactcactagaaatgccttaccgatttctcacttgctctcgctgatgacagtctccttttctgtcatgccaatgatagctcatgtcttgctatcaagaaagtcttggacatttatcaccgtgcctcaggccaatttctaaaccatgataagtcggtaatgtctttctctccgaacaccaccttggcatcacaagtttttttccacagacatctctccatgcccatctgtgaatgccatgaaaaatatcttggtctaccgtcgtatactggccgagacaagtagcacctgttgagtgacatcaaagagaagatttggcgccttatgcacaactggaatgaaaaaatcttttcagctgggggtgtgaagtgcttcttaaagctgtggttcaggctattccaacatatattatgagttgttttcgacttccagcctatgtagggaatcagctagaatctatgatggctaatttctggtggggttcgaatgaaaatggatcgaaaatacattggagggcttgaaacttactgtgtaaatctaaaatagattgtgggatgggatttcgatcttttgagcaatttaaccaagcattgttggcaaagcaagcatggcggctgttggagaaaccagattctcttattggaaaattactcaaaagtcattacttccctaaaaatgattttctacatgctcctcatggtcatagcccctctttaatttggcaaggaatcatttggggacgcgagttgctccttaaagggttgcgttggaaaatcggtgaaggaagacaaattcggattgcaattgatccttggctacctggtcgtgatactttcactcccactcttttttcgggtcctgctgatgcaatggtcagccatttaatcactgacgaacgtgtttggaatgtccctcttctgcaacaatggttctctcctttagatgttgatcgaattttgacactggcacttagctttttccaacattctaatgctctatttggcactatactacatcaggtgcatacacggt

SEQ ID NO: 268415 - DNA, 321 bp, Cannabis indica
taaaataatttccaacagtaacaacccgaaaaatttcaatctttaagcccccataacctactcaatcttccccaaacacccccaaactttccagagcatcattatataatatattaaacatattctacaactcaaacactataatttcaccaagaatcaaaaagtgccattaaagctccatggaactcaagctttctttacacaacaaaagtcaaaacctacaatcagatttcaaacaagaaaaacaccctaaaatcacatctaagttcatcaagaacatactccatcactcaacaatatacacaaaccaagaacatcaag

SEQ ID NO: 268416 - DNA, 782 bp, Cannabis indica
gctatataaaatttgcctaacatatgtctaatatgttaatctgatggcaactgacatgtacactaaacatgtataagcatatgcataacattatattaatcttaccttgattccgaattcagttgtgccggtcaacctgagtggaacgaactgcttgacgatttacaggctcctaaaccataataatcacaacacttgataagtgacatgctaaatcacttcctggggacttaaactagaaactaaaagtttccctatcgacaaaagtatggcaataccctaaacaacacaaaaatgggaagaactagggtttctaatttttccccaacctgtagaccagttctacaaccggaattccggttctcggaggaacccagaacaccaaccagaattccggttcctacaggctatactgaaccggaatttcggttcagtgcagtaaacttaaaaaattcatatctcatgcaattcaaacccaaaccttatcaaaccttccagacctgttgtaaataccccaaagaacattctcaaagcatgaaaacaacccagtaagcacagaaacacaaaccaccatgtgagctccaagctttgagttcaaaactgaagcttggttaaatttaattaacatgcatcacaacctgcttaaatctactcaaatatgcataactaagcttctgcaaacaacagaaaacaaccacaacaagcacagcaacaaaatcgtcattttaccataaaaaccatagttttgagttaaaattcctagcttaaaatcaactaatcat

SEQ ID NO: 268417 - DNA, 892 bp, Cannabis indica
tgatccctgacaaccatatccatgacaagtaatctcattagttggtgctccaaaaagcaaaatgtggtagctcgatccagcactgagtcgggatatagagctcttgctctagctacctcataaatgatatgtttggaatctattctcactgagttagttatcccagtgtcaactactcctgtgttatgctgtgacaacttaggtgctggttctctagcattgaatccagtttatcatgtccaaaccaagtatatagaaatcgatgttcactttgttcgaaacagagttcttgataacaacttggatgtcgatttctcatactagactgcagatatccttacaaaacctcttcacattcctcaattcaactatctcagagacaagttaacactcaagtccaatgagtgtaacttgaggggatgttaaagatagtgaggatcagttatttttggcttttcatttctgttagttagttatatataaagcctcaagccttccttttcaaaggttgagcttcctttttcactcttctttacattctcacactctcatcgtgtctattgagtaatgtatcttatataggatatggctttaattattaagtttagaaagtatgcatacatatatatttatatatatatatatatgatttttacatttgatgagatgagttatgaattttatataataaaaaaagttgcaactctatattcttggaaagatgaggtttatcatcgtctaagcaagcaatttacagaagtagtagtcatactaaaaacttcaattctattggaaaaccattatgcaaagcagctgagaaataagctgaatcccatgttggacaccacaacacgtgaaaaacgtaattactttattattgtaaaagcaatta

SEQ ID NO: 268418 - DNA, 549 bp, Cannabis indica
ggtgttacatatttaaagtaaatttatttagatattagtaaaattttttaaatatgaaatattataatatttattgtagtaacacataaaagttagatggtatatacttgttttgttcaaatataatatttagttacttctttgttaataatttttaaaagaaaaagaaatgttacttttatcttcttcatcttttttttttatattggaaaaaatatatatgtttcccacaacttaaaatatggtttataattgttaaaagaaaaagtaaccttaaggtatcttaaataataaagtaacatataatacaggctaaaaattaaaaaataaaatcatagttttaaagttatctgatcaaaataagcaactaaatgtgtatgggaaaatattatcttgaaacaaagtaactaattgatatattatttgcatcaaaagcaaccaaaatgttacttttaaaaaaacttgcaaaacactgaaatttgtagaagcgagaattttttagttttttccattttcggtaataattttgaatttcggtatttatgctga

SEQ ID NO: 268419 - DNA, 1028 bp, Cannabis indica
ttacaaaaataacatatttcacatataaatcaaataatgcccctagagtttaatagaatctccaaaattgagaaattataactctaatattcatttctaaatattggggccctcaaataaataaattcataaataattataaaattaacaggaattagtgataattgtctttactaatccaaattactaaagcggtcattacactaataatattactttgactagtcaaactgaagagaagtattatattccaattaattggttcttgttattagtgttatatgcgattgggttcagtcgatttggaagatttgtttttaaattctaattagttggttcttgttattagtgttattagttttaaattccaattactgttattagttggttttatttttttgttcttttatttttattttactgttattaggttaattcctattaatgttttatggggttagaatttttagtttcatgtgttgaaattaattagattttcccattagtcttgtcttttgacatggttctatagtttctctcattgattttgatttattggtttgtggcgttagttactggttcttggttctgggttcgttcgagtatccatggcgtcgagtagttatcaatgaatggaggcaacgtagaacatggcagggatctttatgccaaaatggcatgtgcaacctgaaatagatgaatttattggcataaaagaagctttaagttggattgaccgatattgtggggacaattgatttttgaaactgatagtcaaattactttgtcatcctcttttggtctattagttcatgatgttcatactcttctcttatctttaaataatgttgagttatgttttgtcaaacgatctgcaaacaagctggctcatgttttagccagggattcttgtttctctcctggtcgtgtgcttcaattggagaattgttctaacgaagtgcgttctattgttattaacgattgctagttaataaagttgctaagtttattcacaaaaaaaaaaaaaa

SEQ ID NO: 268420 - DNA, 749 bp, Cannabis indica
ggacggaggtgtgcagagcaaaacggaatgggagtttaggtagtttagccgccaaaaattcagttttggtggttaagtgttacaaaccgtaaagtttaggtggtttagccgccaatatcccaatttaataataggatattaatatataacacatttaattaattttttaatttttatactttaaactatttttttttttatatttttacaaagattcacataataattaacaaaatatcttaaatatttacaattaaaatccacataacaaacacccatatacccatacgtgagctgccaatgtacgcaggaccggccttgagctaagacggaagaagcggcagctttaggcccccaccgctcaggccccattttgaaaaacataaattaaaatatagttagttataaaataaataataatacttttaatgttaattttttacaaaaatactatcacacggagatctttataaaaatactgtatttttataaaacaccagtagaacataaaacagaacaactaaaaacaacagtagaataacagtgaaaacttaacacagtatactgcagtatgaaatttataaaaaaaaaaaaagaaaattaaaaaaaaaaaaaacacagtaaaaagtaaaaataactacctgacaatattttgtaaaaataacaaaattagtataccatctaaaatttactatataattaagtacgttgttggatttagaattcggatagacatgagttacatttgt

SEQ ID NO: 268421 - DNA, 1038 bp, Cannabis indica
actataccgcgccaacttgtcaaaaaacacatgcaaaggacaaaataagtatactatataataatatagttccataagcacgcaattaaattaaattcactgtcttacccttctcgagtcataattacaaaaatgcctctggctcaccaacagggtcttaacatgtcatttatcacattaattcacatgtaattaattatataataatataattctacaataaatacacatttaactagttaggatttgctaatctatgttcttaatctcaagatattacaaggatggtctcgtatgcccaatactacaacactgcaggatagccgtaaaataagtatttagcctccttctaactaactcccttttcaatcttcttaagcatcctattcttcacatctatgtagtctttattacaaatttccatcaacttgttgtacgaaatctttccccacgggtgcttgtagaagaatagaaggttgtcaaccattcttatgacaaaaggaggaacggcagtcttctcctccttaccagtgatgacgcccataacaaacaaggccatccccaacctgtagacatcatcaacttctgtgcagctctcaaaaactctgcatagttggccaaagctgatggaaagattactgttgaaatactccataatcaaccggtttgaacttctttttcttcaatttctttttcagtaggtccgggcaacaagtttaacccagtcaccaaaccaaactctaccctactgaatctgcatctcttcttcgtcaagtaaaaatgtacctcgtctggcttgtcagatttgatcttgtgcaacattaattgatggatcaatgctcctaaaaattgtaatggctctctctcgaagaactgtttgaaaggggattccctcaccctatccaataatctgaattcttcaaatttggccttaatcttcgggtagtaataactactgccgcaccaagtgacacggtctgtgtaatgctccgtgagtggaattattagttgtggaggtctctgcaaaaaaaaaaaaaa

SEQ ID NO: 268422 - DNA, 602 bp, Cannabis indica
aagtcactgtagcgtgccttagtaatagggcgttacaatcttgctaccaaaaaaagttagttaatgtaccaacttgaaattataagttagcctttttaaatggggaattaaaagaagagatgtacgtagagaaacctcaagaatatgttgtcaaaggagaagaagaaaagggtgtgcaagttaaagaagactttatatggactcaaacaaactcctacaacttggtatagtcaaattgatggatactttcttctcaaagaattttgtaaaagcaaaagtgagcaaaccttatatgtgaagaatcaaaggtgtcgtttagtaacacttttttaatcagttttctgtttttaaaattgaaaaaagtaaaaaatatttttcaaaagcatgttctataaaaactgtttttacttttcaatttttaaattgataatcaaaattttttttaaaaaaaaaatcacttttaatatttttttaaacaattttttttcttaatcaatatcttggacttcgatcatgacccggacccaaatcccccacggccctggcgctgaacctggcctctgacttgaacccaaatccgaccccggacctagacccaacgt

SEQ ID NO: 268423 - DNA, 1373 bp, Cannabis indica
aattaattaaataattaatttttcaacttaaatatatttttctacttaattaaatattagaaaatataaattaattactagaaatcactatctagaatatttcattaaactaagtgtgtattcctaaattaatttttaaataatccaatgaaaaattaattttatttatttcaaaattaattttgttgctaattaaattttaattaggctaaactagtataattagcctaatattattatttcaataaggaaaatgggcattcataattggggttgttcatgtgagagagcaatgggttcagtatgttgtgaccactactaatggccccctaactctcatacaaggcccaaaggagaggaatttaacctttcattaaataattgttattcattgaataagtccaatactaattgggcctaaataaaattacttatatcaaattttattttagcgacctagtccatttacttaataaaacttaactggacttcctatatgtatctaagcgcaatagcaaacatataggttcacacaagtcaaataatctattaaaaatcaaatattgttaatttaaaattgatatttaagtttcaatatattaaaaataatatttgattttgaaattatggtttgaaaattgcaaaaattcgaaattggggaaaaatctcacaaaatttggatttttttgggcaaaaaatcaccttgggcgagaaacaggttgcaagcaccctgttctgcgtgcgtaggtgagagatgtcaggggtgggcgacgagttttctcggcaattgcagggcacttcatgcgcgtgctgcatgtccgaacaggtgcaagatgcggcttcagacaaggatttttttcccattctgcgcgcgtaaagggtgttttgtccaggtctctggtgcgattaagcaccatctcgacacccatggccacccaaaatttaaaccttcataacttcttcgtttttcatcggaattgagttctgtaaaaacaaaaattgcttaatttttcacaaggaatcaaaataaattattttcagaacaaaaataaaatgatttttgtggaaaatttcataattcatatacattcatcaaataatcacataaaccaacatgaacacatccaaatcaaaatacaaacaatactcatcgttttaaatccatatttcatgtaagtaaatcattaccatggctctgaggctagttgttgggaatattttaccaggatctagatttactaacaagtatgttgattaagatcctaaatatgaattttctaaaacaattaaataaaatcataagggtttaagaaaatcgtatattaattgcagtgaaacataacgactccttccgttcaagatctctagccctt

SEQ ID NO: 268424 - DNA, 661 bp, Cannabis indica
atatcatgtgtgtgagtgttattattcctctaacacatgcatcacattgtttttttttcaaacagtttacatttttttctttttttaaaaaaaaaacaatgaacataccattgaacaaaaatagaatatttgattacaaaaacaaaagaacttacgaatcctaaagccaataaggaaagttgtctaaccatacaaattgtttatctatctgaatggcatgcacggctaatccatgcacagtcacattgactgttcgacgaacatgaattaggaatactcttagaaatttggacaacaaacttgccaaatcaaccaacaaagatcctagatcattgaaaaaatattgcctcttattaaaagcagacacaactgtaaggcaatcagtttcaacaatatcaacagtatagcctagagaaaaaatccaatccaaagtcatcacagtcgcaatacattctgcttgaaccaccggaaattaaattaccttcaaaaaaacacaaaaacatactgagattaggttctaataaatataattaaaaaataactgatagaattataatttaagtacacataaatatattgactgaagaaataactgtagctaaatatcaataatagtaattgttgggttttgtgccctaaataaaatccattacaatctgat

SEQ ID NO: 268425 - DNA, 563 bp, Cannabis indica
aaaggttcatcatacaaggcctttatttggctttttcgagtcccattttctttagagttttcttataaaggatatttaccgagctcccattgtctattaacactctcttgatccttttgttggtgagctaaatggttattaccaatggatcgacgtgaggatatctcatgtttttctcatcttcctccaggaatgtaatgggaggttcctcggttttcaccttcttggaaggttttggggcaaagatcgaatactcgttctttatatctttcacatatcttttcttggcattattactttcccctgcgatatgtggccgtcccaaaataaccaagatgtcctctcctttcacaggaataggttgtaacccacggttgtttgagttattgggcagactgagctggttgtatccctggccctatcttttcacgtactatttaaaatggcctcaagcgatgagactttctatctcgtctttcaattggcaacattcgtcagttgtaaatatccttatggaatttacaatatttgttacgatcgcttttgctcctcgaattcctcat

SEQ ID NO: 268426 - DNA, 837 bp, Cannabis indica
ttcggaacaatcttctgtggttgagagtgacatattgtcaagcttaatggttttctgaaaaagttgatagtttggagcttaagattgatttgcttcatacttctcagcggaagatttcatctgatttggttgagttgaaagagtttgtttcttacacagtttgtttcttttgctgctcaaatggccacaatgtagacacatttttcttctggtttttgctgattctgttgctaaggtatgctagttttttatggtcattttctagtttacttttagttgtgttcatccgatatttgcttacatttttttacaggacaaagggagtgactcttccaatgatgacggtggaagtgataatgaagaatatattgatttagaggacaatgaagaagcagatgataatgaagaggaagatgctgaaggtgtagatttggatgaaggtagtagtgatgaagaggaggaaggtagtgacggagaggagaaggatggggatgataatgaagatttcgagtcaaaaggaaaagatgataagggcaatgacgatgaatgcgctgatagtgagaacaaggtagataattagacaatgtatctaggttttagttactttgtatgttttattttgttgtaagtctatttagttaatggataaatatttttatgttggtgttatgttgttttataattaagagtcttttttctgtattaatttgccactaatagtcatactcttaatttgtatttcttatgtttttgtaatagttatattatagattatggtgtttgcatttaatcatgatctttttatttttttcttattgtttgttttttagtttattt

SEQ ID NO: 268427 - DNA, 982 bp, Cannabis indica
aaccttttcctaaccgaggccaaaaaggaaagttcctccagcttgagttcggattaggggaaaagtattgcccaataggaagtcgcccaaggctgggaggaggatgtggatccctgacttggtgaaccaaatacaaatgtaaggtgactggaagaattggaagagatagaaatcgactcaaatgtccccaccaggaaactcaaaattggcaaagctttgttgctcggagtaaaattagctttaataaaatttctaggagcaaacctagatatttttgcctagtcacatgaggacatggtcggtatcgatccttctgtaatatctcatgccctaaatattgatccaaacttttgtaatgttcaaaaaaaaaaagaagactattagacaaagaacgagcacaagcattaaaagaagaggaaaaaagctacgtaataacgagttcatcatcgaagctttctacctggcttgggtagctaaccctgtactggtacccaagtccaacaaaaaatggcaagtatgtatttatttcactgatctcaacaaggcgtgctccaaaaactgttttccacttccaagaatagattagctcgtggatgcaacagcccgacacgagatcctaagctttatggacgcctatttgtggtataatcaaataagaatgcatccactagacaaggaacgtatgagtttttgaacaaatatgggtatgtaatgttacaaagtcatgtcgtttggtctaaagaatgctggtgctacctaccaaaggttgtgaatcaaatgtttaaagaccagatcggacaaaatattaaaatataagtggatgacattctcgtcaaatccaagaaggctgggggcatataaatgacctagacgaatgtttcaaaatccttagaaaatacaacatgaaacttaatcccttaaagtgctcctttggagtcaactcgagtaagtttcttggttttattgtcaatgctcgaggtat

SEQ ID NO: 268428 - DNA, 652 bp, Cannabis indica
caccttggataagtgttatgtctgttccaggatattggcaaagtatgctagtatcgaatgtatggagtatacattggattgagtcgatattgaacttggataagatatcataaacttactaatatatctttctaagtcaatatcattggttgatcttaggcagtagatcttaatcttaagatggttaggttcgatctcaattgtattatttatgttcttagagttattcgtgaaagctaaccaacggttcgcctggatacttacattttggcaacatgatagtataactgagtgggagcactaatcatagatttggaatctatagcttatataagaatttagaagcgaaacaatcatttccttcgagcttggcttaatagagattaatgattgagatctcatttcagtaattatattaatttattgaaatatcatttatagttagctaagtgttttaaggataaaatacattgaaaggtaaaacggtaaatttatccctatttgatatagattatctatagaggatatttgactatttggattagaacgatggataattcgtagtgtatatatatcttggtacatgtagagtgttctatataatttagagtgcaattctgaatctataacggcgcaaggaggaattaataag

SEQ ID NO: 268429 - DNA, 624 bp, Cannabis indica
aaaaatctaccaaaatttgaattttgtttcattgaaaaatgatttttgaatcaaaaaatatgtagaaaacaaatttggtgcacaggggtatgcattgcgagcgcggatgggtgggacttgaccgagacatgggctgcacgcagactcaatggcccaggatactcggcgtgtgcaccccttcagacactgagaattctcagtcagctccttgcctgaacgtgggtgttgtccgagtgttgcctagccccgcgcgcatacgtgtgcaaccaaaatcagatattttcatccaaattcgaaaaataataactaattcattaaaaatccaaattgggttctgtaaaagcctaaattcattaatttttttgtctactttccattaaaaatattttcagaacgaaattaaaaatatgtttataacatatattgcgatttccaaacaatcatcaaataaaaccttacagtgagtgcagcggaatattaatggctccttccactcagatctctaacccttgtatcctgtctgtagcagggtatcactaagatctgagcccgaatgtccttttcttgattttggattcttcacagccttacacactatgattgagatgttgggttttatgccct

SEQ ID NO: 268430 - DNA, 593 bp, Cannabis indica
caaacccagactcggacctagacaagaatctagatacaaacctggactcgaaccgagactcggacccttacccagaccgggataaacacgtgggacctggatccggaccgagacccagacccaaacctgggcccgtacccaagacttggactcggaccaagacccaaacccaaacccagacagggatccggccttggacctaaacccaactcaggactcggaccaggtttcagaccccgacccagacctagacctgaacccgaacctgaacatggaatcgaaaacagaactggactaggacctgaacccaaaaatggacttggactaggacctaggacccagacctggatgggtgatttagacccaggaattgggcccggaccaagatctagactcgaacttggaactcaaacccagatctggaccctgactgggatttgaaacccgaacccgaactcggactaggacttgaagctcgacctggtcctagactcgaaccaggacctaggacccagacctggatgggggacctggacccgagacccgggattcggaattggcactgagacccaagacctgaccccggacccaga

SEQ ID NO: 268431 - DNA, 540 bp, Cannabis indica
tccgagaactgcacaacaaagaagcatgaaaggaaattaaggtctcgagctagtacaaaccattgtatggggtattacagctcatatctaaatgattattgtcacaggagaagaagaatgagagctataaactatttgttcaacaacaataaataagagaaacagaaacaaaagagcaaatgtaccttttcatctggtcactcaaaatgaaaaggatttgtatgagaatccataacttacgattcaaggatttgttttaaaaagtgacattatatcagcatactatctgaaaactcccaacaaaagacctaagaaatattaactccattaaatgcataagccaacaagtcaagcagcacagacacttcatatgttaatactctcatatgttgttctatttctttgcatatctagatccacaaattgcgaagagaactatgtgccagatataatcggtatgctaacaaacttcagtctcccaagttttatacatgcctggaagatacaaccaatgccacccaagccaaaaacgaaaaaaac

SEQ ID NO: 268432 - DNA, 861 bp, Cannabis indica
ttcattataacactgttatagaactggttctattttaattataactgatttgagttattttgtgttacttatttttattcattatgttatagaaccggttatatttcaattataactggtttgacttaattgtttttattcattatgttatagaatcggttctattttttgtttacatctgagacatttacttttggtgactttttccggtgacgataacttttccggcaacactaactttttcgacgaattttccgacactggtgactttcccgacgacttttccggcgaactttattattacaagttttattaaatttatttattattttttcccatattttaaactttaattatttttcaatctcctattttttttaccttatttatttatgtcataaaaaggtaaactctattatatttttccatatttataaaaaaaaaaacccttatatttttctctaatttagctaactaataatctatatatatatatttatgtcataaatccaataaccattagctagaataaacttgggtgggaaaacctaaattacctttactttaccactaagcaacctttaaacttatggataaaatggtcatacttaaatactccacataactctgcccgctaaattttagatactaaatcgtattaaagtgacattattggtcaacacattaaatttatactgttaccaggcataaaatataaaaataccgaaattcatatacagtagaatctctatctaagaatacatttaggaccagaaaaattatattctaattgagaggttataactaaatagaagttacactaagaaaaaaaaaaataaaaacactaaaaaatatcaatgt

SEQ ID NO: 268433 - DNA, 531 bp, Cannabis indica
aaggaagtggaactcctcaataatcaacaaacccgaacaaatgaatcagtgtgcaaactgaaaaagaaggaggatactttagacgaattattatctcaagaggaggtttattggcaacaaagatctaggattgattggcttcaaagcggggatgagaacactaaatttttccatgcttatgcatcttcaagaaaatccaacaacaccatcaaactgctgcataacgaagttggtgttgcagttagttcaaagcaaggactgactgaaattatctgcaattttttcactaatctgttcactgctactggaacaaatgcagcagctctgcaacaaattcttcatgctattcctacaacagtctcggatgacatgaactcctccctgctgctcccttttactgccacagaagtgttggatgctcttcgcacaatgagtccaggtaagagcccaggaagtgatggtatgtctgcaatgttttatcaacattattgggatcatataggtacggatgtcactgcggttgttcttgga

SEQ ID NO: 268434 - DNA, 875 bp, Cannabis indica
tttttcacttcacttgctaacaattgtatcaactcattttgaattctatgtcccaaataatgattacgaatatcactattttgaatacgtcgaacatgttcttgcattattggatcaaattcagcaatcatttcaattaaactcaaaaaatttccattgttctcttggtaaattttttcattacttccccgaaaggccaaattattttttgctagatttttgacaatagcaattattcttactaaaacattcctccaatgttctttctccttgttaagtctttcttgagcatctttatcaattgttctattttttgataatctcaattctaaatcaaaccaaacactcatgttaactatatgctcattatttatttcatgactcttcaacatagcacttagatgcctccaatccttagttccactgttgactaattgaaacgtatgattcgcactagattttgtaccaaaaattttgcaacaaaaacaatataccttattaaatttttttgaatacactaaccattttctatcatatttttctccatttgacaactttcgtatataatgagaagtagaaaaatgtctaccattttcatcttttgggaattcgatgtcacttacttttattggaccattttctactaataattcgtatataatctaaattatttttaagatttctagcttccatgctctcttcaatattttcttgacattcttcatcatccatcacatcatcacacatttcattattaacctccaaatttctctatttaattaatgtttatagttttttcatttaaatactttcatcttttttattagtgacaacaaatttttctaaaactcatctctgagagttaattaaacttt

SEQ ID NO: 268435 - DNA, 674 bp, Cannabis indica
tcggtatttgagcggttcgtgaactgaaagattgaactgtacaaccttcatgttataagatcatgcccgtgtctggtgggatatcgtgggccaaccccgggatgttagtgtaatgacctgggaagaatttaaaagtttgtttggagaaaagttttacaacatcactgtgagaacttcacacatggaggattttgtgaagcttactcagggaaagatgtcagtggccgaatatacccttgagtttgatcggctatctaagtttattggtgatctggtgcccacatatttcaccaggaaacagaattatgtgagaggactgaatgccacaatcagtcgggacttgaagattaccacttcagatgacactttgtataagaaagtggtagagctagcattgattgttgaggaggctgagcaacatgtagcaaaagagcagactgcaaaggatgccgtcacggcatcgaatcctcctgctagtggtaatgtcagtaaggggaccgacaggggcaaccctgatcacaaatggaaggttgaggctcccggagcgtcagggagtattagaaagcttcagggaaattgaggtggccgttaaggtcaaggatcctctttcagatcatacctagatattcaaaattcaagattgccattagggtgaatgacgagccaaggctgca

SEQ ID NO: 268436 - DNA, 513 bp, Cannabis indica
tggtgattgggatagatttgattttgttatggaggcttaaaagttgagatttttcatgtttttgtgcctagaaaaatggaattccagttgtttcagggctgttccaaccagaattccaattggaatgtatcggggaaggctgaattttgtttcggccataacttttgactcagaaatccgtttttgacgttatttatatcgctaggaagctcatttcgagctctatatgtttatctatattttgaatgccaattttatattatgtgaaagtggatttagggattaaccctatacttgtgaatcccggaaattgtgactaggattatcgacacctagccaggagcactcgggggtttggaatctccacgtttgcgggacatcaggagagacactagttgcacgtagagatatgcgcggtgaaacttatattgaatattatatttatgataaattataaaaccgagattagtgttattaccctaaagtgaaggatttaatgccatagggttatta

SEQ ID NO: 268437 - DNA, 1318 bp, Cannabis indica
actcttttggtgatgcttggattctgtgttcgttgtagctgcttcttcttcatcttcttcactttcatcttcacttttgacaataggctcggtttgagagtatgcttcttctgcagattgagccataaaataagggggtacgtcatcatcagaagtatccgagtctttagactcgtcactagtacccgaatcttgggactcgttactagtatctgaatcttgggaccaagtttcagaattctcttcttggtcagaggaagaagactgactatcaattcttcatctggttggtggatcatggcaggattatgcacagtttgttgggccatgatttgctttggctcttttcccaataggaatgatgctcttggaggagaattgtctaggtgttcctttttcttcccatttttggttttttgttgttgattttcgtcaagcatccgtctaagtcggagaagtgagtcttcttgcgaagagactgagaagggtgatgtcggagaggtctttggcatggttgagaactgccatggtactgatggtgtatttgctccaaagagtgttgattgaggccccgtaggatatgattctcgttgaaaaaattgcttttttagagattcatactgggttttgagggctttcatttctgcttctttagccaagaataatgacattggaacagagtttgattttatgatggccatgagttcgtcatgcgtctgttgaatcttgttcgtcaacttttcaatgatcgtatcttgtgattgttgtttgacgattgtctctgtgcgggtgatttgtttttctactcgttttaagacgtggttttgggcgatcatattttctgtttgccaattcaatacttcttcggctgctgagaccttttgtaaattccatcagcattcctagttgtaggattttgtatttttggatggtgggaagtggtaccctgatcttcagttttttcgaacctcttgagaggaggaaaatgtgcatcataatcaatggatgagcttgaggtgatcatgtttgcgtcaggaagtgattgaactgattgttgaacagctggtgttggaaatttttctccatgcttcttcatctattttgcttgtcgtttataacaaggaaaaactatcgcaggctgtgaatcttgtgaagcaccatctgaatcccatccggtaggttctggcataggctgattgtagctctttggtgcagaatatttgactatgtagtcgaattttcccgatggttggcctaatagaccgatggttttgtcgcctttttccaattttttctttagtcgttttcctggagtggg

SEQ ID NO: 268438 - DNA, 687 bp, Cannabis indica
tttgtttgattctatttgggttgtggtagatcgattcacaaaagctccttattttctaacaggtaaaaaaacctattcagtggatcagttagcagagttgtatgttaaagaaatagtaaggcttcatggggtaccaaaatccatagtttcggatagggatccgaagtttacctccaagttttggcaaagtttgcagcgggccatgggtacaaactgaactttaaaaagcattccatcctcagacagatggatagtccgaaaggataatacaaatactggaagatatgttgcgagcctcggttatggatgttaagggctcctcgagcaagtatctaccattgatagagttctcttataataacagttatcagagtacaatagggatggctccctatgaactgttgtatggaagaaagtgtagatctcccattcattaagatgagaccggggagaaaaaatacataggtccagaatcagtacagcggaccaatgaggcaattaagaaaattaaagctagaatgcttgcctctcagagtagcaaaagagttatgcagatccgaaacacagagatgttgagttccaagtaggggatcacgtgtttttacgagtatctccaatgaaggggattaaacgttttgggaaaagaggcaagttatgccttagatttacaggacctttcgagattct

SEQ ID NO: 268439 - DNA, 690 bp, Cannabis indica
gttgacgtcagatgtcaacttggttgctggaatattaacttgggcattggaacctaaactgccttcaatataatagtcataacttactcaatttttatctgattgatgcgattcaacttgcgttttgaagctatgtaagcactctatcaagtcatgtcttacactaatcaaaattctgaagctattgttgccaaaattcaccccaagagtgttacaaaaataagctttgggtaactcgaagcgagacccgccaaacaaaaaaaatcagccataccagaaactaatttttatcgttagatcatcatcaatggtggaaaacactttatttgtattttatctcctattttcgtgggcctgcttcacctataaaaggatagctcctttagttcattttacacattcagaaaactacccacacggtcagaacttctctgtatagagtttgatctaatacttaaatagttgctgtagtcttgtgagaaataaaaattcgaagacatagttctattactatcgcgtcataggagtgaactactataaattactatgtctctcttatcaattactttctactttttattctcgccaatttagcaaaaatgtgtgtcttaggagtttagtctagatttttgagtttacttgcatttggagaaatgttatgttctttccagaacataggttaaagtaaag

SEQ ID NO: 268440 - DNA, 2175 bp, Cannabis indica
taaaataatttccaacacttccatatatttttcaagaagaaagatggatctttgcgtatgtgtattgattaccgagaatttaataaattgatagtcaagaacaagtatcctttacctaggatcgatgatcttttcgatgagctttaggggaagacggacttttcaaagattgatctctgatcgggatatcatcaattgagaatctgagaggaggacattccaaagacgactttccacactaggtattggcactatgaatttctggttatgtcctttggattaactaatgctcccgcagcttttatggatctgatgaatagggtattcaaggatttcctcgatatttgtgttattgtatttatcgaagacatcattgtgtactctcagttagaagaggagcatgagcaacatcttcggatggttcttcaacaactttgagaacataaattgtatgccaagttcaagaagtgcgagttttggctatctcatgcgtcttttctaggaaacattgtcagtaaagatggaattaaagtggatctcaggaagattgaatccgtcaggggattggtcaagaccgaaaatagttacagatgttagaagtttcttgggttaggctggttattattgtcagtttgtagagggattttcaaaattttcaacacccttaaccgagcttaccaaaaagaatcagcggtttgtgtggatggacaagtgtgaagcaagctttcaggagctgaaatagagattaatcatagctgcagagttagccctaccttatgataatgaaaagtttgtagtttactgtgatgcatctatacagggtttggagtgtgtactgatgcaggtcgatcgggtcatcgcctatgcctcttgtcagttaaaagaatatgaacagcaataccagactcatgatctagaacttgccgcagtggtgtttgccttgaagatttggcggcattatctctaaggagagaaatgtgaaatttatactgaccataagagcatcaaatatttcattactcagaaagatttgcatatgagacagaggcgttggttagagttggttaaggattatgactataaaatcccttaccatcctgggaaggccaatgtagtggctgatgtcctgagcaagaagggtcccagacacgtaattagtttgattttgatttcacctcagttagcagaagacatggtcagatcaagcatcgagtttgttgtaggaaaacttcataacttgacgctgcaatctgatctgttagagctaattaaagttgcttagttagttgatccaaaattagtgaagatcagagaagaggtttcgtctggactagctaaagagtttatagtgtcaaatagtgggatgctgctatttaaaaccatggtttgtgttccaagtagtataaaacttagaaatgagattcttgaagaagctcatacaactccatattcattgcatctcggcactaccatgatggaccaagaccttaaaccctacttctggtggagcgagatgaagaatgtggtagaatttgtatcccggtgtctaacttgtcaatagatcaaggttgaacatcagagactggcaggtttattgaagcttttgacacttcctgagtggaagtgggaggatatcactatggaatttgtggttggattacctagaaccacgggtatgtatgattcaatttgtgttgtggtggatcgattcacaaagtctgcacattttctaccggtaaacacaacctttacagtggatcaatatgcaaaattatatgtcaaggagatagtgagattacatggtgttccaaagtctattatatcggatcgagatctgaagtttacttcgaagttctggcagagtcttcagtgagctaggggtactaaattgaaattcagtacaactttccatcctcaaactgatggacaatctgaaaggaaaactcagatactggaagacatgttacgagcctgtgttatggatattgagggctcctggagcaactacctgccactgatagaattcttgtataacaacagttatcagagtacaatagggatggctccctatgaattgttatatggcagaaagtgtagatctcccattcactaggatgaatcgggagagaagaaataactgggtcctatatcagtgcaacagactaatgaagcaat

SEQ ID NO: 268441 - DNA, 586 bp, Cannabis indica
acaatttatagtaaatgattgccctgttggatgccaagtgtgagaataacacaaggcagggcaggttacctcatgtctgataaacatgagtgtatagttgattatcgtatgtgagtaaaatgtggactatgagacttgatttatgcatgtgagaacaacatgcattgtgaatatattttatggaatgtgaattatttatgattagtattaagagtaacttatgtcaagtatctagttaggacggttatgtcctacatagctcttcttactgggtgttagctcacgggtactctgtatgcaggtaagggtaaggctaagcagtgagattgaagaactcgaggcatggactataacatccccgcctcaagcctccattaggtccttacacccacggaataatggctcttatacacgagtacgccactctggctacttcatggactgatgactgaccctacagaccaacacaagtgtttcagcgtgcttttcctcgctcgcacgcttcctgggaaaacttgccaggaggtcacccatcctaaaatgctccaggccaagcacgcttaactgtggagttcttcgtgatggg

SEQ ID NO: 268442 - DNA, 735 bp, Cannabis indica
atttttttacgtggttcaggcattaactatccttagtctacgaatccattttattaagctctttaaccggagattgtttatacatatacaaaataatagactttgcccctatttccccgtgttcttcttgaagaagaagaagcttagtaggaatattataaagctaataagggggctacagaacaatgtgttttcttggtggagaaggggtctttggtcttagtgtgagagcacgaaggatggatttgaatcccctctcttgtgcatcagttggaatatttatagggcgactccatggcatgggccatcttggatagatcttcatagggatgaacccccaccgttggattggtaggtggcatattttccatgcggtctttaccgatgtcaggttgtactggctacaccggctgagctttggacgcgtgttttaccgatgtcaggttgtactggctacaccggctgagctttggacgcgtgtcatctcagggccactctcatttgaatttccctcgtccctagctgttggattgcttagcacagtttgtaaggacacgcatgctctgcatggtaacgtggcgtgggagcaaactctgacatcgtacatgggaaaaaggcatggtcagtgggcccgtagcttgttatgcgcggatagaacttccgcaagtcaaaggcgtatcccgaactgatgcatcctggtggaaggctcatacccctcgtgggaacaaaaggtcc

SEQ ID NO: 268443 - DNA, 1066 bp, Cannabis indica
gaaaaagggaaagaagacaaagctgagaaagcacgaaccaatctaagccctaaaggcgttattacgatagaaaaaggtgattcctaaaagaaaacgaagtaaaaataaacaaccaaagcgcaaaaaagagagaatttatgcattgtacagcaaactcaggcaaaatcattccccagaaattccaaacatgcaatacaaacgaacagtaagcgagtgtaaagtgtcctgagaaattacatgaagtttgaagactgggggttggtgttgatcgccggtgaagggaagactggcaacgacgaaggaaaagaagcaggtaatctatggtgtctgaaattttttctctctgtgaaagctctgagaaaatgtggtaaaatggtgaaagtaaccaaatgaaatgagaaggctggcttttataggccagaacaggtgtgagacagctgtgatcgaccatcatcgtacggtcagaatagcaatcgattcgcattctacagatctgacggttgggacaagcgttcatcaaggcggtaggaaacgtttgagtactcgactgacaccaatttaatgcgccgtatcattaaatggataggaaacgaatcgtttcctacaaaaagcgaataactgcagtaatgatggtaataaatgcatccccacgcgcccagggcacgtgctaggaagttaataagacaaccagaggcacctaagcaagcctcatttactttctaccaaacaaggcttgggggtaaattgttgccctttattttgtccaaaatacgtggaccaaccagactgtgacacgtagattgaagaagcaagattttgagatgactcgactaagtctccttaatcaaaaggatcagcatttaacatgcctcctggagaaggcatgagggtttcacatactcccggagggcaaggctataatgaagcacctccaagaggtgtcaaatcctatctgaacagtcacctcgcatttaatgtcgcatgggagaaggcgtatggaaactgccataagtattaaagtatgatggcgtaaacccccttctgcagctattacgctatgattaat

SEQ ID NO: 268444 - DNA, 522 bp, Cannabis indica
tgttgggcttggaatttttttgttacctccctcccatataaagccaagaaagccttttgcatctctaggtcgttagtgggccacttaatgggtacttcatcaggatagttatggggcctttgagaagcacaaacccaagaatggggtatctcaagagattgggctaaggtaggcccgatatcaggtattttgccttctcctacatttgcaaagtccggattgggtaggtccaagtagttgggcccaataggaatagggtctctcacataaccaaagtttcccaccattctgtcaaacaccaccttctacgaattcgtactactatcaaaggcacgatctctgtccttctcagaggaggaggcctcaacacccctcgacattgcactgacagcttcagagtccttcttgcaggccagtgtactatcgtcttctccgaccgatttcctgctatgtcttcttctccatgtccctttttttttcgttttccggtcaatcagagcattctccgatggctctatcaga

SEQ ID NO: 268445 - DNA, 1608 bp, Cannabis indica
tgagttttggggaggcgaacactgaattgaccaggatctgcttcaacttctgtacgaggaccaacctcgtcttcgcgccagcctatcctcttcaagtgactaactttctaactcgagcttcgaggattgggaaatgagtagtgatcgttccccctaccacagaacctgaagttcaacaccacttctactccgagcaaatcgcataagaacgttatggtcgctttgtttgggaactaaagaagggctggagcgttatcttccgtccaactggacgtacattgtccgacctggtttgatgatactcttcccgtaggccgtcccagttctggtaactttggtattcaatagctgtccctgccgttactattgcacggcacacgcatcagtatccgtccaggagaaggatgatggctcgcacaaagcagacgatgcagaaagttaatgcatctgaccctcacgtggcctagcaggccacgttgccaagtgtcgagcaggatctgcccgctgtggaagaggagaattacgagggggacattgaggtccaagagatagaggagcaggacgatgtctgtcctgatagcctttccgaagctgaggaagaaggagtggtcggacctctaaattttggagaatataatgaggttggggagccagtatccacgcagggtgacatcttggtcgagggggaagactatgtcaccgaggagtttaccgaggcggtcccccacaggaggcaaagtgccctaggggccagatgggtgtgccctccgtccaaaataatcgaggagcgattgaagggtttagagaaggttgggtacttgggcggacttgagtgttatttcctttctccgaatcaccgggcaactaacccaaagaaagggttatgtgcctggtccggtgcccacactaagcaaggggcgatgctgcctttgctctagtacttcaagagggttgcggattatttctgcctctgtccgacccagtttactcccaagggcattaagtacttgtctgccatgttcgtcctctacgccattcaaggatggggtgcgccgtccccacacgacatcaattggcattttgatttgaagtctacccctaagcagagcaggtcgaggtacttctacttctctcagctggactgcaagtggctgacgggcaccgtggatatagaggttagcaagattgggagttttgttgatgagtactacctcgtggaaagcatgggaaccacctatactcagttttcaatagatccttgtatattgtcgtccgtccttcacattggaacttagggacaaggctcagaaaattctcctgttgccagatgctgctcgaaatatcactttgttgacctcagaggacaactttgtgaagtacaagctttatccgacagactttataccctagcatgtgaaggagaggaagaagaagtctaggtctggccgggctgagggtattgagcaagagaaggagctcattcaacttaagcgtgaggctaagttaaagggtgatgttggagccaagcagtatgctcaagaatattctaagcaggagaaggaggctcaggaatattcagagtaagagaagttattttaccaggatctt

SEQ ID NO: 268446 - DNA, 1188 bp, Cannabis indica
cgcgttgttttctttgtacgatcaatcattgtatggctgggtacaaggtttggagaatgtccttcactagaggaaggtgggctagaacgaagacgaggatgatcctcgtgcaaaatttgaagcaggtcctggtcgaaccgatgtccgttctcccaaaactcacccgagttcatctacaaaagacaacacacaagatgagtgtttggtcagaatatcgaacaataagcaagaaaatttgccgaccaggagtactaaacagattcaagaacaagaatgttcaaagagaagtcaaaactcaagatgtttgaaattttctcaagttagggaaatttttttcatgaaccttagaataagcaagatgaaagacagacgttacgcagttcagaaaacaagcattatggactgtaaaattgcatgaagccatgacaaagaagaatcgcagaagtttctagacctagggtttcctagatattttctacagcaaagtcgaaggtgcattcaaaatgtaaacatgaaaaaataaacataaaggaaatcagaaacttactcaagagtcagatttctgggttcgagcaacgtcaatccaacaagcaactttgattaaggcagttcagcaaacttaaagccaagaacctctcttttcgctgtgaactcacttagcaaagaaggatggtgaaaatgagtttatgtgccaatgctggttgatatttataggcaagtcacgaaaagaggtaatcatttaaaaggaacctcagacacctcggtttccctccttaaaagcgaatatgggaaataaaaaataatcaagtgcatccgtcagccgtggagggagaaaatcggatttcaaaatattaattgttagagcatttattagccaaaaactgaagggacgcccagtcagcctcacattgagtctcggaggggcgcgcttgacacgtgtccccatccaaaggtagaagcatctcggatgaagtctacacgcaacatcagaagtcccgtacagacttggggggcaaatgttattccaattttttgcactctggtgtggcatcacctgaatggtgacacgtggaatccacttggagcatctgctcgggaagcaagtccgagcaggatgtctcactagcatgcccagagcaaagctttcagcaatccgtgcagagcagccagcacttagcaaattcaact

SEQ ID NO: 268447 - DNA, 1541 bp, Cannabis indica
atataaacaactatttttttttattacacaaagcaccatataatattaatattatactttaattttggggctaaccctagggagtagaggtggttgcttaggcatgcatacgatcaaagattcataatacagaaatgttaattgcaatttcatagtcaatctctacgtccgaaatcacatgccgaaatattaattttttttttcatagtagtgttcgttatatttaaagtatcatccctgtaaatttttgaaaaattctgaatagtttacagtaccgaaaaaagaattcttgatattccagtttaccacacgcattcaacaaacttcaaacgtatattttgttgcacatattgatcgatccgtcgccatgactactggcgctagatataatcaaatttgatcaattaagaatataataaaaaaaaaatatagatattatattatcacaaaattaatcaaatttgtggtatgaaattattattgcttcattcgagtgtatcgtatatttccgaaaacagaaattacatatgtcctaatcgaattcttttttttcccacctaatatatattcccaaatctattgcaattaatttagtttacaatgctaaaaaaattaaatattttgttgcatgcatgatgatattttttttatatatgtattaagaaactatttaaactttatttttcggcatggtaaaactattcagaattttctaaaaaatttacaggtggttctaaaaaactctccaaaatattgaaacaaataatgggtttaccaaaatactcttttagggtcctactacagattttcctaatttttttttatttttataattttatttttattttatattattttatttaaataagtacatgttaagaatttagtagtagtatatatcgtaaaaagtatctacggtgtaacccttaaaaaacggtgcaccaatacaccatttacttctttaacatttagaaatattctttaactatttttttttttcataattgtccacattatagttattgggctaattaggatttttgccccctaaactttaacatgtaccaaatcatgccccttgaacttttctagccgttaaaaatttctcatgaactattgagattgttagatttaaagacttttgtctaatttcattcaattttactatttcagtgattgtttaggtactaaaccatgctccccagactttgatatctaccaaatcatgtccctcaaactttgacatgtactaaatcatgcctcatgaactttcatctatgttagatttttttttttactaaaattagacaaaagtccttaaatctaacaatctaaatagttcatggggcattttaacgaccttaaaagttcagggggtatgatttagtacatgttaaagcttgaaggggcgaaaatcctaattagcctaattattaaagatatattacaaaaaaaatttaaaaaaaaacaaaaaaaagaaaacaaatgttcaaaaatctataatgccccattttaaagatttattcttactctcttatctc

SEQ ID NO: 268448 - DNA, 769 bp, Cannabis indica
caaaggagatgaagagaaaggcaaataaataaaatgacaatgctggtgaagggctctttatcagaggaaagggttcaaagaaggataatagggatcaaagcagtggaaacagaggcaagactaatgccaagttcaagagaagatgttttctttgtaataagacaagccatttgaaaaaggactgtccaatcttgaaagactatatctccaagaagaatgtaaatgcagatgttgtatctgatggagaagatagtgatggatatgacagtgctagtgtgttggtaatctccaaagccaaattagatacaggttggatcatcgattcaaggtgttccttccatatctgccctgacaagaagcaattcatcaactacagaactgtcaacagtggcactgtcaaattgggtgacaatcattcatgtccaattgttggaattagatctttcaagcttcaaatgttagaacatgtgagacatgtcccagaaataaagagaaacctgatcttaatgactatgttggatcaaaatggatactcattaaaggttgaaaatggctcattaaggtgacaaaaggatcaatggtggtcatgagggctactatgatgaatggcatctatgtattgtagggtaatacattcagaaatcaagtgaatacaatggctccaaagggtgaggaaccaactctaatctggcataaaagaatgggccacatcagctatggtggtttgaagattctgagcaaactttgagtatttggcaaggatcagata

SEQ ID NO: 268449 - DNA, 1037 bp, Cannabis indica
gcttgtgagaccatgggatctgccaccaccatttgcactgataaaacaggtactcttactatgaaccagatgaaggtcaccaccttttggcttggtaaagattctgtcgttgaaaattcttactcaaagatcgcaccatatgtggtagaattatttcgtgaaggaatagctcttaataccactggtagtgtatataggccaagtttgggagcagaatttgaaatttcaggtagtccaacagagaaagctatactttcttgggctgttgaagagttgaatatggatatggaggaagtgaagaaaagttgtgccattcttcacgttgaggcgttcaattcccaaaagaaacagagtggggtatcaataaaaagaaagacagataatacaagatgggtacactggaaaggtgctgcagaaatggttttggccaagtgctcaagctactatgatgcttctggaatcgttaaagatcttggtgaaaatgaaaaaattgtgtttgagaaaatcattcaagcaatggctgccagcagccttagatgtattgctttcgcacacaaacaagttgaaactacagagaatgaaagcttagagggaaatgatcaaacgattgaagaagatggcttgattctattgggcatggttggtattaaggatccttgtcgtccaggagtgaagaaagctgttgaagcttgccaaaatgcaggagttcacgtcaaaatgatcacaggtgacaatgtattcaccgcaagagccatagccacagagtgtggaatccttaagctgggccaagacatgagtggagcagttatagaaggtgttgagtttagaaactactcacaggaggagagaatggaaaaagttgacaaaatctgcgtcatggcgagatcgtcccctttcgataaactcttaatggtacaatgcttgaaacaaaaaggtcatgttgtagcagtcacaggagatggcacaaatgatgctccagcattgaaagaagccgatatcggactctcaatgggaatccaaggcaccgaagtggccaa

SEQ ID NO: 268450 - DNA, 744 bp, Cannabis indica
gggcataaaacccaacagctgctagccttcaggacttccaaaagcgagtccaaaaatatatcaaccttgaagaggcccaaatagtggcttatggaggatactatcccaccgggatagcagggtacatgcccggagcaccgccctcgggtactgtcccgactgcggctcctccattgagcggtatacagttctcttccactcccggatatagtcagggtcaggactgcgctaatattatctccgctccaaccgctagcctggcaggcccttcccagggctcaaggagtaaatgatcctccaaaggcagcacccgcacgaaggagaaatgtcagaaaagggtgtacactcccaatacaccaagtacacggagctgacggactcccaagagcgtgtgtacattgctactaggcaaaatacgcactaccggagaccacctccgttgtacaaagatagctcccggagggatccaagcaaaagatgcgagtaccacgacgacattagtcatagcaccaacaaatgcaagaatctcaaagacgagattgaaaacctgatccgattgggccacctctatgagtggatcaagaatcggctaccacacctcaattcggaccaggcgacaggggttgtgccccaaggaacaacggggggtgcagcaggagtattgggttttaagccctaaataaaactcctttcaatataatcagatttacttattaatatagatcagaaataacatttaatgtt

SEQ ID NO: 268451 - DNA, 621 bp, Cannabis indica
aaagagttttatttagggcataaaacccaacatacatatatcctttaaatggagtagtattttgaaggttatgtcatcaaaatgtggtgttccaacaattctagaaaatttggtttatttgagtaattaggcaaatctttaacaactgttagttttcatctttttcagggggtaaaggagattgcttttatattgttggaagtggagaatttgaggtctttgaaacccaagtatcattttcatgctcaaataatactatattatctttccccaattcaggcattttgttgaccagatgtaattgcatgaaatattttttggttaattcttgctcttgatattatcatactaccctgaaaagttcattcctttatgattgaaaaaacaaatactcagcatatcattcttgttcttgatattaacagttgtatctttattatagattttgatggaaaaatggtgttgtactctcattttaaaccttttctttttgtaacaaattggagtaaatgtatggatgcaactcgtatgatttgtagtaatatatacaatgaataagggtttaattttgcgataacgaaaaaattatttgtaatgaaaactttataaaataataactaa

SEQ ID NO: 268452 - DNA, 652 bp, Cannabis indica
gcatattgatgaaaaaatttggtattttgatctcctgctttcaaccactgtattctagatctttgctgccagaatatttcttctttttctagtaaatctgaaagttgagattctaactcattaacttccagatgatcatacgcataactatccttattttcagcttcagctaaccttcgcttagtattctgaatatccttaggcagcttgccatacttcttttcatgccactcacctaaactttgagcacaagaggaaatgttatggagcataacctccgtcacagaagaagctggagtggattcccacgaggatgacacaatttgatgacactcaggatctatactccacatagcttcatatcgaaaacgtttgcgtttacgggagaaagaactgttgccaacttcaggaaggtcaccaattgttaataaaagtggtctatgatcagacccaaaaaagtctaaatgtgttagactagctaaaggtatagactcttcccattcagagttgatcaaagcccagtctaaacgttcttgaatagtatccgcaccagagctaaacttccatgtgaaccgttcaccagtataggtcattggggagagagcacagtctacaatagcttccctaaaaagatccatttgagattctcttc

SEQ ID NO: 268453 - DNA, 808 bp, Cannabis indica
atggcttaacgattaagtgtgtcgaagtattaaacaatccacggcaaaagcattctgaatgtcccataatgctatatatgaaatagaaaggaaaatttgaatttatatgcatacatttggtctatattaaatttttgaacacaagcttactaaaattaaaaaaaaatggcatattttatattcatacacattatacccttctctcttatcttctcttctaacttcaccatccatactctctattcccgtctatattgatggtggtccgatgggagtcagatggtggcccgatgcttaccttttttttttttttatttttttacaataaaaaaaagtaacttcagaccatcatcggatcacaatcgaaccatattctatattcaaaccatcaaattttccttttgaaaatccactacacccaaattaccacactacccccacactataacttcaatacaattaaccccaaagggcattatagtaatttcactccaaaattcgcctactcaaaaacccacctccgactcttcccaacaccacactatttacaacatgtctcccaccgtccaatccaccatgacacaacacccaaactaccaaactatcctcaccacaacttcaatttgcttactttattctcaagggcattatagtaatttcacccacaaatccccaactcaaaaacccacctccgactcttcttttcccaacaccattactcaacactcaaattaccacactaccccccacactacaacttcaatatacacttaccccaaagtgcattatagcaatttcaccccaaaat

SEQ ID NO: 268454 - DNA, 662 bp, Cannabis indica
tccatgagttggagtactcatggacattatcaggccaaccaagtagtacatttaagaagctgccagaagttaacgggtacgtttccattggcttactggtatgccgcttgcacgggacgtggccaaaactttccagagacgttgtggtgcaccttggccacgagccttaacacgaaataacacgggtagtcattcgtgggctagtttgtatacgcgcatgggacggatggaccatgttggaaagagacagaggtctagcgtatgctactagtttggtggcttgtctcgagggcctgccaacatgcgtggaggcatggcgccttgagggttggtccatggacgtatgggagtccttgggcgacaaacaagactgttcggacggtatggaatggggcatgatagaagcgttggcacgttggcttggtgttggcatcttgccacacatgctaccttggtcacgagtgacaaggtgagcgccggtgttgggagttgccttatcatagtgggaacctatagacagtgcgagtaccttggctagagagcctcgatgcatggattcactcatggatgcttgcgagcatgactcggtaggagttgttcgagagacggaagtgtgcacgaggcacacggtcgcgtaaaaaatgagcccactgttactcgga

SEQ ID NO: 268455 - DNA, 672 bp, Cannabis indica
ttaactaaaatgtattacacgtgggatcctaagagatttatcctctcaacatataaagactacgtacaaccttatttcggcacacgtatatagcatatatcatgcacataagttttgaccaagtgataaaagaatcatagggagatcactacggtgaatgtgacttttagtttgaaaatttattatttattttaactttaactataattagtgatgtagttggtggagagcgtgagtatggttagttaaagtgttatatatatatagaaccttagttcctcatttatcacttcaaagccaaactttcaagattactctctctcacacacacactaatgggtctatacgttcttctctctcatccttcacattctatctagaccaaagtttgctactctacatcccatatcttgttccacaaaagctctataaacagatcagccaccaccatcatataatcccatgtatatattttctctagattaaactatcactatacatcatcatctttctctcatacatatatacatatagatatatatactggcgtcaccatcactatttttacattcaagttttagtgctcaactagatctcattggaagctaattaaggtatagcattatatgatttatgttgtagactcaaggttaaagtttcgtatagatatat

SEQ ID NO: 268456 - DNA, 671 bp, Cannabis indica
cagtgcaaattctggataagaaataaaaggtccttcaaaccagaaccataacgttggttaaagtactcaggaagaatagtaaagtggaagaagccactagggaattagagtttgatatgagtactcagcatccagagttgttcaagttagatttcggcggcgaaatccttttaacgggaggataattgtaaagactgcttatgatgaacactttggattaataaataactagggtttattcatgagattaaatattatttataatatttcatattggtgaaaatttatttaattgcaatatatgttaaatatgttatatgtgactttcttgttttctggtgctcgagcttggtggcggtggaaagcgacgctgggccgattagagagtcacgtttggtatgtttttggatatatcggggatttgtcaagagtggtaaatgactaaactacccttagttggtttaaaccttgtttctttatttaagtaaatgggtaattggctaagtggtcttttgttcttatgtgggggattatattgtgtgggaaaatttgatattgggttgtgaataaataaatcaaagaacaaaagtcaatattggagaagctagaatcacttttgttccattttcacatacctctctcctctctctctctctctcgaacttcattag

SEQ ID NO: 268457 - DNA, 2017 bp, Cannabis indica
ggatgaggcccgcacaaaacaaactatgcagaaaattgttgcgactgatcctcacgtggcttggcttgccacgatgccgagcgctgaacatgcccggcctactgctgaggaggaggataatgagggggacattgaagtccaagaaatggaggaccaaggcgaggtctgttctgatagctcctctgaagctgaggaggaaggagttgctcgacctttacgcttcggaggttacaatgaagtcgaggaactggtgtccgaggttggtgatgtcctggagaaggcgatgattacgttactgaggagtacgctgaggcggttcctcaaaggaggcaaggttccttaggagctcagtggatgtctcctccatccatagtaacccaggcccaattgaggattttggagaaggatggatacctgggcggtgtcaagtgcttcttcctttctccaaatcactgggcaactagcacaaggcaggaatactgtgcctggttgggtgcccatactaagcagggtgcaatgctacccttgcatccgtacttgaagaggattgcggactatcaccatctctaccgacccagttcacaccaaagggcatcaagtacttatccgccctgttcaacctctatgttcaaggatggggtgagccgtccccacacgacaccaattggctcttcgatctgaagtcaactcccaagcatagtaggtcggggtacttctagttctcccaaatggacgagaaatggctgaagggtacttggactcgaagtcaacaaaatagggcatggatactgcccacactcggtttcagcaaattccctcgtactaccgccctcctttcacattgggacttagggaggggcacaaaagattctccaaatgccagaggatgctcgaaatatcactaagttgaccactgaggacaactttctgaagtacaagctcttcccaaatgattttgtgctaaagcccgtgaaggagaagaagaagaattccaagccgaactaagctcatgatgccaagcaggagaaagagctcattcaactcaagggtgaggctaagttgaagggaggtgttggggccaaacagtatgctcaagaatattttagagcaggagcagtacgttgaagaatattcagagcaatagaggtcgatcaagaagaagaagaaggctcccccgaccgagcaagcacctgttgaacacgctatcaagattaggcaacctagtatgcctgctcggccatcaacccatgtaaagggaaaaggaaaagccgttctggtggagcaagaagactgtttagatgatgatgctccatctgtgattgttcgagaaaatgcctctgcccgtgtgcagggtactttaacttgcatttacctctcttattttatgcttttcacatattttatgtctgcttctaactgcattgttttatctgtgcagaaatgtctctgaagatgatctacgcctaaaagaagagagtaggagacaactcaggcatgctcctccggcgaaaagtttaaaggcagtgagactccatccaaggagaaggcgccagttgataaggtcattgacctttccgaggagagacccgtggtggaccttccagttcagaaggtcttgaaatccaagagttccagaggagggagctcggacgggtctgaacaagctaggaccccttcaacaaccgtggcactgtgcacggaggttaagaggggcaaagacatgttctaatactatctgatctggtcacttcccgaagtgagtgatcagctgtccggagcagacatttaactatacttgggactagtcctaggaggagtcctgaaagaagctactcaggtaaatatctttcttttttatttcattctcttttatgtagctctgattttaacacgcttgctgtgcaggtcaatgtgaagatgacttatgcctattctcgagtcaaatcagttactgctaagaaccttgccaccaccaacacactgcagagggaggtggatttggccaaaaatgactcta

SEQ ID NO: 268458 - DNA, 2985 bp, Cannabis indica
atcgagtttgttgtaggcaaacttcttaacttgacgctgcaatctgatctgttagaacgaattaaagctactcagttaactgatccagaattagtgaagattagagaagaggtttctactggtcaagctagagattttacagtgtcagatagtgggatactactgtttaagaccagggtttgtgttccaagtagtgcgaaacttaataacgaaattcttgaagaagctaataccactccatactccttgcatcctagcaccaccaagatgtaccaaggtcttaaaccctacttttggcggggcaggatgaagaagaatgtggtagaatttgtatcccggtgcctaacttgttagcaaattaaggctgaacagcaaagactggcaggtttgttacagcctttgacacttcttaagtggaagtgggaggatatcaccatggactttgtggttgggttgcctataaccacgggtatgtacaattcaatttgggttgtggtagattgattcacgaagtctgcacattttataaaagtaaaaacaaccttaacagtggatcaatatgcagaattatatgtcaaggagatagtaagattacatggtgtaccaaagtctataatttcagatagagatctgaaattcacttctaaattctggcagagtcttcaacgggatatggataccaaactgaaattcagtacaacttccatccttagactgatggacagtccgaaaggactaagtggtaattagtaagttattcttgatcgcgatctgaccagactagctcttggttgcgcaggctgttctagtagtatggacactaggtgaaacagcaggagttagggtaactcgatcggatccagtggcggtcagggagttcagattccccaaatgttcatggctgaggtagaggccctagaggcagggcatgcggccggggtgatgttaaccagccgcaggctgtccaggagtgggaaaataggtttacaacaatgcaagccagaattaatgagcaagaggaaaaaatcagatgtctgaggcagtagggtactcctacagtgcctgctccagcaatgcaggtagctcctacccttatggtgtaggatggactggttgttgcagtgaaccaaatggaaccactctatgaaaggttccgcaagcatgcacctccagtcctttttgggaggtctcgatcttatgaaagccaagcagtggctaatgattattactagaatcctaaatttcatgggtgtcaccgacaatgacagagtggtctgtgccacattccaatttcaagaagatgctccagtttagtgggacatggtgtccttaacttatgatgtaactgttatgacctgggaaaaattccaagagttgttcaatgcaaattactacaatgaagcggtcaaaagtgcaaaaagaaaagaatttacccagctgacccaaaaggagaatatgagtgttactgaatagacaactcaattttatcgattggcaagattgccctcgagaattgtggcaaccgattttagtaagaaagaaaaatacctggctggattgaattcgaagataagacatgatcttatgattaccactaatgacaactccacctatgctaatatggtgggaaaggaactgcgggctgagagcgtaatggagtgcacttaggagtctcgagggactgatgttattggtggggctcctactcgtcctacctctggttatggtaggggtggtagtggctcaaccactgatcataaacgaaaggcactgactagacccgatggcctaagtcagaataagaggttccgagggaaccagggacgaggaaactgtgagggtagttttgaaaccagatacacttacccagagtgccctagttgtaaaaagcatcatctgggtgagtgtagggggcaaggatgtttccagtgtgggttgccaggacactattaaagagactgcccacagcttaagaaagaagaatagaagactgatggaaaacccgctccagcaagggtgattgctttaactcaagcagatgtaaaggctagcccctcagttgtaacaggtcaactctcagtcaacaactcttacttctctgtattgtaatattcagggccactcactcttatgtggcagccataatttttagtaagttggaacgaccgcaatagttatgataaagggtttggaaccatactgcttggcggagaattagtcatctccaaaaggtggattagctctatgccgatcagaattgaggatagggagttgagtcctgacttaatagaaatgggtttagcggattttgacattataaatggaatggatttcttatccaagtactcagctagtattgactgtatttggaagatggtgatcttccaacctgagggcgaggaaccgtttatttttgtgggattagtttagggatcccagatcccagttatttcagtattaatagctagagaatagctaaaagatagatgtttagggtttttggccgtggtattggataccacacgacctgagatagttctgccaggggatattagggtggtttaggaatttctagatgtttttccagatgaacttccaggtttaccaccgcaaagggaaataaattttattattgatctagcacctagagcagaaccggtttctaaggcaccttacagaatggctccaacagaacttaaggaattaaaaattcagcttcaggggttgcttgacctagggtttacacggcctagtgtgtcaccctggggagctcccatattatttgttaagaagaaagatagatcattacgcatgtgtattgattaccaagaattgaataaacaaactgtcaagaacaagtatcctttacctaggattgatgatcttttttatcaagttaaggggaaaacagtctacgagaacataaactatatgaatttttgtttatgtcttttggactaaacaatgctcctgtagcttttatgg

SEQ ID NO: 268459 - DNA, 1090 bp, Cannabis indica
taaatcccttaaaatgctcctttggagtcagctcgggaaagtttctgggctttattattaatgcccaaggaattgaagccaatcaagagaagattcaacccctcctggatatgaaatcaccgacaagaaccaaggaagtacaaactttgactggtcggatagccgcactcagtagatttttttcaaaatcaacaacgaagtgtgttccattcttcaacatcctgcgaggaaataagtaatttgagtggacagaggaatgtgaaaaagcctttcaggagctacaaacgcaactcgcaaagcctcccgtactctcaaaacctctggacggagaagaacttgggatatacttagctatcacggagcatgttgtgagtgtcgtgttgattagagaggaaaacaacatacaacacccgatttattacattagtaaaagactcgttgaggccgaaggccgatacctattgatagagaaactcacttactttctaattctagtaataagaaagttaagaccctatttttaggctcatcttgttcgggtgtacactgaccaaccattacggcaaatattgcaaaagtcggacgcctctagacgattgctcaagtgagcaatagaactgggttagtatgaaagcactttccaaccccgaatagtaatcaaaggccaggccctatagactttgtggtagaatgcacaggaaaagaagaaagcatatcgaaaggcaaccccgagccagtacaaatacctcagccatgtaacattgaagacaatccgacttggaaaccacatgtagacgggtcggctacagatcaactatccgatgtaggaatcatcctagtcaaacctggggggcaacacctacacgctacagtcaagtttggatttagagcatccaataacgaagtcgaatatgaagctttgatcgctggcttgaacctagcccgggagatgaaagacgaacatatcaaaatctacagtgattcgtagctggtggtaaatcacgtatttggagaatacgaggctcggggagaaaagatgatagcatatctgggcaaaatacatgacatgcttgcacaatttaaaagctat

SEQ ID NO: 268460 - DNA, 911 bp, Cannabis indica
tataataagaaaccaccattaatgtggataccaaactttctcttcaagctttttatgaaatcaccaaaatattaatcgagatttttgacaactaattaaataaataaatatttagagcatgaaaaggaaaaagaatatggggaccacaatttttacgtggttggagcattaatgaaccttaatccacaagccacttatattgatatgaagaagatggagttctctctctagaattcaacaacatttttgcataatacgagtgagagagaaagagaagagtctctttacacgtgatcctatgattctatttataggcagacatgaagtttatttcttttattcatctaaatgcttcacttgatggaaggaaatacattgatagacataaaaaaaaaattaattgttggcacatagacttgtcttgtcttgtctcttcagctttattggaaagactttctaacatgtcacatcaacttattgatagctgtgtcagctagtgggtggaccatcatttgtcattgtttgacaaaaattgagacaacattattaaataactctttttcgtcaattgtgcactaacgcaagctagcgttagttataaagcgacgctagcttgtgtcggtgcataaccgactgcaaatttcttcattaactttttctgtcaattcctggctttgactgttgtgttgactgacgaaaaaatcttcttttgtagtagttttaattagtagttcaatgaaatattaatagcttgaaaagtttaagattaggtatgatttgatatatgtgttaaaattcaagaaaaaaaattatataatagaccacaaatttaaaaaaaaaaaattataaaaatatattaacacgaaaaaaatttatttttacgctttaaatttttttatttccaaatatac

SEQ ID NO: 268461 - DNA, 524 bp, Cannabis indica
ttaacaatcttaatagtttagggggaaattttagcggccaaaaaagttcagggggcatgatttagtacatgtcaaagttcgaggggaaaaattactaattagccttttgtcttttgtgattgattattttattttgtagttttactcttgtttacatgttttagtgatgattttttatgttatttttcaagattgaaattttaaatacttaagttttgactggaaaaataactattttttggttgttctggtgttgctctggttgttcggtccgtaagtattgaaaatgaagactttgtatgtgttttggagtgtgtagagtataaaaaaattaaggcgtggagagtatttttgtaaaaaaaattgtgtaacagtaattaaaattataaaattgcccccaaaatctaatatttttataaaatctcaaaaaaaaaaaaaaccattaggggtgttcataaaaaccgaaaaaccgaaaccgaccatcaaaccgaccagaccgtaaccgaattttcggttccacgtca

SEQ ID NO: 268462 - DNA, 670 bp, Cannabis indica
tgtgatatatgggctcacctaattaagtgatgtgatttcctggcgatgtacttggtgtaagtacgggcgtcagtgatatatgatgagtatcgagcgtaggtacgagctcacctaattaggtgatgcgatttcctcgtaatgtactgggcgtaagtatgggcgttagtgatatatgatgagtactaagcgtaggtaccagctaaactgattaggtgatgcaattttcctggtaacgtactgggcgtaagtacgggcgttagtgatatatgatgagtaccgagtgtaggtacgggctcacctgattaggtgatgcgattttcctggcgacgtactgggcgtaagtacaggcgtcagtgacatgataagtaccgggcgtaggtacgagctcgtctaattagacgatgcgatatattggtgccagattgtggcacgggctcacctgattaggtgatgcaattatatgatatatgggtgcaggtttttgggcataggctcacctgattaggtgatgcagttatgcgacatatgggtgccaggctatggcatgggcttgcctgattaggcgatacaatacaagatcatcagattaaagcatcgacttgcctaattaggcaacatgatgtcatgaagatggttgctttatgaggtaacatatatattatttatatga

SEQ ID NO: 268463 - DNA, 470 bp, Cannabis indica
tccatccaggtatttttctttcttactgaaatctatttgcataattctcgaggccaacctagccaatcgttcgaactgggttgtatattcaataacactcatattttctttctgggtcagtcgagtaaattcctttctttttgcgcttctaactgcttcattaaagtacttcgcgttgaacaacccctagaacttttcccaggtcatagtggtaacatcacaagtcagagacaccatgtcccaccaaactggagcatcttcatgaaactagaatgtggcacaggccactttgtcattgccggtgacgcccatgaaattcaaaattcttgtaataacagttagccactactcgactttcattacgaggggacctcccagaaagacgagaggtgcctgcttgtggaacctttcatatagtggttccattcaattcactacaacaactgtcctgcttgcacagtaggggcagg

SEQ ID NO: 268464 - DNA, 475 bp, Cannabis indica
tatatatatatatgaaaggtagaagaaaaagagacaacaacatatctatgacatttacgattaggtcatataggctatgacagacttcgcaagttaactaaagatggttcattgaaaaatatcatcttgggtgaattaccaatttgtgaatcttgcctaaaaggaaaaatgactaagcgttctttctctgcaaagggagagtgtgccaaagaacctctagggttagtgcattcacatgtctgtggacctctaaatgtaaaagccagaggaggttatgagtactttgtcactttcattgacgatctctctagatatagttttctttatctaatgcaaaagaaacctgaaacgtttgagaagtttcaaggatttcatgctttggcccaaaaccaattaggtaaaacattaaagatcttgcgaactgataggggtggagaatatatggatatgcagttcaaagatcatttaattgaac

SEQ ID NO: 268465 - DNA, 720 bp, Cannabis indica
tcagggtactcctgagcgggtgcatgcaacaactccacctttgcccgtgcttcgagaggccaacaagggcgaggagatgttggcccactatatgatctggctggttcccgaggtcagtgagcaactggctggtgctgatagtgactcatctctgcatgtggttgtgggcggagtcttgaaggagttcaccagggtaagtcttttttgatacttccctttaactttccacacttagctccatatgctaaattttttcctttgtgcaggccgatctgaagttggcctacacttacttccaggctaagtctgttgcttccaagagcgcggctctgtccgacaccttgaaggcagaggcagacttggcaaaaaaggacgcagaggaggccagggcaaaagctggagctattcggttggagttgggcgaggccaacaagaagctgttcgctcccgagaagaagatctccgtgctgacaaaggatctcgaagctgctgatcgctttgaggagaccatcgagaccttatctgttgaagtaaacagtcttcaggatgagaggacttctctgcgagctgttcttcttcggatgaaggaggagaaggacgcctaggtgggggagcttacggccaagggggacaagttgaaggagaaggtcaatgccttggagacagccagtcttgagctcttctttatttttggaaggctaatccccaggccaactttga

SEQ ID NO: 268466 - DNA, 564 bp, Cannabis indica
aaccgggcaagtttttgagctctatccctaagagcaagggtgacggggggacagtgatatgtcgaaatctgctgaaaccaagtccgcgtgatgctcagatccttcaccatgaagtactcatcaacaaaatgccctattttactgatggccttgtcatccgtgccgctcaaccacttgaagcctagccgaaagaagtagaaatactccgacctgccttgcttgggggtagacttcaagtcgatgaaccagacgacctcgtggggggaaggagcatcccatccttggcaagcatagaggatgaagagagcggacaaatacttgatgccctttgtagtaatccgggtcgggcagaggccaaagaagtctgccacatccctgaagtacttatgcaagggcatcagcgccccttgcttgccgtgagcccccgatcaggcgcacattcccttatcaggatttgtggcgcgattgtcgtgggtgggatgtagcagtccagctcgcccaggtacccgtcctggtcgagagtgtggaggtgtgcctttgaaatattggacggaggacttaccc

SEQ ID NO: 268467 - DNA, 791 bp, Cannabis indica
ttatataccagattgaccattcgttcaaatataaaagtcttttccatcattaccatatcactatatgtaatctaggtaatcttccttaccttagtgataccactactctcccttatgttattttatacgttaccctagtaatgtccccacttcaagcctccatttggccccttacacccacagaataaaggctcttatacatgagtgtatcactttagctgcttcctggactgacaactaaccctagagaccaaactaagcaattctaacgtgcttttctctaactcggatgcttcatggtgaaactccccaaatgaaatcactctagatcaaaaatacttagccatggagtttcttcatgacaggctaccaaaacaagatgtttcttgctaatataggtggtcccaagcaatccattcaagtcctcaaccattatgtagttccacgcatacataatctctcaatcactacatacgacccttcccccaagcgacgtgggattgtacagttcttggtctttccttcgtagatcacagggctctgattgtcacaacttgactcatgcctctggtagtgaatatatccacccatacaatcgccaccttcaattcatctagggtgtcgaacaatactcataaattgtcccacttatactaacactagatcacttttattcaaaaaattccattctacaaatcaattagatggatatcttgttaggttttatgccctaaataaaactccatttcaatgtaatgtattttattcaacatcaataaagaaacagaagt

SEQ ID NO: 268468 - DNA, 1093 bp, Cannabis indica
gataactaatcagattgtaaagagttttatttagggcataaaacccaacaataattaggtaatatatagtgtttattatgtgatttatagctttgaaattgtttgcttgaagttggagtttatgacttggttgtgcaagtctttgatgatggagttgtgttgatttgagctcaaggtttggagcttagtttagatattgattaatctgattcttgagggtctttattgttggatttgtttggggtgattttggtgtgtttaagcatgaaaattcgaagctagtttttggggttttctgggtttggaacctaggggtcgcggcccgcctccagttgttggcctgggattcgaacccaggtgtcgcggccccatgtggggagtgccgcagcccgcccttcatttttaggcagatttgaacgcgttattcgaatcctcataactttgtgatccggactccgtttctatatattgttagaaagctcgttccgagctctatgtaaatatctatgttttgaatgccaattttatattatgtgaaagtggaattagggattaaccctatacttgtaaattccaaaatttgtgactaggattaccaacacttggtcaggagcacccgaggatttggaatctccacgtttgtgggacatcaggtaagacagtagtgagcacgtagagttatgcacggtggcgcttatattggaaataatatatgtgagtaattagaaaccgagattagggttaataccctaacatgagcggtttaatggcctagggttattaccctagtgattattaatgtgtaaatgctatgccatgtcaattatatgtgtatattgagatttagggttatgcgttcaaggcgtaatcgagttggactcggtaactagaactgagatgaaccgttctaaggccttattgtatatagacgtgtgagcgcaacacgtgggtctatgccacatagacataaataggcatgtgagcataacatgcaggtctatgtcatacatacatatgtgaaattagggatgttcgcagtgcgggtgtgcggtttttgactattttttcaaatcaactcgcacatgcagttttt

SEQ ID NO: 268469 - DNA, 631 bp, Cannabis indica
ttgttcatccatttcttcttattttgtttttattcttgatcttcttttattgtcacttgcattcttgtttgtcatgagtttcaattggtttcaaatcaattaatttaggggtgttcagtaatatttttatttttaattcttttaattataaaaatgaaagtaaaatttgtatttttataattttatttttaaaaacagaaaatatagcgtgttctataatttttatttttgattttatttaagttaggtctaagtttaaaattgggatcggaattgtggttcatgttcgtgattggagctgaggctggagtctgagtcccaagattcaggttggggtcaagttcaaaatatatatatatttttttattattaaaatttaaatttttagttaaaaagtgaaaataattttataaaacatatttttagaaaatattatcatttttctaattaaaaaacttgaaaagttaattaaaaaaatattacaaacgaacttttagtttataaaaataaattttaaatccacgtgagaaatggcaaaaaaatttattatgtgttataaaataatataaaataatataaagtagatgagaagaaagaagaagaagatgaagagagaaagagaaagtgaatg

SEQ ID NO: 268470 - DNA, 581 bp, Cannabis indica
ggtctgtgtcatacagataaataaaaaataacattaatacttatgtgataagttaagtatgattattgatattttatactgtcctgctgcgcttggctcacgggtgctctactgtgcaggaaaggataaatctgtctctgatcagccatgagtgcgggagctgggcgatgtatgtacatgttcgggccacactagaccaagcgggttggggtctaccagtgatgaattgttataactttgttttgccatttaggtcagctattgagaaagacttgtaatattttctaaaatatttttgggatcccaaaacaagcaatttagttgtaaagttaaagttattacaagttttattttcattctgatttcatttaaagtttaatttctcgcgcttattttagttagtaatcccatttaggggattagggttccttaatcatgttgggtagcgtgcctaattgttagggtgttacacctttatttgttgaattgttgctgaaatttttctgggtttcctcctctcatagccgaaccccctttccctcttaaactatctctttctttgattgaatgtgtgagttgtt

SEQ ID NO: 268471 - DNA, 487 bp, Cannabis indica
ggttgttgaagaagctgtcatggttggttgggcaatttggaaggctcagaatgatatactttagaatggtaaaagttgtagtgctgctgaggttgtttggctggctcgaaccactcttcgacaatggcagcgtgctcagtctaagcgattggactcggtctccctagcttccaatcgcgctgacacaagagacctctggtccaaactggctgctggacagttaaaaattaatgtggatggggcgatttttgaagacacaaattcggtactaggtttgtagcacgcggctatgatggtcgaatagttgaggcgttttcaactatttcaactatttcaactaaaataatgttataatataccatttaataacatgtgaaaaatgtaattaaatgtcaatacttttaattacatgagttgtcttaacagttactaaaatattataaaatgcatttaattatatttttcagtgatatcgtaaatatttttt

SEQ ID NO: 268472 - DNA, 1341 bp, Cannabis indica
ttcaattcgtaaatgtacggattagatatagttattttagattggttactttttaatattaaattatttaatatttattaaaaatatttattttacataactaacaattaaaataaaataaattattacttttttatagtctacccaaaataaaattgaaaataaataaaataacaaaattcaaatagtaaaaaaaaaaatacgtaatgtaaaaaaaaaaagattaattttgttttaaattatatttttcttatatataatagaatataaatttaatctattaaattttaaaattatatatcatatgtattagatttttaaattactttttttttttgccttaaaatattaattgcatatataattttgaaaaaacatatataaatttgattggatcggttacttttacgtactaattaacattcaatctgcataagtgtgaattttaaaattttcaattcaatccaattcgcacaagcacgaatatttgcattttgtgaattggattgaattagatcgtacttattaaattgtattatgtattttataaacaagcgtgccccttcttattaggtatcagtcagaaaaagaaacattttattaaataacttatttaaattaattaaatttaatatctatttaaatcactacaatttatttaaattttaattaaattaataaactaaaggaatctctaataaaataatgtaaaaaagagagaagtaaatgtaagttttttctaaatgagtttaatgtgatccaaaattcttttatatgaatagacttatatgagtgtatgatagaggtcttcaacaaaatttacaaactgcctaactcgaataaacagaattaaactgatttatatatttttttaataaaattgtatatattatattacacaaattatatttatatgttaaactattttgtatttaaaatttgaacattttaatgtttagcttaaaatttagagtttatagttaataatttttattgtatttggatattgaagttgaagtttaaaatttataccatattattacttatttttttgttattttattcaattattttatgtttactcaattatatttatcttatattaaagtttttaaaattaatttaaactataacttttttagcttaaaatataaataatatgtttttatttttttaaatctaattatttgaatactagaaacaaaccataataattattaaaaaaaatgaaaagcggtttggacaggttaacccgaccaaaccgatgaaattattgggagggttgaactttttttagtttttaattgggcgggttacgattaaatatttgcaacctgatat

SEQ ID NO: 268473 - DNA, 943 bp, Cannabis indica
atttagcacactattggagtagatttttaaaataaagtgaactatattttgttatttatgacaaatataaccccctaacaaattataatataaagtgtatttaatatatttctcataaaataatttgcatcataaatacttaaaataaatacctaagttataattatgaaacttcagtaggtacttagatgttaagtgttaagtaaattacaacgtaataatcctgattggtacaagtcatttaatttttttttaaaaaaaaaaaaaaaattagtttaaagataccaataagaaaatgacatgtggataataatttaatatttaattcaggtacctaccgagtgtaattttagaaatataacttaggtattttaccgccaaaaattaaaattagttatttatttacaaccgaaagttaaacttatgtatttatacggcaaattaattactctttctcataccatataatttttcaatttaaaaaaaaaaaaagatttttataatgttttatataatttacatcgtaaaattttttatacaaaaatactttttatttagtaaacattaaagtaaaaaaaaaataaaaaaacaaataaaaaaatacaacagtacaattataaatagtttatgattttataaagggatattggcggctaaaccccccaaacttttgggtttgtgacagttaaccaccaaaactcaaattttggcggctaaactacctgaactccacttccgttttgctctgcacacctccgtccaaaaatcaccgttaagtgccacagtggactgtccacgtgtacacacttgtacacgtggcaaatttttagtggtccacgtaatattaattttttaaaaaaattaaaaatattataaaaaattaaaaaaaatcagaaaaaaaaattaaaaataattttttttttaacttttttttttctttttt

SEQ ID NO: 268474 - DNA, 2348 bp, Cannabis indica
tgtcaggataatgaatcgcaccaccatctttttgtgcactgctgctttacccgaaagctgactggtgagatcaacaattggtgtggccaatttgagtggccagtagacttgaacagatggttctccaagacaaccaaaagcatgcaggaaaagattattaatactgttattttggcaactttatacacggtttggacaaacagaaacaggtgtgtgtttgagatgagttgtaagtctgtttgtgctttgagtaaagagatcaaagaaagtataaagtctagatgtctaatgggttgtaatgggggcaaagggaagattgataactatattttaaatgtaattaacagctggttgtgaggggctgtgtctcggtttgctggggttgttttctcttgtttgtttttgccagttttgaataaaaagttttcttcttgttcaaaaaaaaaattgtataaactaatataaatttttacttctttttatagtttggaggaaagcagacatacaatctgttatcccaatttttggactctgacgtggcatcacacgatggtgacacgtggaataaactctgggtacctgctggaaagacataggccgaatagggcacctcatacatttgcttggacgaagtcctctagaccgagcagtgagcaatctgcggagcacgccaacacttagcaaattcagcttcgcatcgtgagtcatcgaaagaaatccctacaactctgggattagattatagagatatggcaagctgtccaaatcccacgattagtgtattctgtatttaatatgcaatctttctacttatatcaattgtaactataagggaaatattttctctccaagcttatagccctataaatagtgattcatattcactaggcaaatggttgagagattttgtctaagaattcatattcagagatactattgtaagagctttaagaaaaggaactattttccttgttcttaagtcaacacaaataacgaggattagggtattactgaactgctcggggatgaacctctataaaactcttctgtctttattttctttactatatttcactcatattaaactacttgtcgcttacaaaattagactcactgtcgttgactaaaagcgaggtcaacattttggtgttttcattgagagcagaatcaaggatctctctttatttcaaatttaatcacaagtacgatggtggtacagactcgtaggggcatggttgatccagcgaaaccataggcggttgatcctacactacagaacccaggaaacccaagggttccgacagccttaaatcccagacagtcttcaactgcgggtcacggtgtgacgactcctgtggatgaaatcgcgcctggtgtgcaagagattaggaataccagttctgcctgctaccaattttaaaacaaccattggagctgacactaaaatccagaacctcggtgctgctcttggaatcattcaggatcataccaacaccatacatcatgatccggaagaactccgtgccgcggtaaatctcgcatttgaagagcagaggtgcatgtttgctgaatagagagataaggagatggaaacgttaagggcgaagcaagcagtcattgatgattgcagtcggcaagccactgtgctgatacgaaaagcctatcaaactgccaggcagtagcctgtgaatgttattcccttgggtgaaacagacgatgatccagcgatgaatacctctcagaatataaatggtcaaccgtcaaatccccggtcacaggttccacctgtgggccaagtggtaggcggatagaccttgtctagtaattcatcgggagaagtcatacacaatgattccaaccaagttaatggtgccaatcaacatgttggccaaatcaatcagtcactgagacaactaggcgtttccgtatttgataggttcgggacgactcatgatctcagaaacgatctgaacaggagcagagggtttgacgatcagcttgactgccaatcgtgcaacccagaacccgcgctcaaaatcccgctcaaaaagatgctgatgtgactcagatcggccaagaggccgaacaggttagtccagtcgtgcaggcacagttggacgaactaaaaaatatgttccaaggcctggacggtcagaggaacaacgatctcaagttagatcgagcacacagaacccctttcttccctgagattaatatcctggagttggcccacaaatttaagatgccaacctggaagatgtatactgggaaggaagatcccttatcccaccttaagtatttcgagatgcaaatggatctgcaaggagtacgaggagatatatgttgca

SEQ ID NO: 268475 - DNA, 572 bp, Cannabis indica
aaaaagagagggtattttgggtataatagaaaaaatggtcatatatttaaaatatgggatattatgagttttgaggacaaattttaattaaatgcaagcatacaaattcaaatttcccaaaaaaaaatcgtctgcactaaaaactaattttgttaggaaagtattttcttgattagaaaaaaaaaaaactaattttgttttgccaaaaagaaaaacccaataatttaatactgaaatagtgttttgagtagtgaacaattgaaattcatattttataagtaaactttcaacaacaaaactaaatccattggaatatagaattgaataatccaaattaaatccaaaaacaaaaccaaaaccagatcttacaacaacaatggtaccactactgctactctttcattttcttcttctccatgtatatgcggcactagattaattgaattcaaggcctaatcttgttattgtcgatctacgataatctaatccagtatccacaggtgagtttagaatgtcactgaatttgtgtactttttttttttatctccatttctgattcgactaattttcta

SEQ ID NO: 268476 - DNA, 670 bp, Cannabis indica
ttgggaacatcataggagaattcattaaagtttttgaagaccaaatttttgatgatggggtccattcttattcgagtgaagatagatgttaccaaacctttaatgcgaggaaaaataatcacattgtttcaagtacgtgacaaattttgggttgaatttaaatacgagaggctacttgaatattgcatagagtgtggtagattgggccatcctttcaataaatgtagcatttttcttgaaaaacttgataacggactggagcctgaccttataggtctatgattaaaggtgctgcacttccaacatctaactacgatcgatatggaactgattttgcaaaaggaaatgcttggcctcttctcactcacttggtaagaacatcactaacttcgacaattccatcactcagtagaagtactcaaccgcaaccaaaaattttgtttcaaggagaatcctctcaacatagtagcgaagaaggaagaatacttcacagttctggttttaactcaaaccaggtgatgttgaaacaaatttcaaatgtggaaattcctactggtttggacactgatacatcaattagtcagtgttcagaaatgaacatgcatgctaataacacaacaaatgtcaaccaaactccaaaaggtaaggaaatcaagattccacctgttac

SEQ ID NO: 268477 - DNA, 669 bp, Cannabis indica
taaaataatttccaacatgttctagtaccacggtattggaatggggaacatttaagaaaatactactaataaagtaccaggtcggacgaccatactatgtactgaaagaaaatttagttttaagtgaatggcctgctgggcggactacgctcaaaggtttcgacaaaaattaaaaagtactcaggtcggatgaccaccatttaaagtacaatttctaatttttgcactttgttttacttcaagttaagctaaaagatcagattagatcaaatagctctgatgtaagttactacggtaacaaacacatttgcgatcaatagatgaataaagatgtttatttcaaaattcaaattgagtcaaaattactaatatgtagctaatttaccatacagtgcgtacaaaaagtttggtcgaacccaagaccccgaacagataaaaaagtatacttgtaaaaaacaagtgaccaagagtcataagtctgctcggtcacttggggggcacctatacctgtacaaagcatttggtaaagataaatcaaacacaattcctcgatgattatgattagagaatgaaattcattaaagataacaaaagcacgtaataccgggattaaaagctgtccggtcagcctgtggtctgtaaaatgaaaaataattccaagtttaaaga

SEQ ID NO: 268478 - DNA, 1427 bp, Cannabis indica
ggtgttaatcaacatacatgtgagtagatctaagatcctggtaaaataatttccaacaggacaaaccccagtgggggaaatacgacaaaccattctcaggggggaagaacagggcgtgaagaagcaagtgtgaccttggcgcgctcaaggacccacagtcgatcaactcgaggaggaaagagtaatgatcgagagagcacaggaaccagtaaatctacaagtcactcaaggacaaggtccatgagtaggacgaagtccacgagcaagacaaggtccgtaagtaggacatagtctgtgagtagaacgaggtctgctagtaattactcccagccggatctgtgagagcacttgaatcagaaaaaacctgatcttcgccaacaactcggtccaaagcaagaggatcctatccaattgcgaatagacaagttggaggataagttcaggagatatcaagtgggggaattaggaaaacaatctggatatgactcagacaaggagctcatgccgcaccatccagatattatgaatactccttttccccagggatttaaaaaccctcacgtctcatcatatgatgggattactaatccggtcttgcatttgaataacttcaacagaataatgcgagttagtaatgtgacaaacaatttacgttgtattttgtttctcacctcgttagttggagcagcaagcagctagttcaacaaatttaatcatcattccataagttcctgggaacagttgtccaaggatttcaaaacaattccaggtcgcaagggataggtaacccgaggcgtcctcgctaaccaatataaagcaacagccagtagtcgttttagcacggctgctgcaagggttagaaatctagatgatagtacacaacttactgtcctttaggcggggatcactactgatctatccaccagtgggggcaaattgtgggacgacttacagggtcatccagtgaagaacatcactgagttcagcgaaagggcttaggtgttcatccgaaaagaggaagctcgaaaagagatgaacttgttgaaaataggcttgggaggcaaacccagcaatttttaacaagcactgtctctactagagtagacaacttaggggcctctggctcaaagagaaaagacaattctaaggagtcgtcaaaagacaaaaagaaacaaaagaagcatgataagtacgtgccagtctatactatttataccgagcttaatgaaactcgggaaaatatttaccttgtgcatgagcacaaggttgccttcagcaagcccgagccgatgaggcatgcgaggcataaaagagatcctagtaggtattgcaaataccataaggatatagggcacacaacagacgagtgttgtcagttgaaagatgagatagaaagtctcatcgctcggggtcacttcaagtagtat

SEQ ID NO: 268479 - DNA, 449 bp, Cannabis indica
atgattttcatttttaggttgtttttcaaattggttttaatgtttgttattttatcattttgttttttgcccaaatcatgtgttattttcggttttgttggtttgatttgtttcggttttttgtgaaactggtttttatgtttataatcatgattaataagttctttgtgtctaatattttttttgtactttgattctttatcaaatggaaagtaaatcagaatccaaagtttcctttgtacttctatcaaggctaaaggtcgaccaagaaaatcttcacgacaagctaaagtatgttttatgtttttaataaaattggtttttaatcttaagttttattttgatttctttttattgattctcatgaaacctggttttaattttttttattaggatgcttctgttgaaagaaagaaaaacactgttaaagttcaaacgaggaaatctcc

SEQ ID NO: 268480 - DNA, 601 bp, Cannabis indica
ccagtggctttaatgtcttcaagttgacagtcatgaatgcactcaacaaactcagtttcagtctgatatttaactttgtgccccaccctttcatctttgcctaagatagcattaaagtctcccatcaacatccagttttcatctgttttcaaagcctgtaaatccttccatagctctaatcttccttgtctgtcattaaaaccatatacaacagtcaagaaactttgaaaggtactatccatagttgttattttcaaatgcataaactggcttgtgcatttgataatatcaactatgaaacgatttgggttccaagcaatcacaatcctccccccttgatgccatgctatgtttgacgaaaaacaccatccattaaaaacattaaggtacaaggttcccagtttgtgaaccttaacccgtgtttcgagaagaccaacaaacccagcctcttgagttcgaatgaactgtttaatatgttgttgtttttgctggttgttagctcctcgaacgttccatactagaaacttatccattgccaagagagggtcctcccccctctcttgtatagcctgtttgctcatcattagcccactgcatatcc

SEQ ID NO: 268481 - DNA, 709 bp, Cannabis indica
ccccaccgtttcatcttcatccctatcgtctccatcttctttttcttcttcagtatttgtttccccatcaccaagccacttatcatgataaaagtcttgataccaacaggtattgaaacatccatgaaatctgtaacttaagtcattaagcttaaaaagctttaattcgagattcatgttaccatgattgagagatatggtttcaggaatgaatccgaagtcatcacccatcaattgaagccttaagtgagacaagaaactagcctcagcggtatctttgtcaacatccaatagtccaccacatcttgccccaatcttcctaaaagatttcatgttcaagagattcagcggcagcccttgaatcccaatccagggtcctctgcattctaccttcacattatccttcttattttcccaactccatggtaaaaaagtgactaaagattgagccccaggaactctcatactatgcatcttaataagctcatccctttccaactcattcttacaccatattatacatctatcatcaaaaagttagctaaccactagtttccgctccagttctctagatagattgtagaatatagtgcaccaatcagcatgagtgttattcctagtgaggatgattgccaaattccactctttggacaaagccttggagcgcatatattcaaaaaaaatcagctgaacaaatcttttccttgga

SEQ ID NO: 268482 - DNA, 1865 bp, Cannabis indica
gaatttatacattaaacataatcatgaaataaatcatgtgaaccatggaacatagaataatttctgatctttattaattagtaaatctgattatatcaaaatgagttttatttagggaacaatacccaataaactcccatttgaactaatataaaacaaaaagtgcatttcaattaatctcaacactatgatatccagatcaagtgtattatgtagtttactctctgtaataggatctgaaaggttgtattcaatacaaactttctcccctattacatatccttaatcacaaaatccttgatattgtgaaatttctctctatatgtccactcctctagggatactagattatttactttttggcaactacatctttgctggtcaggaagtaacactagtagttaataaattgttggtacaacgtcaaaaactgtataggactttccataggccgaataagtatctttcctgtagctttaacattcagtcttactggtagagttagagactccgaatcagtttttacacttctccaaaatcactgctccacccctagagtaatcaccatctcatcagaagacttttagcactaacacaagtttagaaacctgatttggtgtatcctaagagtattaaaatacaacctttatcgactaacatacaggtcctcttcttgatcttaagattcatttgattgtcttccaatgttcatttcctggattaagctgatacctaatcattactcccactcaacagcaggtgtttggtctaatgcattacaaagcatatcagagacctctcactgttgatccaaagaaattcttttcctatcctttatcttttctggaatagttgaatcttttccttagataaataaaatctatgtctaaaagtcgggaagcttcttactaaagtaagttgcttgcactagagtaattaaattaccaggtataccataagcctaggtttagacaatctcaaacctacaatgctaggatcaggatgttttgttaagtccattgaattgacttattttcaaaatttcctttcttgtccttgtaataggaaacttttaattactccatatgaatggttttaaccatagttctcttagttttgctttttagttccttattctgactatccattacttgtttaaactaacaatgaattttcatcacaagtgtctcccaagtcataacatagtgagttccttgaaaccctcccactatgaaaaggtaccgtgactttctatctaagagcactaaatggtattgtcctcgtcggttttgtcaatacaacagaggtagtgggaccatcttacaagaataagatgatagaacactttggaatcaagaaaaaaaaatatcatctactttactactttcaaatttagtcattttcttagaaaagtagtatttgttgaaacaaacactttcttattttaatgaccatagaatggtccacccctaatcactttgaatagctataaaacatgcaaaccttagttaacagttctagtttttcttaagtgcacgatcaggacatccctgaatcttgtattggtttacactaagtacacaaccattccatcattctgaaattttcttatcactagggtatttcccttgaaggacttaggcaactgctagtaactaatcatagaccttatactttcatcaatataaaaattgaatttctagggaagtaagtttgaatacaatttgaagtctgacttaatgatcttttgaactacatatccaccaaatatttctccacccctatcagtttgcaagatctttaaccacttaccttaatgtttttcaacattgcgagaaattaataaaatttctcaaacatttcaa

SEQ ID NO: 268483 - DNA, 534 bp, Cannabis indica
tattaggagattctccatcccattctgatggagataagcggggacgaaaagttaaaatctttaacagggataaagacgggggagcactcccccgctaatttccccactcccgtgtacatccctagataagttaccacgcattcgagttatttcatgtatattataaattgtgttattttataataaaaaggttattttaaagccgaaattggacacaagaaattattataaatttcacaaaaattagtaagaggataaattatagattgtagggaataattaaactaaaagtatgtgagggatattgggacttgtcattttagtcgtggctacttaaaagggcaaagaacatgaatataatatagagaaaaaggcttttcgatatgaggtttcactttctttattttcattggatgaggtaccgacaattcaataaatatcagagaaacggtagaaaaataaatatttatatatttaagtgttaacttttagtataacttaaaaatccttgttaaataaatcaaaaaaaaaaaa

SEQ ID NO: 268484 - DNA, 525 bp, Cannabis indica
cttgctatgtgtgggcatggcactctatcactaagggttgactatgaagaacaatgaaggaggcttttaagagaatttcttttcttgcttattgtgagaataattttgtatgccatgaatttagttttaaccaaatcttatctttgattggtcgaaatatagcttttttatttcttccaaccaccattggcaatcccaaataagtttcaatctcttctgccatcgtcattgcgagagaggagaaatattgtactctaattccttcaggagtattgggagaaaacaaaagcaatgattttttgtaattaatcatctacaaaaacagtaagccaatattttataatatatcactaaagcttaaaatgtaatctcaataaatttttgtaaataatttatacctgtccagaacaattagcatacagactgaatattttttgtactgatgctaaagttctctctaaaacttttaacaagagcaaactgtcatctgcaaaaaataagcggctaattggtggggcatgccta

SEQ ID NO: 268485 - DNA, 991 bp, Cannabis indica
ccattgctcaactccatcacccgtttgaagacctgaccatgacgactcaatcatagagttttgagcactcgtccattaatcaaggtaaccttttgccaacactattattccatcagctgcgatccacaaattttttttgccaaacaaaatcattacgagcactccaaatggcctaacacataatcggaagtagcctcctttttcttattctgcagtagaaaaaacactgatacaccagtcaaggaaattgcactcaattgcatctgcctcttgggttcaaatgccaacccgatcctaaaccttcttagcccttggacatgtgattaacacatgggtagttgtctcctcttcgtggtagatcagacaaagaacttggacttcaactcttttttatctcagttgacacaaagtgggcaggcatgttgggttttgtgccctaaatacttatttcaatatagtcttctatattcatttatcaataaagaaataaatttatttcattacttatgtagtgtgttatttggctcacatgtttattacatgatcatttgtttgatttatgaattcattcaaattcttatcacattgatattcttgtttattgtgttgtcaacacagtggaaaataatcaagattgtgtgattaaatgtattcctataatttattagtacacagggtttaactaatagaataatctataatgtagtttacttgcacattggataagtgttatgttctttctagtgtattggttaaagtaagcttgggttggatgtatggagtaggcatcagaagggaccgatattgaacttggataagatataataaacttaccgtaatatctatctaattcaatatcacctagttgatcttagatcaaatgatctcaatccttagatggttaggttctagttcagttgtattatttatgttcttcaatttgttcgttaaaagtcgactaatggatcttctcgcgacatgcagattaagg

SEQ ID NO: 268486 - DNA, 1439 bp, Cannabis indica
ggcccgaggtgatggtcgacgcggaggccgacgtggagccaaagcggtaggggaggtagacaaggagcatcggtagcaccggtagatgaagtagcactcgaacaacaacaagcacctcccaatgctcaagctgagatactccgagaaaacgctcgtatacgtgaggagctaactcaagaaattgcaaggctacgagctcagaatgaggagttacgccggaatcaaaatccacccgttagaaacctagctcttcaaccagctgcattgaatccagaaccaatacaacgttttgaacctgtgtacgagcgattcaggaaacaacaaccaccaatattcaatgggagctcggactcacttgaagctgaggaatggttgcgctcagtggagtccatattggaatatatggacctcaatgatagggaaagagtatcctgtgctgccagcctacttaaaaaggatgcacggatctggtgggaagtagtaagacagagtcgcaacataacaactatgacctggttggactttgttgatgtgttcaacaggaagtactacagtgccgccatactggctgcaaaagaagatgagtttatgaatctgaggcagaacaatctcactgtcacggagtatgctaggcaatttgaccgtctggcaaagtttgcacaagagatcgtaccaaccgaggcccttcgggtcaaaaggttcttgaaggggatgaaccccatgattaaaaaagatgtgaaaatcatggtggggaccaacacagtttatgctgaggtgttagaaaaagctctcgaagctgagttgctcgaaaatgatataaagaaggagaatgctgctaagtgggaagcccgaagaaacaatggaggaaatcaagagaataagagaaaacacgagggaaatcacggtaatgatcgtgataaaaaggggaaagcagtggtccaaaataacaacaatggggtgaaaaggtcctatgtagaattcccaatttgccccacatgcaataggaaacatcttggggagtgtaagatgaagtcaggggtgtgctacaattgcgggcagccaggccatctgaagaaaaattgcccaaagggacaaaagaaggagaaccaagccgctcctgctcgagtgtttgctctcaccagaggagaagcggccacaagcaacactgttgtctcaggtcaggtttctatttacggattgccttgtaatgttctctttgattctggagctactcattcttatatagctactagggtaattgatagtatagataagccatgtgacctacttagatgtggtattgtgacggaattaccctcgggagaaaccatgctatcaacaagaagaatgcgagatgtacctatcataatcgaaagcaaagaactcatgggcgacctaatagagctggaaatgaaggaatatgatgttatacttgggat

SEQ ID NO: 268487 - DNA, 3046 bp, Cannabis indica
agttactaagagttggaatcaggtgaccatgggatctaaaatgtttagaattgtcactaaactaagaaggttgaagcaggtattcaagggcattaagaaagagggattttttgacatccacaaagctgagaaaatatcgaaggaggccttagaggaggctcaaaagcagctgagtacagatcctctcaatgaggaaaaaatgaaagctaagcaggaagcatgcgggaattatacagaagtacccaaagcctataccctcttcctttcatagaaagcaaagatgtcttggttaaggtataaggatgaaacttcagcattgtttcatgcatcgataaaagctagaagagcccataatagaattttttctattgaagatgagaatgggaactggtgtgataactcagatacttaaaggagattaatgccaccaccatcactcttatccccaaactgacttgcccaaagagtgttgctgacttcaagaccaatctcttgttgtaatgtattatacaaaattgccaccaaggtgatttgtaatagattgaggactatcttacctgatcttattgcagataatcaaggtggctttgtacatgggagattcaatgcacataatgtgttagtttgccaggatttggtaagattatatggaagaaagaattgcaagccaagttgtatgatcaaaatcgacctcaggaaggcatatgacacagttgaatgggactttattgaggaaatgatggtagcttttgggttcccaagtcaattcatttcccttataatgaattgcaaaagaactccaaagttttttttgctcctcaatgggtccatgtgtggtttcttcaatgccaaaagaggattaagacaaggggatcccatgtccccattgctcttcgtattaggcatggaatacttgtccagaatactaaagaaggttagagaatggccaggtttcaagtttcatgacagatgctcaagtctgtagttaaaccacctctgttttgctgatgacctcttaattttcagtaatggggactttgtttccattatcttgatgcttaagggactgaagctgttttctgcaacctctggtctccttcccaatgagcaaaaaactactatttattgctcaggtatggcagatggagatgttaacagaatacttgatgcatctaactttaagagaagcactctccccttcgagtacttgggaatccctatatgttcaaagaagattaacaaggctgaatgccaggagcttcttgagaaaatagtgagcagaattcggtcttggagttcaaggaatatttcttatatgggaagagtaactttaatcaatgctatcttgatctctattcacacatattgggctcaaataatgattttgcctaagaagttcctcaaagatatagaagccatatgtagatcctttttatggaaaggaatacaaggaggagcaggccctggtttaatagcatgggaggctgcttgtaatttaaagaattcggggggattaggcttcaggaacattcagcaatggaacattgcagcccttggcaggtacgtctgggatattgcaagcaaaaaggactggttatttgtgaaatggatacacagtatactttaaggatcaacaatggtgggagtatgatgctcctaacgattgtagctggtattggaagaaaattataggagtgaaaagccgtttgaaggagaaaattgactctgctggttttttactgcagaagtatacaattcagcttggatatgatatgcttttcactaacaatgagaaagttccttggcatagagatgtatgggatagacttatcattccaaaacacaaattcatactttggttagttatgtggggcagattaaacaccaaagaaaagcttgccaagtatgatatgaacatagatgaaacttgtctcttatgtgggaaggagaaagaatcgattaagcatctcttctttacttgtgactacagtaggaagtgcttacaagaagtaaaaacattgctggtatggagagcaaaagcggattcaattcacagcctcttgcaaaacatcaagaacaacaaaactatttcagcaactcgaagaagcatgctgaaagtagtgctagcttgactggtttatcacatttgggaggctaggaacgatgtcttgtggaatcaaaatgtgaaacatatcaaagcaatggtgaaacggatacaatgagagagcaagctcaggattatagaaataatgcctaggaaaactaaagatgtagatagagaatggattgtgaatatctaattctttactggaaagtgtaattgttgtagtgtaattgcttacacaggtgggaaaaggatgattttcagatgtaatcaaagtaagttgtaaatgttgttgagcaatacaagaaccttattcatcaaaaaaaatataaatatatatttatagatgtgggtaatgttttaatggaactgttatactcaatttttgagaagttaaaaaagtcaaccttgcgactttgaccaagacttacaagggtcaaaaaaattaagatatcctacttgagggccccatgacacctctgggaagctcatgaaaatactaaccaaccattttgtgatgagaccaacacacacccaagtgtgcccaacatagagtttatggtcccgcacaagggttttcatcctagagacctcaatccgacaagaaaaccattaaggacttgacttatttaggcataaaatgactataaagtcaagattacataagaaagcctctccataatgcctggctgacctgtgccatcttttggcataaaaagatggcacaagtctctactctcaaaacactaaagaagacttgtacaaatgtggtccctcaacactaaagattataacacaagtaaaagaaactatttttcaccaaagattcatcgtagccgatctatgccatctttgtgcacaaacaagtggcacaggtcgaccacaccaaatgggaaggagattttttggccaaagtaccttttcatcatcaacacatcaaaa

SEQ ID NO: 268488 - DNA, 896 bp, Cannabis indica
aattgttattcattgaataagcccaatactaattagacctaaataaaactatcataggtgatattttagtttagcaacctagttcatttatctatcaagaaataaatgggctttctatatgcatctaagcccaaaaacaaacatataggctcacacatgtcaaattgatttggataggccctatcatgtttctaggtttacacagatgaaagaaatataaaatttacatgttataatagaacgcacttcgttggaacaattctccaattaaagcacacgacctggagagaaacaagaatcctggctgaaacatgagtcagcttgtttgcagatcgtttgacaaaacacaactcaacattatttaaagataagagaagagtacgaacatcatgaactaaaagaccaaaagaggaggacaaagtaatttgggtttcggcttgaacacaaactaaactatcagtttctaaaatcaattgtccccacaaatgacggtcaatccaaattaaagcttcttttatgccaacaaattcatctatttcaggttgcacctaccatttcagcataaaaatccctgccattttctctgctgcctccattcgctaataactactcgacgccatggatatcccaacgaacccagaaccaagaaccagtaactaacaccaaaaaccaataaaccaaaaccaatgagagaaactatagaaccatgtcaaaagacaagactaataggaaaacctaattagtttcaacacatgaaacgaaaaattctaatcccataaaaatactaatagtaattaacctaataatagtaaaaaaaataaaaagatcaaaaaaactaaaaaaaaagaagtaatttaaaacaaaagaacgaacaccaatcgttcactgtaaagcaa

SEQ ID NO: 268489 - DNA, 688 bp, Cannabis indica
gagaaagaaaagggccgagaggataggaatagggaaggtggaaatttcgtagagaaatatgtgcggatagttgggggaagtgatgcaggtctgaaaggaaggattgttgaaaaactaagtcgtgatagagtagttgtgaggctatcgaggagtgaaaagttggtggaactgcaagttggtgatgttgcagatctgggttctaaggaagaagaaagatgcttgaagagattaaaggaattaaagattaaagaaagaggcttgaagagagtagaggagtttccaaggagtcaagacaggtcagaaattaaggcaaataagccagtgagggaggaggtaagaagagacagtaaaagcctcaataatgaaagtagaaactctagtagcgttgggcaaatctcgtggcttacaagccatatcagggttaggatcattagcagagacttgaaaggaggaagactgtatttgaagaagggcaaagtggttgatgtggtaagtcctagggtctgtgacatatccatggacgagagcaatgagcttattcgtggtgtctcacaagatcttcttgagactgcacttcctcgacgaggagggccagtacttgttttgtttgggaaacataagggaatctatggcagccttgtggagcgggatttggaacgagaaattggtattgttcgagatgcagata

SEQ ID NO: 268490 - DNA, 907 bp, Cannabis indica
ggagagccttgaactgatgccaacaggcaactccaaactctgtggtgaactctgagccagcttttcggccttgacaagcagtgtttcaatgacctggctcaaggagggagaggcttgagtcgctttagggagaggctcgtcggtacttgcggagaccggaggaggaatcagacctagtttttaaccttagggacctcgaggttagcagtgggaggctcgtttcttgttagttgtggttttcttctgcctttcgaggagctccacctcgacctcagaaagagcctctgcggtggacactctcttcttccctttcctgtggacgagaccctcaaaatgcatttctgcgagacaagataaagtgttaatattacttgaagacaagtaaaaggagagattggggcatgattttccgcctaaggaatttaacataatcactagaagacgaagtatcactagaagatgggatagaaggaccataatatttactcacatccctacaactcgtgatcctgaatatatcatagggattaattggttataaattctagctcgcatctaaatgactccccctatccatcatagacccgtactctcggcgactctgtagtacgactcagtacagctaatttggacatggattctgggataccaactatcaaacctatgtgtaatgcgatctacgaggaggggaagccaaatataaaaattaaagtggctatctcgaaatgtaactagagtgttatgctcagccctaagcagtgtgggtgaccaaccacattgattacctcggaatggtccttcttcagcttccgaaggggcagtattctagagatattatgctcgagccacgcaatcatgagctgtaaagcccgcttagttaatttggaaattagcagttatttatgtt

SEQ ID NO: 268491 - DNA, 611 bp, Cannabis indica
tcctcaaacagatggtcagtccaagaggatgattcagatattagagaatctgttgcgagcctgtgtgatggattttgaaagctcttgaagtaagtacctgccattgatagagtttttatacaacaatagttatcagagtacaatagggttggctccctatgaggtgttgtatggaatgaaatgtagatatctaattcattaggatgaaatcggagaaagaaaatacctaggtccgaagtcagttcaacaaactaatgaggtgatagagaagatcaaggctagaatgcttgcttctcaaagcagacatagaagttatgcagatccaaaacatagagatatagaattttaagtaggagatcttgtcattctatgggtatctccaatgaaatgagtaaaatgcttcgagaaaaagggcaagttgtgccccaaatttatagggtcttttgagattcttgaaaatgttggattagtagattatcgtctatctttgcccccaactttgtcaatattatacaacttattcatgtctctatgttaaggaaatacgtttcggttccaacacatattttgattatgaaaccctagagctccaaccagatttgtctcatgaa

SEQ ID NO: 268492 - DNA, 519 bp, Cannabis indica
ttaaaaccatcattaccctccactatcgcaaccaccattatccaccaccccacaacctattttccaaattcaaatcacaaagaaaatattaaacaaaaataaaaccaaatttaaattaattcagattcaacaaaaaacgcatttttatactaagggctcgtttggaacgtcgtcctgtattgtatgtattgtattatattgaattggattatatatcatatttttatataatgatatgttaaactttaatttgtactaaaatattatatatttaggtgcccataaaagtttataccacgtatagttttacataaaaatattatataaaacacaattcaatataatacggcttgcgaaggaaccttaaaatctcaaatctaagcccaaaccgcagatttctttcccaactcttttttcccattctcaaaactccacttcgaatccaatggcatgggcgaacccacccgaaactccaactacagtcagatgagaaaatatgaacgagagagagagagagag

SEQ ID NO: 268493 - DNA, 717 bp, Cannabis indica
cgtgtagatacgggcgtcagtgaaatatgataagtactgggcataggtacgggcttgtctgattaggcggtgcgatatatggtgtcaggctatggcacgggcttgcctgattaggcaacacagtacaagattattaaattaaagcaccgacttgcctgattaggcaatgtgatgtaatgaagatggttactttatgagataacatatatataaattatatttttaaatgaatataattcctattattggtataatagttttgtattaccagatatctgtatactgatgcttattcatggtagatgccagtagtgatttggatttcatcttatgaacaatgcgtattggtttgattctgattgtgtataaatgataatattcgaataataagctatatgatcattattattgctttccttgctgaatccttgtgactcatgggtgctatgtggtgtaggtaagggcaaggaaaagttagagttgccatgaggtgactgccttctccagcaatgtacatattgacctcaccggcctgcgtgcttagttgccaggagttattttggactggatgtatctgttgtattttgaattccttttgtctaaagtcttttgggtaaaacgttttataacaaggatccttaggacacgttttttatgccgttgtaatgttcgttttcagtcttttattttagtcaagtttttaatattatcacagtt

SEQ ID NO: 268494 - DNA, 653 bp, Cannabis indica
tatattggtaaaatacttgccattaatgatatactcattttgtattaagaattcaagatatgttaagaatattcttgagacattcttgaattataacaaaagacatatatcaattaagtatttaaagtttttggcatgaaagatgttataccaggtgatagacttgtagctaaagaaaataagttttctaattcattgtcctaaaagcaaccttagaattcaagaaatataaaagattcttaatttatattggaatctaatatatgttcaagcatatatgtatttgtacttaatatacatattaagaatattggatagatatttaagtaaccatataaggaaatttcggtatgtagccaaatagattataaggaatttatggagaataaaagactacatgttcacttatcagaaataagaaaacaaaaaatttagagatcattaagatttctgattctgatcttttaaagatttttgtcacatatggctacaaaattaggaatggtattaaaaactaataaagatatatgttgtgacaataaatcaatcgggttacattttagtaataacataagctctacaaggccaaatgcacattgactttgaactaattgttattaaaaaaaaaaatcagagtaataaggtgtctatag

SEQ ID NO: 268495 - DNA, 627 bp, Cannabis indica
ggagtacggttagtagtgtcccggcaacggaaccagactaatcctatatattttttagtaaaaataatgacaaagaaaatagaaatagagatggtggtgatagtgaaggaaatgaacattaatattacttttcttaatttttaagcacataggaagagcatgactaaacctatatgtttaataaaaagtaaataaaaatgaacataaaagatagaacaagataaatactactattactacaatcactaaataaaaatatatagaaagagcatgactaagtctatatatatatttagtatataatagcatatatagtagtatagatggatgaagaacaagaaaataaaagtgaaataaaaacttgcattactcaaataaatattacatgtgaatcaaagatacaaaataacctcactttgcatatggaatcatccctaaccttccaaggaagattaggccattatgctaatcattctcataaaatttctaaagagaaaagatgagaagaaaagtgagagaattttgctatagtaaaagttacactctagagattgcctaaagattacttcaagttctctccatctctccctatttatagccaaagtgggtgaattaaaataattaata

SEQ ID NO: 268496 - DNA, 737 bp, Cannabis indica
gttgaataagttaacagtgaagaacaagtatcctttgccaaggatagatgacttatttgatcagttacaaggaaagattgtcttctccaaaatcgatcttcgatctggttatcaccagttgaggattcgggaagaggatattcctaagacagcgttttggacccagtatggacactacaaatttctggtaatgtccatcagattaacaaacgccccggcaacatttatggacttgatgaatcgagtgttcaaagacttcctgcatgattttgttattgtctttattgatgatattctaatttattcaaacacataagagactcacgaaagacatcttcggatggtgttacaacatctccgggagcataagttgtatgccaagttcaagaaatgcgaattctggttgccttaagtgagtttcttggggcatgtggtaagtaaagatggtattctagttgatatggtaaagattgaagcgagacgagactggcctcgacctaagtcagtaactgaagttagaagtttcctaggatcggcagggtattatagaagatttgttgagggctttgctaagatttttgtgcccttaacagaattgactcgaaagagttgcaagtttgtttggactgataagtgtgaaagtagtttctgggaactgaaacaaaggttgattactactcctgtgttaaccttatcggtaagtgatgaaaagtttgtgatttattgtgatgcatcca

SEQ ID NO: 268497 - DNA, 621 bp, Cannabis indica
cccttctattatttcacacgttctgaatatcgatcctaacatccggtcagttcagcaaaaaacgaaagactgctgaataaagaacgagtagtagccctgaaagatgaagttgaaaagctgcgcaacaacaacttcataattgaagctttttactcggcttgggtcgcgaatcctttacttgtgcccaagccgaacaagaaatggcgagtctgtattgatttcacagacaaaaataaagctctaaagactgttttccacttccaaggatcgatcagctcgtagatgcaacagcagggcacgaaattttaagcttcatggacgcttattcaggctacaatcaaatcaaaatgcatccgccagatcgagaacatacaagtttctgaaaagatatgcgtctctatttctacaaagtcatgccatttggtctaaacaacgctggagcaacgtaccaaagatcggttaacaagatgtttaaagaccagatcagcaaaattatggaagtgtacgtggatgacatgatcgtcaaatccggaaaggttgaggggcacataggcgacctggacgaatgtttcaaagtccttaggaaatacaacatgaaactaaatcccttaaagtgctcct

SEQ ID NO: 268498 - DNA, 1158 bp, Cannabis indica
ataaaaccctactatatataatacctaacctaaatttctatccagcagcaccccatcaaaaccgcacaccattctctgctgtctctctcttctttatcttctctcaggatctctctcgcgcgcccatccaagtcccacaccgtccagctatgggctcctaccgtccaagggacactgtaccgctctctcacacaactcctatatacggtggtggccacttgaactaaaactatcgtgtggcgttcaagccaccatcgaacttagagataggtaatgttctctctctcactctctttctctccctcaggatctctatctctctcgttctttcgagatctctctcttgtaaatttgatgtttttctatttcttttgtagggcctcatgttgacggtaggagctcccatggtgtttgcacaattttttgttggcaacgacgaagatatttagtggttttcgatttattattgtgtaaaaactgtatataattttgatcttcaatatttctaatgtgtggagggattatttgataaatggagctagatctgattttcttttcattattatttagtatgtgccggtacaaaactgacgggattaatatagttaaacatttaatttttactctatttgcgttggttccaaaatgacgcaattttttaataccgacagatgaaaaatgatgcaaaataatatttatttgcgtctacggcatatacgtcggtttataaaatcgacaaaaaaagtttaaatgtcagttaaaaagtgacgaaaataatttaaatgtcccacacactataaaaaaatcttacttttagtcacaacaaaatttgtgactaaagataaaatagttgtggctaattataaattatcattattgtgttgtgactgaaagatccgtgactaaaagtattagtcacaaaaattacaatttgttcttactaaatgtattttagtcacaatatttgttgtgattaaaactaaattaatgacaacttgtaactaaatacaacgttttagttacaagtaactttttgttataactaaaagtcgtacatgtagtcacaaaaaatttatgttgtgactaaaagattgtcactaaaagtagtagttttttataatgacaccgaagcgtctataagcaccactatgaagtggc

SEQ ID NO: 268499 - DNA, 736 bp, Cannabis indica
ttctcttagatctctctaaagcaattctttcgatccctttctcagtgaagctagatcactatttatagggctaaatgcatgaggaaaggtttcccttttgcttacaatatctataataggtaagaacatacattacatatttagaatacatgaaatgagggattcagacagcttgccatatccctttgatacgatcccatgattgtagggattgcttttgtgcaagggcttcatgatatcaaccttgaggtagctaagtcttgatgcacggctcagagaaatgacttcatttcttgtccggatcaaatttctctttctctgatcggtcaagtaaactttgtgcatgcagatgtattactcgatgtctgttcagaacttttcttctatcaagcagaaggaataacagacacgtgccactagtacatatttccacgtcgtggtgaaaaaaatgggataacatttgcccccaagtctgcacgggacttttgaagtcacgcgtagacttcacttattttgactacatgtctaaacgggtggcacatgttcgatgtgcctgttggtgatctaatgtgattccgaccaaaggtctcttcgatattcggctaataaatgctggttaattcgtacctcaaaatattccaacgattgcatgctttgatggttgctcttcctcaggtacttgattacttgatttcccaatgtttacttttggggggaaattgaggcatttaaattt

SEQ ID NO: 268500 - DNA, 668 bp, Cannabis indica
tttttgagaaaatcagatggaaaaatgagaaaatggcgaaattgcaaagtggggcccaatccaattcatggccggccactttgtatgggatttgctactttatttttctaatattttaatgctagttaaatctaacctaaccctaagtggtttcctataaataggaagtgatggcttaagggaaaagatgatgatacatctcattccttcagtaaaattttgagcctcctttcctatagcatagccgaaaccctatctctctctttctctcttcttattttcataccttgaatgatagagtgagtgcccacacacatcaagttggtcctcaatcatagtatttaagactgtgaagaatccaaacacagggaacaagaaggagaatcaggctcagatcttggtgatataattccaacaatttttgtagtggatcccacaaggttgtcttcctcctgcattcatttagtagccttgctagccttcgaatccgtattggtgtccttgtgcttattactttgtttctttgagtaaataagaattttttcttaaaacaatgatctttgtaaaatgttgcctcttaaacatgtttctgttgcgaaaattctctctcacgtataaaaactatcaatatctttcttcagttatattttactatttttaaaataatt

SEQ ID NO: 268501 - DNA, 959 bp, Cannabis indica
tggagggccaaaactgggacccagcgcctaggttgacacctggcactcaacgcagcaccaaggtttacatattgtcaacttgggctgtttctaaccaagttcttaaaaaagtgttctgggaattttttttatcatcagaaataatgatgattcaagcaaactcagggagcaaactacaatcttgaggccctagaaacagggcccagtgcctaggttgacctagtgctgagcccagtgcccaagttgacaatcaactgggtgtgtaggtttcgatcactcaaatgccaaatctaattcgaccattgaatctggaatggtctaaaatagggtagaagttctcgtcctcaagtcaagaaccataaaagtatcaaaatgaaaacctaatagcttggaaatgaagtacgtagcacccatgttgacaaatatcctgatgcgctgggttttgcttatccgattctggttctcttttgaccattcatctagtttttcataacccacggaccgtccatctaatttttccatcccttaacccatggacgtcaagcatccaagaaattctaagaagcacacctaccacatttgtcacaaccaacactactacaaattacactattcacgtcggtcaactctaatattcatttcattgaccgacgtgaatagtaggccatgtatttatgcaagtgtttagaattgacactaaggaaacattatctgtgtctgtggtatattacacgctaataacataatcgacaaggaaaaaaactcttaaaaactttaattgatgttcaacgtcagtttataataggtcgagtatgactcacgaaatggcctatttcctctaaacctaacttgtgaaatcagctgccattattcattctcttctccaaatcagatagctctagaaattttaacctcctgttccattaatcgacgacgagtggtcctcatctcccccgtca

SEQ ID NO: 268502 - DNA, 884 bp, Cannabis indica
aactgttacatatggtggggttgtgagtagattcttgtctagtaattttaaggatgatggttttgctgtaaaaatggttgttctttactttgtaactaattgcttgcttagtaggggagaagataaaaaagttcatgctgggttgttaaatttgataggttgtggggagtttaattcatacccttgggggaaattgtcttatgattacacctttcatggattgagggttgggttgaagtcaaaacagatgcaaaagaagagggatttagatattaaagagaaaggtgttaggcaataccgaatgggtggctttccatttgcttatcaagtttggctgtatgaagtgcttccaattctaaagagggaggacatttgttcgtatgatcctgctccaagttttagaatttgtaggtggactgatagttcttctccaaattcaaataaactcgagaaaaaagtgttttcatcgtctaaggtaaaataataaaaaattaactattttttgttcattatgtctatgtgtattattttttggttacaaagcttgttatgctaatatgttttttgtttttgtttgtactgttaaagctgaaagctgtaccaatggaaccaactgatgcagagaaagatttgttagatctttctgagtttgagtggtatggtttgagtgtttctgatgatgattttgtgggaccagcgatgcccaagaagttggttaaaggacaatcttctggtgttcaaaatattcctgagaaggttgccaaggatgtgctagaaggtgtttccaataggatttcaaagcacatgaaagactctttagctgtaattttaaatcatcagaaggatgttgttgatgctgggtttttagaggttaagaagactat

SEQ ID NO: 268503 - DNA, 826 bp, Cannabis indica
ctctctctctctctcttcttccattggaccaaaaacttcatgcctcttctatctatgctatatatcactttattaattgtttgaattacgtactaaattactaattgcttcctagctactgacctcgccaaaggggctcctcaatattgaccctgtaatcaccacaagataattgaatcatatactgtatatattatataactcaatcgattcatccttatattattcgtatgatccagttaatttaattgctagcgagatgcatgcgagtcgcactagtacaaaaataatcaagatagcttgttatatatcagcatctataatcgtataccattctcctaagagcatgtttggtttattggaatgaaaattgtaatggaataaaagttactattacaatgtttggtttgtatttttaacctttgtaatagaatttcattgtaatgtgtattacaccaattccaagaatacccattacactcctacactacatttatgagcattacaatcactactaaataatgaaaagacaattttaccctttttgtttctttataaataataaataaagcaaaggtatttttgtcaattcaattttaattacaatgttcattataaaatatagggttatttgcggcaaaacctcctaaagtggataggtttttgcaactaaccctctaatctaaaattttagtgataaaactacctaaaccactagtccgttagcagttagccctttccatccttttttggctgaatgtccacatgtacacagtgtacacgtggcacaatgttattagtccacgtaaataaatatttttaaaaa

SEQ ID NO: 268504 - DNA, 880 bp, Cannabis indica
aacgaaagattaattttgaaattgttccatatatatgcttattgaaggcaacctatggtttactcaagcatacacattcctatcatggtatctgtagtagacaacacgcgagatgagtgtttggtcgggatatcgaacattaaacagacaaatatgccaaccaggagtactcaacagattaaagaataaaaatattcgacgaaaagtcaaaactcagaaattcgaaattttcgtgagttagggcaaaaatattcatgaagcttagaataagcaagatgaaagacaggcattatgcagttcaaaaggcaagcattatgagcgatgaagtcacacagatcgttacaaaggaaaatcgtagagtttctaaaacttagggtttcctacatatcttctacaacgaagttaaagttgcatttagaaaataaatgtgcaaagtaaatgaaaaataaatcgagaacttactcaaggattgaacgtctggattcaagttacgccaagctaaacgagcaatttttgtgaaaacacttcagcaaacttgaagctaaaaacctctcttttcgctctgaacttacttagcaaagaaggttggtgaaaatgagtttgtatacaaatactcactggtatttataggcaaacaatgaaaagaattaatcatttcaaaaaacctcagacgcctcggttccccccaaaagcgaatatgggaaatcaaaagcaatcaagtgcaactgtcaaacgtggtgagagaaaattgtatttcgaagcattgagtgcgtcagagaatttatcggccgaaaactgaagggacaccctgtcagcctcacattgagtcgcaaacagacgcgcctgaaacgtgtcacccattcaaatgcaaagacagctc

SEQ ID NO: 268505 - DNA, 526 bp, Cannabis indica
cttaacaggcagtttgctcttaaagacttggggcctctttcatactttttaggcattgaagttacacaatcagctgctggtttacacttgtctcaagccaagtatgccaaggatcttctagttaaggctcaaatgagcaatgctaaaccagcccctacacctatgacaagtagcattcgtttatctgcttaccagggggaacccgtggaagatgttcaccattataggtcaattgttggagccttacaatacttgaccattacaaggcctgaactttctttagtgtgaacaaggtgtgtcaatacatgcaaaaacctctatccactcattggtcagcagtcaaacgaatcctaaggtatgtgagtggcacaacaaatcatggattgcatctgcaaaaaccagcaaacatggaccttgttgcatactgtgatgctgattgggcttcggacccagatgacaggagatccactacaaggtttgcaatatttcttggctcaaatctcattgcttggaaaagtaggaagca

SEQ ID NO: 268506 - DNA, 665 bp, Cannabis indica
tacaccaattctataaattcttttcgcttagcactgcagactgcctcattataatacttggcattgaataaatctcagaactcctcccaggtcataatagtgatgtctcaggtgagggacaccaattcccaccacacaagggcatcttcctggaactgaaaagtagcacaggtcaccccgatcatttccaacgacccccatgaaattcaaaattatttctatcaccgtgagccactcctgagccttcatcacatccgggcctccctagaacactgaaggtgcttgcttgcgaaacctctcatatagcggctccatacggttgctagcaacaagttattttgctcgcaccgcaggaactaaaacaacctgagcttgcggtggaggcaccgcaggaggtccctactgccttaaccttaaaatttcttcatcttgctggcagatatgatcttgcctttctgccaatctctgctcccaatccgcaggagcttgtggtggattcacgtgtcgatcaccctgaaacatgccacggcctctgctgcgaccacgaggattctgcagaatttgatttgcctgaccgcctccggtctcaaccctatttccctgactccttgtatttcattgggcgtccatttaacaggacttagactgcgaatccataagccagg

SEQ ID NO: 268507 - DNA, 933 bp, Cannabis indica
ctaaaattcacagtttgctcattagtgaggaaatagtttctggcgtttcagtcaattttgtgaagattgtgtaaagaggttggttagtccttcctttcttagtattattgtggtccccaccatggtcatttgtccttttattggaagtgttcgcattggagggctatttcttgttggagtgggggtagcttctattgctctagatgaaagaggaaggttattggccaaccttgcctcctccctattgaggtacttttgagctcttttcatgaactcgtctatagtgtgagcaccctttccatgcaaattatcgcaaaattagaacccattagtaattcctgccccagtgccataagtcttccactatcattaacgtctctagccttggcagcctcgacattaagtggttgatataagcttttaagctttcgcctggttgttggttcataataggaagggaggatcattctaattttctggccttggcgacacaaaatttcttcttgaagtcacgtgagtgttggccccatgaggtaatggagtgcctcttaaatttcttaaaccaagccttggcttctccaataagtgttacaagaaataacacacattttaaatcaccaaccacatggtgggcatgcataagtgtgttgaagtcacttgtgtgtactccaaaatctgtactcccatcatacttggttatgatcggcatcttaaacccttacagatatggtagggccaatatcctaggagagtaaggttctagctcctcatctgtatcatccccagcgtcattttggttattggtcaccattagttattgtatcatttgttccaaggcattaagcctaaggttattggatcgtccttccttgccatggacatcttgggggatgttgtgttcatgtcccccttgatattatggttgttattttc

SEQ ID NO: 268508 - DNA, 937 bp, Cannabis indica
gggcataaaacccaacacgggcaacctacatcctacaggttcatggccggttagcttttcccttgtaggacattaatgtgcagccttcatccttggacaacaagtcaagctgcgagttgggccttgacaacccacgaagatgctacggatagctttattttacttattcttaaggatattaggcatgtaagctttactatataaagaatattagcctatctctaaaaccctaagtctaaagtctcaagcctctaagtcattagctttcaactctaagtctgaaaccttaatcttctctcctcctctctgctacatgcccaaaggcctctctccctctctctctgacgcttcaaaggctctctctctcatttgagatttgcctactgatttatacattgtaatattaagattgctacttcagatcccatcactatagtgatttgagtagtattatctctcggtatcaatacaactaaaaggaaagtaggtcattacccgctaactaagggggtcgaacctctataaaattgtgtcttatttactttatgatgttggaggaattttgacaacaccaaataaaaataaaaaatatagttatttaataaaaagcgcgagtactcaacctataatggagagtattcaaatgagaccacacaaacaaactggaaaatctcgaaaacacaatgaaaacaaaagaggtatagtggtccagtcagatcacggtctgcgtagtccactgttgtaaggatttatgttctgttcttattcatatttgctgtgaaaattaatatacgcaagtgcacacaatcgttaacaagtaataaagtgataaatcgagtattttctccacatggattgaaaattagaaattaatttataaaactaattactcacaaattggtttaagcaaaaataaaataaagtagtgagaatatat

SEQ ID NO: 268509 - DNA, 762 bp, Cannabis indica
cctgtgtccgaacacaccccagaacacttttcaatatcgcacattcgtagtggtagactacccaactgcttacaacgcaatcctcgaccgaccggccctagtagacattggcacaattatgtctatccagcacttgtgtctgaaattccctactcaggagggtggagtacggaccgtgaagggtaatcaaggtgaggccaggcaatgttacaatgtcgcagcccacttaccagtattgatggtccatgaaggtatcaagccagaagtggcagaagaagatgagttagatccccgtgtgggattcaaaaaaattgtagatactatggaggacgtcgaggaagtgccagtgtgcgacctcgaccctaccaggatcctccggctgggaaaaagcctagaaccggaggaaaaagaaaaaattattaaagcactaagggcagccacagatgtttttgcgtggtgccaaggagacatgaccggcataagtccccatgtcataacccatgtcctcaatgttaacccggatatgccaccagttcagcagaagcgacgtcccctcgatccagtgaaagcggaagctatggagaaagaagtggacaagctactaaccagtggcatgatccgggatgtatattacccagaatggctggccaatccagtgctagtgcctaaaccaaatgggacatagcgggtgtgtatagattttaccgatctaaacaaggcctgcccaaaagactgcttccccctaccgcggattgaccaaat

SEQ ID NO: 268510 - DNA, 515 bp, Cannabis indica
cgaatttgaaaagcgagctaaccaatcaggaatgtcaaatgagaattaaattgaagattttttttcttctttattattattattattatttgcacgcctccgttaccttttgagaggcctacgccccatagaaaatgtgtacctgagacattctcttggcccgtaggtcctgacacaaggttagaactattgttgttgttgttgttattgttttttggtagaggaactttttgcaatattgataatatgaaacattgttaaaaggacaataacatgatagggtacagaaatagagttgctttatcaaaacaaatacaaattaaacgaaatattaagtatgtaaaaatatttaaaataaaatgttaaaattatgcttacttttttcttaaactttgtcctagattaaggcgggtatggcccgtgtttagggtcaactcattctaagggctcaaataaaaaaatatcttttaataaatataacttttttttggggataattacataagacacaattt

SEQ ID NO: 268511 - DNA, 549 bp, Cannabis indica
gataactaatcagattgtaaagagtttgatttagggcataaaacccaacaatagaggaattaaaagacataaagattcaattaataaagttaaatgattcttcagccattcaagagcgtggtaagctccccgctcagcctctgatcaacccaaaatggcaacatatggcacaaacctccacttcttcagagtctaatctaaagggggttaatgccaatactactcgaagtggtcaaagtacggtatcaccattacctaagaccactagtgtaccaatgctcgctccagatgctgatgtgccatagaaccttctaataaaggtgccatttcctcaagctttgaaacccactaggaaggtactggaaagtcatagtgagatccttgactatttgacataagttaaggttaacttgccattatttcatgtaatcaagacagcaccggcttatgccaaagttatcaaggatctatgcactatcaaaaggaagcaccatgtcaagaaaattgcattcttggcaaaacaagctagtgcggttatcgactccaaga

SEQ ID NO: 268512 - DNA, 1698 bp, Cannabis indica
tcatcttttttagccttcttcaaggcctggtccttaaaatccttcagctccttcaactccacggccaagttggccttggactgcaagtccgcctggtgcaactcctctagggacttcaccttggcagccatttcgtccatggcctccttagcctcccgaagctcacgcctggccttggcgacggcctcaccctccgccttcagcgcctcccgatgcctcgcctccagctcagcctcccttcgttggacctcctctcggagcttcgcctccgcctgggcttccctccgtttggcctcctcctcgagcttcgccttagcaagggcctcccttcgctcagcctcctcctggatcgcccgcctttcagcggacaggtcccgcaggatcctcacggcctcgtcgatgcccccgaattcggacatgacgaagccatgattgactatggtcttggaaaggcggctggtctccgcagtaatctgaaaaaggagataagagtgagaataaatgccttagacaaaatatcagggaaagaaataaaccacaaagtacttaccgcagccatggcgttgctgatgtcttgaacctggtagacgaagttcaaggaggcacaagcagcataccgtttgggcgggaattgagttagatgggagacatactcgctggtcaactccgaggcaaaaggggccaaggtgggcccaaggaaacggttgaaccagtccgtcagcgggtccatgttcaggtcctacggattccgaaaggcctcctcgttgaaagtgttttgctactcctctcgtaagaccctctgcaaggcctccacctcagcatgcccccggctgtactcgtcgagggcgtagttgtatttggcaattcgaagattctgcctctcctcatctctaaggatcggagtcaacactatgccgtgaggcactgtgtattcctccacctcggagggaatcccagagtcatggcttgggaccggagtgtccaccctccgggggcgcttagaaggctcctcctccaccatcttccccttgcgcttgcgcacaagggcagcctcttgctcttcttcaccttcttcagcttcctcaagaacctcctcctcctcgtccaccaagacaatagtgcccgaaggggcactggaggaagacctcccgggagtgaccaactgagaagaagcaggaggtggggaagcatcaggactatgggctccagcaagagtggccaagatttcgtccatgggtgtggctgctgcaacaagaaaataagtgttagaacatccgtgagggaaccatacacttagcaaaaagcaatcaagctagtcctaccctgactctctaattcggccctagcaaagtcccagatcatagcactggcttcatcctccccgagaaagctgcccgagggacggaaccaactagaagataaatgggctgaatggtccaagggaatgggcgccggaggtcctgaacccatccgagaccgacctaaataatcgcctaagtgggaaaaataatactccttggcgtgattcccccaccgagtggaaggcatcctaaaactatggagacgttcatcgaaccctataggcctaaaggctggtatactcacggaccggaaggaacataatgtatcgttaaaggggacttaccgaacccgaagtgctggcgtcgggagccccttttgtgaaaaattatattgctt

SEQ ID NO: 268513 - DNA, 715 bp, Cannabis indica
tatttgttccagttgctcgtcttaaaattgttagactaataatttctttagcagcccaaaatagatggaagatccaccaaatggatgtaaagtctgctttcttaaataatttcctcgagaaagaagtctacatcgagcaaccattgggctatgaagtaaaagggcatgaagaaaaagtgttgaagttgaagaaggctttatatggcctaaaacaagcgccgagagcttggaacacccgaattgacaagcactttaagacaagaatttcaccaagtgtccatatgagcatgcactctatatcaaaattaagaatgaagatatcttaattgtatgcttgtatgtggatgacttgatcttcactggaagcaactcaagtatgtttgaggagcttaagaaatatatggcaaaagagttcgagatgacagatattgggctcatgtcttattaccttggtattgaggtgaagcaagaagacgaaggcattttcatcactcaagaaggctatgctaaggaagtacttaagaagttcaagatggatgattctaatccagttagcacaccattagaatgtggaacaatattgtcaaagcatgacgaaggaggaaaagtggatccaactcttttcaaaagccttgttggaagttttcgctacctaacttgtacaaggccggatattctctttgctgttggaatcgttagtcgctttatggaagcc

SEQ ID NO: 268514 - DNA, 793 bp, Cannabis indica
aaacctagagcggagggtggcttggcaatcggaagattagaaatgaggaataaatgattgcttatgaaatggctatggagattccctttagaatcgaactctctgtggcacaaagtcattaagagtcgatatggcagagcagataacttctgggacacaaaacagggggttagactgtccccaagaggaccatggaaggatatctcagatctttacgacgaatatgggaagttggtaaagtttaaagtaggaaatagagcatgtattcgtttctgggaagacgagtggattgggggctcttcactgagggatcaatttccaaatttagctgtgatatctagggctaagaatgcaagtactcaggagatgattggtgatgagggagaggtgggagattgtgtggcgagttgggatcttaattttagaagaaacattatggatagagagattccgagtttgtcacaattgttacaaaagttggagcacgtttgatgatagtcggatttggttaccagattcttgtgggatcttctccttccgctggtttacctcaaacgaaaaccctgaagagtttttctggactaagatcctatggaaaagtagaggtccttccaaagtcaaagtgtttggatggttggtggctctagataaattgaaccttcacgctagattgcaaaaaaagcgcccatttctgtgtatatcacctgggtggtgtgtttgttgtaagataagtggggaagacaatgctcatttgttcttaagatgccgccttgcaagttctttatggataatg

SEQ ID NO: 268515 - DNA, 648 bp, Cannabis indica
gcctatacttaaggcctaaggaaagtgaatagtctcactctttcactttactctcagaaaccctaagtcctgcaacattcacaactttctctctaaaatggagaataccactcccattgcagtaccccctgttgctatgttcgttccatcagtggcaactactgttgctcctgcagtcgaatctacagtcgagactaatctgtctaatccttgtcgtgacattgtcctttactagtcggaggttggtggttctgctcgccactcgagttctgagtcgaccccgtctccgcgttcacctccagtcattcagaaacctcgtacgtttcaaggtaaggctcctcccctgtctaaaaaggctagtccttctctgtcgttaccccttcgtctgtgtcaaaacgagtcactcgttcatcgtcgagtctacagcctccatccaaacccgtaggacctcctcatcctccatctaaggtttctattccttcctaaaccagtgaaagagttcagccaaaacaaaagtcctcacgtgataccacgtatcaaccacttgaaaagaaatccaagaccaaacccattccagtcctatctacagactcgtctcccaaacagtcgtccagaggctctaaaaaatccaaacttcctaaagcccct

SEQ ID NO: 268516 - DNA, 1283 bp, Cannabis indica
ttcttctgccaatcctggctcaaaattctcatgggccattaacaacagtaaatgggccgcgacattataacactgcctggcctctccctgatttcccctcacagtccccactccggcttcttaggtggggaattttagacacaagtgccggatagacgtaattgcaccaaaatccactagggccggctggctaaggattgcattatatgcagttgggcagtctatcaccgcaaaggtgcagtacttgaaagtactctggggtgtatccctgcacaaggtgattggcaacctcacttttgccattgggataagcgtggttccattgaatcccgtgagctgggaacctctcggtgataaatcctgctccgtgaggcctattgctgtgaaggattctttaaacaacaggttaacgaaactcccattgttgatcaatattctagccatgatcttattggcaatgggagtccctatgaccaggggatcatggtgagggaaacgcaccagctttgcgtcttctttcgtgaaagtaattggctgatccatgagtctaggcctttgagctggaagctgggttacttcccatactttgtcatgtttaatggccccaacatagcgcttcaattctttttggacgggcccccccaaaatggggcccaccaaagatcatagccactcttcgattgggtcttggtggcaggccaggggtctgctgagggatcgctcctcttgagggtactgctggtgccaatgctccgggcgtacttcctggtgtccctagaggcaatggaccccctgtggaaccgagttgagatggggcagccggttcttaatccactcatataggtgacccaatcggatcaagttttcgatctcatctttctgatttttgcactcattagtactgtatccaatgttgttgtggtactttcatctcttgctgggatcccttcgcgaactgtctctgtacagaggaggaggccttcggtagtgcgtattttaccttatggagaaatagacccgctcttgcgtgtctgtcaactccgtgtagtgggtatattggggagtatacccccttttttggtgcttgtcctctgtctggttgctgcctttttaggacctcttgctccgggagctttgaggaggtccggttaggctcgcgacagaagtggagtgagatgggactttttcacttatccctgaggggttcccgtaatgcgaagatgcaggagccaagggtttgctctgattgtctccgtggggtagcggagaactgtataccgctc

SEQ ID NO: 268517 - DNA, 1110 bp, Cannabis indica
ggattgacctggtaggaccatggttgaccaggattggctcgacaagaattttcggacaacacacttaggctacgaattgggctctaaaagcccaacagagcagctagataatatcttctgtcaaggacactttagtattttgtaattatctaacaacctatgtagatatctagggatttaaactgtaatctagggtttaggcctcttatataaaggccttaaccctagtctagaaacctaagtcgcttagcctccaaattgctctaagtctgaaagccatattctctcttctctttctctcttcctcacgcccaatagggctctctctcttttctctcttcatctctcacacacctctaaggaaatctcactctcacattagagatctacctactgattcatgttgtgtatccttatagagagctatatcagatcccacctatagcgatctgaagagtattatctctaggtatcaatacaatcaaaagaggagtaggccattaccccctatcacaaaggggtcaaatctctataacaaatctccgtgtttattggttttcattcgttgtttgtgtaacacatggaaagcatcgaattcatatgactatttgattttgtgagataaataaaactctatttcaatgtaatcttgaatttttatttatcaataaagaaatagatttaattcattacttgtttaatgtgttatttagttcatgtgatcacttatttgatttataaattcatccaaatccttatcacattgatattcttgtttattgtgttgtcaacacagcggaaagtggaatgccctaatacttaagcgcgctacagagattttctaattaacttgccacctttgctaatcaaagagttttcctaaaaaattcgtgccaaattaaaattttgattgaaattatcaaactttataaacatatatatttacatagccgggatcacgagtttaaactttgaatcagactatgtcttatttatgaattttcactaagctagggcttaattgtgaagaaaagagattcgaaggtttatttgttaattaagagactttattaagtctaattaattaatatattaaatgacaattttatt

SEQ ID NO: 268518 - DNA, 733 bp, Cannabis indica
acttcccctccggacatcccttcctcctcctctccttcgccttggtggagaaccctttggcacctttctatccccgccaaggtgaaacactttgccttctgagccacaaacttgaccctccctactgcccaaaatctagcctttaggaaaataatacaatccctgggatgtaaccgttgtggaaaccaggaagaatcagtgtcacacgcgttgttctactgtcagagtgtctgaaaaatttggaaaggaacgcaattttatccttatattttttcgtgctcttcagagattttgtttcatgatttggctcatatggttcatacatcttttcccaagaaagatgtagaacattttttgtgtattgcttggtttatttggtttaacaggaacaaagctctcaaaggtctctctagcgaccagacccatgcaatcattagcctggctcagagcttcttggcagattacaatgcgtcttcatcagttccaaacttcatcggtcgtcctagttccgcttctgccccttcaaattggattccccctgcccacggtcttctcaaactcaatgtcgatgcagcagttcctaagaatggtggaaaagtgggcttcagtggagttatcagaaaatagtgaaggtttggtagttgccgctctagctcagccttacgtttggcggaggtccggttgccacccttgaactcaaaggctctccttccctgcttcgctggtgcattga

SEQ ID NO: 268519 - DNA, 680 bp, Cannabis indica
tttgctacctccacttctgtccttataatagaacattgcattgaagtcgccaataatgattcacgactcattcaaattaccatgacatggcagtttaccacaaacatctttcctctacattaagggagttactgtcataaactgaccataataaaaaaactcctctttgaagccaaccattttgatcttgcaatgaacaaattgactatcttccataatcatccttacctgtactaacttatcaatccatatcaacattattctatagaacatactctgactagaatagcaattccagttcggcaagttcttcctcacactttttattttttcatggctgattttggtctcaaaaagagacacaaaaaaccaactttattattcctgcaaatatctaacaactcaagctgcttttcttttttatttcagtcctctaacattccaccctaagacattttatttatccatcatcaagaatgattctaaatagtaccaacgacctcttcctctaattttttaacacctcatatctgtcactaatactggctctagtactcagattctgcacaatttttgagccttatttcccaggagtgatccattagtttgaatcatttaatctgtcagagtttatccccctgctgttctatgtgattacatctattgatagcttctgcact

SEQ ID NO: 268520 - DNA, 1748 bp, Cannabis indica
tcagacagaagccttccattctacgacttattattaaggggaaaccgcaaattcaattgggatgaaaaatgccagctggccttggaggtattaaaaaaatacttgacaatgcctcccgtcctttcaaagccagagcctggcgaaaccttactcctctacctttccttgtctaaatacgtcgcaagttcggtatttgtaagggagcaagggaagacgcagttaccgatctattacaccagtaaaactttctcaggggcagagggaagatacccaataatcgaaaaattagcatgggccttagtcacgtcagcaagaaaacttcggccgtacttccaatgccatacaatctcagtcatgacgtctttcccactaaagcgggtcttgtacaagccagaggtatccggaagactcatgaagtgggcaatagaattaagcgagtttgatatacagtacttgcctcagacggctattaagggacaggcgttaacggattttctggtcgagataaccccggagcctgttccgcccgagaaagaatccgccggaaaggactggctactgaaggtagaaggatcctcaaatgtcagaagaagcggagtgggaatagtactgttgtcacccgacggggaaatgatagagcaatctataaagttaggttccgagctaccaacaacgacgctgagtacgaagctctgatccacgggataaaactggtaaaggaaatgggagccgagagagtattagtccagtcagattctcaattgatagttcagcaagtcaaaggagattttgaagctaaagaactgaaaatggctaggtacttatccgaagtaaaaaaattgattgcgactttcgactacttccaaattagccaaatcccccgtgaagcaaatatgcatgccgacgctctggccggcttggggtcctcttcccccctccatgttacgaggacaataccatttgactttattccagaacctagtatttcatcggaggaagaaattaagtgcgctgaaattccaacggacacgatcgaagactggagacggccaatcctcgaatacttgaaggatgataagttgccaccagaccccaagcaggcgagaaaaatcgtagtaagggcatcaagatacactatacttcggaacaaattatataaaagatcttaccacgggccgtacttaaagtgcataacgaagcaggagggtaaactaatattagcagaggtacatgaaggagaatgtgggagccactccggcggacgagtgaccgcccaaagagtgcaaaggcaagggtactactggcccacagtccaggaggattcttcaactcactcacgaacgtgcgaaaagtgccagaagcatgctccgtccatcctagccccccggccgaactaaccaccgtccaaagcccgtggccattcatgaaatggggaatggatatagtaggccccttgccaacagcaccagctcagaaaaaattcatgttggccctcaccgactatttctcaaaatggattgaagccgaatcattcgctcaaataaaagacaaagaagtagaagggtttgtctggaaaaacataatatgcaggttcggactaccccaggaaattgtagcggacaatggttcccagttcatcagcaacaaattcagaagtttctgcgaacgatggaaaattaaactcatattctccacgccccgctatccgcagagcaatgggcaggcggagtcatcaaacaaagtcatca

SEQ ID NO: 268521 - DNA, 848 bp, Cannabis indica
gaagattttatattatctgattatcatcgtactatagcccccatgatcttcatatgtgtacattaaatgaaaacaataagtttaaagtatacctcttgaagcctatcaaggtattctcgaatcttctcgtatgttgtattctttaatccagttgatgaggaatttgcaattcggactcacaccagtgtcttccaaatcgatgcaccacacacaagaaatagtgtggactattaagataaagtgtataaccttgttcttgttgagttctcaacacatgagcaagaacaatagagaaaaaaactattttccttttctctctgtagattttgaaattttctctataaagtgatcatctgatttttcaaatcagctcctatttatagttgttaagtctctttaattaaattattttttaattgtttaaacaaataaaaatatttataactaaatatggttactgatatttatgagagaatctctcaattacttgagagaatatctcaacaaccttgaaatatctttaacaactttttaaattagatatttatcttattgagctaattaaataattaattaacccatccaatagggactggaacaagtttggtgcctaccactaattttaggacaaggttggtgtcttttgtcctgacaaatcttgtctcgacaaattttgtcttaacaatttttatctttttccctatttaattaatttgaaaaaattatttatttattacaaaaataaaattactatttttcctattcaaaatagattttcttcaaatatctttatacaactctttattccttcccttgaaagtgtttcaaggtggaaattcggggatcat

SEQ ID NO: 268522 - DNA, 727 bp, Cannabis indica
atgtgttaagaagtccctgatttcattttaatggcgatacaaacctgcaaagaataccaactccataatatatttcttggcattaaatcaaattctaatgttgaattattttcacaaaaaacttatttctttctttattttatttttctattagaaaaatcaaatcgtaaaacatgatgttgagtctcttccaactaatgggagggagaaaaagaaaaaaaatcaaaactttttttatgctagatccctaccatagatctatttttcctacctcgatatctctgggatccttcaacagaaaactgttcattcagggattgtaattgcaattggcttgtccatcgtctcttcacatatttgatgaaaattttacatcatcagtatttcgaagccatgaaaatgtaaatttagaagaataaaattaagaaaaattaagagttaaaaagagaatgaataagaaaagaagatgaatagagagatggcaacatcaacataaagggttctggctgtaggaaacttcggtagtcttgcgagcatgctcgaagaagagaagaccatcgtagtcgctctggctatgggttctttcgctgtacggaagcttccacaggccggtaaaggttgtgttggaggctagggtttagtttgttagattggtaggattatttagctaaaattaatcaattataattaatgaataacgttaaatatagtcacattttatataaaa

SEQ ID NO: 268523 - DNA, 708 bp, Cannabis indica
agtgtttattggagcttcaaaatcaagaaccagatcacagattcgagaaagatgaaaccaagcacccaatctgccaccataatacaaagaacggaaccagactcaaaacactgttatacaccatgcacaaaaaccaaaacgccatagaaaaggaaataaaatcagagcggaagaaaggaccgcataggaaaagccaagaaatcatacgattcctgaccagagccacgcccaaagccagagatggttgacgaatcatggtcagaatagcaaacacgacggttagaaaattaaagaagaaaccctagcagagaaataaatgagataggttttttagtttttaaatgtggtagcaaaactattagttagacaataaattaaagggtattttcaaaaatatttttttttatgttttatttacaattttacagcttaaaatttttaaacaaaaacacgtttgtaaaattttaaaattacaaaaatacactttgatcagtaaaaaataaaaaaaaaaatacaactaaaaaataacgagaaatcaacttcacgataactttaaatcaaccatacataaactataaaataaccagaaacaatttcatgacaactataatacaactataagggttcgtttggaacgccgtattaggtcgtattgtattatattgaattgtattttatgcaatatttttatgtaaaactatatgtggt

SEQ ID NO: 268524 - DNA, 573 bp, Cannabis indica
aataaatgtaaattacaaaacaatggttctcaactgaatatagattgttatatagtagtaatagtaaaggtaaaatcaccatatacaacaacaacttttgatgaaaaagaaaaagcaaaacactactacacacacttaacaaatataaatcttagacagacaccttcactctttgcaaacttcatgattcaatatttcaatttgtaacagagacattcctccttttctgcacaaaagtagaaactcatttattaatggaaaatcatttatacacaacagtgataaattacttcatacttgttgtaataattgatttaaagaaaaaaaaaaaagcatctctatataaaaagctataatggatttgatctgacccattaccctacttactttaattggttggtataagataaagataacctgcaatttctaaaaaagcttaatgaatgaacgcacaacagtgtcatttctcaatcaaactgaattaaaatggttatgacataagtttttaataacactttttaataataataatgtcataagataacatttattttcctataaattattattatt

SEQ ID NO: 268525 - DNA, 838 bp, Cannabis indica
ttctttgtgaaactttgtgtcgacaacatgttattgaaaggctgagagtggctgtgggtttcgaaggaatgttatcagttgacgtgagaggccacagtggtggaattgctttgttatggagattcaatgacgaggtaaaattaataggtactgctgtcaattatattgatattgaagtcactttggcaagagaggaaccgtggagacttacaggattatatggcgaacccaatcgaagtcagcgacataaaacatggaatcaaattcgaaccttacatgctgcatcgactttaccgtggtgcattattggggacttgaataatgtcttgtctaatgctgataaaaaaggtggtaactgctatcctcaatggcttattcgtggtttccagcaggtggtgaatgattgtaatcttcatgatttagctcttacggggtatccttttacttgggaacgaggccgcggtacaagggaatggattgaaatccgtcttgacagagcgttagtaaatcaagcttggactcagaggtttgcctctgctaatcttattaatattgaagtgtctatgtctgatcactgccctattcttcttcaactttgctgtcagtttttttccagcaacaattcttgtttcaagttcgaaaatgcctggctccgagagcccctttgtcgtcaagtagttgctgattgctgggagttgagtatggggcggccaatacatgagaaaattaaagcttgtggggagaaattactggtgtggggccgcgattacacaggaaacttcaaggatcggattgcaaagtgtaagaaaaagattcaattgcttaagagtagccgtga

SEQ ID NO: 268526 - DNA, 1595 bp, Cannabis indica
cctttttcaaggcttggtccttaagatccctcagctccttcacctccacagtcaggttggccgtcaactgcaagtccgcctgatgcagctcctccaaggattttaacttagcggccatttcgtccatagcatccctggcttcccgcaactcgcgcttggccttggctgtagcctcaccctcccccttcagctccttccagtgcctcgcctccgcccgagcctccctctgttgggcctccccccggtgcttcgcctccgcctgagcctccctgtgttgggcctccttccgaaataccctcctctcagcagacaagtcccgcaaaattttcacggcctcgtccatgccccgaattcagacatgacgaacccgtgatcaattagggtcttggaaaggctggcagtctcatcagtaataaaaaaagaatgaaatcagatgccttaagacaaaatacaaaagaagggaataaatcacaagaactcaccgcagccagagcagcgttgatgtcctgaacttgctaaccgagttcacagaggcacaagcagcgtatctcttggctgggaattgagtcagatgggagacaaacttgctagtcatcaccaaggcaaagggagcaagagtaggcctgacgaagcagttgaaccaatccatcagagggtctatttctcccacttgtgccatttcttaggtcggtcccggatgggctctggacctccgccgaggtgattatgtccacccagagcagcgcagcgggagtccttacattcaggcggatgaccttggaaagattgaagtcatccaccggctgactcttggatatcagcttagctttttgacagttctctgtcgtgtttaagtccccaacgttgagggccttcctgtcgtaagtagcaaaagtcttagcctgctggaggaatacttgagttgtaggggtcagcatgtatggagggatcctaacccactctgtaagaagctccgggcggtccatggcctggaagccggaggaaaagaagaagcggtggcagtactccttcacattcttctggtagttaaaagggaccgggacctaattcaaagggtgggaccgaagtccataaaatccatctttaaatttgtcccccttcttggggacggatacaagttcgtaaaaatataaaatttcagccggactgggcgaaccccagctctgggcggcgtccaaaatgaataagcttgaaagcaggcggcatgcttgaggaatcagttgatacggcgcaaggccaacaaaaactaaaaaattaataaaatagtcctgaagagggagcatagccccagacatcagatgggtctcactccaagctccgaaacccccataattgtgattgattgtctcctcgtctcgaggcagtcagtggaaggtcccggaggctgatggcttgatgcctgccaccgttacgatcttttcaagctggtgggcacaagtcagcgtggagtggagctcgtctacttcccaaccgttggcatgggacttaaaattctcctaggccacgggacccctcatgacctcttctagggtggctaattgaaccgcccccttcttggaagacttggagttaga

SEQ ID NO: 268527 - DNA, 1024 bp, Cannabis indica
atttcttagtggaatatatattagaaaaaataaaatatcgagttaaagcgtggttatggtttttgacctatttttctcctaagcttaaaattggcctaagtgtaggcttaaagggtattttagtcatttatgggaaagtaataggtggcttgtaggttagttgacaggtgccttttgttgatttatgaggtgttatgctaaaaaattaagtgaaaatcaaaatcaaaggaaaattggaagaaaaaccaaaaatagaaaattctctttctctttttcactttcggccgaagcaaaccagaaggaaccatcctttatcctggtgtttttttttttttttgaaattcaactaaggaatcaagtattcttgaagctacggtaaccctagtaccattatcttgagtttttaaagctttgaaattggtttgtgtctgtgatttttggtattggtgactgttagggttagaagtgattcaggttcgaattctaagtttgatttgagttaattttagcttctagtagcttgtttggttgtgttgtgatgaatttatgcaagtttgaacctaggaactcaagctttagtctttaatggaattttgtgatttagtgagttttttttgtgaatttctggttggaataggttgtgtataccctaattaggtactctggaaggtttggttgcatttggtaaagttttgagcaagaaatggagtttttgggtaaactagtgtaaattgtctagccgattttaccagtacttgtaaaatcggttagccggtttttgcagggttccccgaatgttccattttctcaattctcgtgcatttaagtaccgtagttgggtgtttccctatttcctgagttagtgtgatccttaaagagtatagcagaacctagagttgtgggttcgggtttcccagattagggttttgatcatgtgatttacccggtttcattatgtgattagggcatccatcaagcgcaagactttccattcaggtcgaccagcacacttgaatcttgaaag

SEQ ID NO: 268528 - DNA, 1273 bp, Cannabis indica
agatcctggtaaaataaattccaacaagcacatcaacaggaattacatcgagtaattcagcttctcttgttgaggccaaacgggccaaagcgtctgcatgagagttatgagcacgaggtattcgagaaacaaatcactttcttgagtttctgtagcaactcgcaagttagggcgagatatttagctaaacgccctcctctcgccagatattccctgtttacctgacagacaacgatctgggaatcgctaaaggcttgtaaatacttgatcttcatcttaagagtgagtttcaatcctgcgatcaaagtctcatacttggcttgattgttagatgcggaaaattcaaatctgagtgtagcatgtaccttaaaattactagggcttatgagtattatacctccccctgagccttcagtgttggaggctccatcaacatacaaagtccatctttcattgtttggtacgtcaagatcaattctttcttttataagtgccaccttagtacttggaaatttgagtatgaaatctacaagggcttgtcccttgatcgtggatttaggcttatacttgatgtcgaactggctcagctccactgaccattataacaatctacccgaggcttctggttctgctaaaacttgtctcagagggtagtttgtcaaaacttcaatactatgggcttggaaaaaaggttgcaatttcctcgatgctattactattgcgaatgcccatttctccatctgtagataacgagattcagcgtccaggagacgcttgctgacatagtacgctggatactgcttcccctggtcttcgcggattagtaccaaactaatcgcgtattcagacactgcgaggtaaatggataatatttctccaggcatcggcttggaaagaattgggggccgccccaaatgtaatttgtgggcctgaaaagcctcttcacacttctcagtccactgaaactttttattaccttttaaaatttgaaaaaactctttgcacttatctgaggaacatgatataaagcgattcaaagcagcgactttacctgtaaggctttggacctcttttggtttggttggagattgcatttccaccaaagctttaatttttgtgggattggcttcgattcctcgctgatttaccataaagccaaggaagtttcttgatccgactccaaagacacatttaagagggttgagtcgcattttaaatcgttgcagtatttcgaacattgcttgtaggtgggtgacatggtcctttgcatgtt

SEQ ID NO: 268529 - DNA, 623 bp, Cannabis indica
cgtcctgggtcttggtctaggtctgcgtccgggtctagcttttactctgagtctaagtgtgcgtgtttgagttcgggtgcgagtttgtgtccgggtttgtgtccacgtctgaacctcgatctgggtctaggtttgggtctaggtccaagtttgggtcccgagtgcgggtccaagttttggtctgggtgaagatctcagtccagatctaggtctagcatttcgattccagtctgggtcttggtccgagtacagtttcgtatccggatccctatctaggtgcaagtctgtgtttaggatcgggtcccatatttagctctaggtctaggtctcagttctcgtcttggtacacgaccgtgtccgggcccgagttccaatctcactttgggtctgaggttaggtctgtgttcggttcaagtccgggtgagggttcgggtcgttgtcaggtttcaggtccagggctgggtcccaaatcctgacaccgactttggcttttgtccaaaccctgggtccagatccggatcccaatctcgggtcccagtctacttccatttctggtgccgtgtcttgagctgggtcctaggttcaagttaagatctgggttcgggttcgggtttatgtcctgg

SEQ ID NO: 268530 - DNA, 829 bp, Cannabis indica
ctgaatatttgtttgaggtaaccggaatcaaagaataatggacagtagacctcagagagagaacacacacgtgcaacatgttattatatttgttcaaattactacactaagaaaatttagctagcaactaattaaggaacagtgtatccaataggacaccaaaatgagtgggatgtagcacaaaatatgaaagatgtaatagtcttacctcccattgaaagggtaaaatttggaagacaaaaaagagagtatggaagttggctgaaaaaagaaacaacataacaaatacaacaaatgtgaggagctagggaacaacaagagagcatgcaggagaaggcatcaaaaatgaaaagaatcagaacaactaaaaaataataatggaacaacagaggaaaattgaacatatatttgagaataggatattgaagtaaataccttacatacaaatttcattatttttctattgctattaaaaatagagctgtagaataacatttaaaaaatgtgataattacatgaaataaaataataataaaacaaccttaaaacaataacaaaagaaaccagtaacagaaatatgtattcaattctaaataatccactagaaacatgtttaacatgaagaactaaaaaacatgaatataggaaaactacttatttcccagaatgatgagagggagaagagacagagagggagagagaagaggaaaaaaaggaaagaattaagagaaagataatagagaaaagggtattgtgagagaatagtagaaagagctggaattattaaattttagagagtaagttggagagagaacaaaactcttatctt

SEQ ID NO: 268531 - DNA, 544 bp, Cannabis indica
atttcatcttttaatccacaattctcgtttgttatttcagtaattttttctctgatttcagcatttcctttcttaatttcggcattttcttctctaatctcagcatttaatgctataagagaagcactctctttcattaaatcctgcaaatagataagaggtaaaacacaaaatcttttataaatttgtaaatagtatgaaaagagtaaaaaataataatatatgaaataagaaaataaaaataatacctttaacaaaacggtgttttcatctttattcatttttagactagaagaacgatgatttacttcaatctcttttcgtaaatttgtccttctatcattcattcttggactagaagagtcgtgatttaatccaattttctcagcggttgtacttctattatcatccacagaagccaaaggaacacaagtaatctatgatcaatgtaacgcccatacttttataaaaatattaattttatttacaagcgttaatcgcggaaaaccataatgtcgcatttttatttaatacttgaaaatat

SEQ ID NO: 268532 - DNA, 1160 bp, Cannabis indica
tgaggggcaggacgatgtacgtcttgatagttcctccgaggagaacgaagaggcagaggttgtacccccaaaatatgggaagtacaacaacgttggggagccagtcgatactgatggagatgtcctggttgatggcgtggactacgtcaatgaggagcttactgcggcggttcctcatagaaggcagggtgccttcggcttaaggtgggtaagccctccgtccaatattatggaggcgtgccttcgaattcttgaccagggcagatacctgggtgagctggactactacattccctcccataaaaatcgtgccacaaaccctaaggtcagcaacgagcattgatgcccttgcatcaatacttcaaggatgtggcggacttcttctgcctctacccggcccagttcactcctaagggcatcaagtatctgtctgccctcttcgtcctctatgcctcccaaaaatggggtatgccctctccccacgaggttacttggtacttcgatttgaagtccaccactaagaaaggcaggttggggtacttctacttctctcaaccaagcttcaagtggttgacgggcacagacgataaggccatcaacaagattgggcaattttctgatgagtacttcatggtggatggcaggagcatcgctcgcactcggtttcaacagattccgacctatcaccgccctcctctcactcttgatcttaggaatagagctcaaaaacttgcccgacttctggggaaagaacagaatattatctagatgaactctgaggataactttgtgaggtacgggctctatcccaaggagtttactactaagtctgtgacagggaagaagaggaaattaagtgctggccggaccgaagggaggtgaagggaggtgcacgggctgagcaatatgctcaggagcccttgaatcgcgaggatgatgctgaggaagagcaggtgactccactgaagaggaagaagaaactcccggcctcacccaggcctgttgaacatgcgattcgcataagggagcccatttaacctattcggccatcccctcccgtgttcggaaaagggaaatctgttatgtctaaaataagatcgatgtctggtgatgatgaacttttgaatttttttaggaagtcaccttgcatattgctttgt

SEQ ID NO: 268533 - DNA, 725 bp, Cannabis indica
tcccgtttgaaaaaaagataaaatttgaaatctggtagaatacgcgccttctccgtggccatgctgaggctcaccgttgtagcagcttgctactgaaaaatttctgtcgagtatttagatttgtattttggacataacttcttcaatacaactcgaagtcggacaattaaagatctttcgaaaagctgaaaatgagatctaaaacttacatgtttagctccaagtacagttttacttccaatgtcattgaaatttgcaattaagttttgccttgtaaaattgagcttgcatcttctactatttttcaccaaaatgtggtaaaatccctccaaaggactccaaatacatgattagtcttaaaaatatcctaacaaattaaaatcatactaatcaataatttaaaaaattaattttaaaatattaatacataaattgaccatatttataagacaacatattaacttttattagttgtattgttggttattgtttaacaggattgtgtgaactatattgaatttttaacagtaattatgtatttttctaaatgtttttgagattttgtgctatatttatgcgatgtttgtgcgatatcttttctataattcaattgagtgtaaatattttttacgatttataatttttgcaatgtttatgcgataactttttacaaaatgggcgacctttgtgtgattttatttcccatgattcatttgactaaatat

SEQ ID NO: 268534 - DNA, 1119 bp, Cannabis indica
tacaatatggcacgaatttatccctttagctctatgggcctatcgcacttcaaaacggggatctacagggttcacaccattttctttggtttatggatcagaagcagtattacctgccgaaatagctgtgccatcagctagattagctacggctgcgggaatggatgtacatcaagcacgattagaagaattagagctaattgatgaatgaagagataaagcccaaggtaatttattacagtatcaacggcgtgtagctcgagcatatgacaagctcgtacgaccaagaatattccaagaaggggatatggtactaaaagctgcagaccatgtgatgcgagggacgcatgcaaccaagtttgtacccaattgggaaggaacctataccgttaaagaaataaaaggtagtggctattgcaccctcttagatcctaacacaggagtaacacttcctgttacaaatataaaatacattaagaagtacttatcttagaatgataataaaaggtctcaagatctaaaaaataataataataataaatataaacatatatttatatcttcacattctctactctttgtgtcacataatatatattaactagtttagttttattttattaagatgagatctaagaaataaaacttaatatatatatacgtatcttcgcattctctactcttggtgtcatacaatatatatttatatatatgtatattaactaatttagctttattgaaatgataaaacattctctactttttacattctacacgagtgagagtaaaacataacttgtaaaaaaaaactaatactaacttaaaatgtaaatgtcgttctagatgtatatatgcattatacatacctaaaatggccttttacaaagcaagcagttaaaaaaaaacaacgacaatgtacacaatcacacacttaaaaatatgtgtatgcaccaactggtacaagggatagtcattacaaaagaaatgaagctatctccaaacataactattggagacacacacacacacacagacatatatacatagacatatgtatgtataagataatacagtacatgtgtattctacctcaaagacaagctattgtgtaaacgcttc

SEQ ID NO: 268535 - DNA, 622 bp, Cannabis indica
aacagaagataaatatcaaaaatcaattttaaatcaaaaaaaaaaataagtataatgctattactctctttaattcccgagaatgataagccttctagaactattaattataggtcgattatttgttgcaatacactatacaaatatatttccaagatgatatgtgtgttaaccaaattaagtaactaaccaattgttatgtcagataaacatgtagcttaattgtaaatcattagttaaatttttgtaataaatttattcttctttttagctaattgtaatctttggttttgaggtgtataaataaaggatcgaagctatcatttagcttattgcaccgacaaaagacttagtgggaactgccaaaaggcgcatcccattttggcaggtatttgcactggcaaaaggtaaaaaaaatttggtgagaaatttccctctatgaaatagttttaacagggaatttaaagttttaccagcgcataaatgcgctggaaaaagtaaaaaaatttggggataaaattcccacatggggattggttttagggggaataaagttttgctagcgcagttatgaaattgaaccatttaatgaaacgcaacgtttcaacttaggatgacaaaa

SEQ ID NO: 268536 - DNA, 1045 bp, Cannabis indica
ggaagatggtgattttccaaccaagagggagaggaaccatttgtgtttgtgggatcagtttaagggtcctgaatcctagtaatctcagtattgaaagctagagatttgttacaagatggatgcctagggtttttagcagtggtattggataccacacggtctgaatcaattcggccagaagacattaaagtggttcaggaattgttagatgtatttcttgatgaacttccgggtttacccccgtagcgggaaatagatttcgttatcgatttagcacttaaagcagagtcagtctttaaagcatcttatagaatggctctgtcagagcttaaagaattgaagattcaactttaggggatgcttgacctagggttttcacgacctagtgtgtcaccctagggagctcacatgttgtttgttaagaaggaatacagatgcctacgcatgtgcattgactaccgggaactaaataaattggctatcaagaataagtatcctttacctaggttcaatgatttgttcgatcagcttcaggaaaagatgctcttttctaagattgatctctaatcgggctatcatcagttgagaattcgagaggaggacattccaaagattgatttccgcactaggtatgggcactacgaatttttggttatctcttttagactaactaacactccaatagcttttatggatctgatgaatagagtattcaaggatttcctcaatatatgtattatagtatttatcgacgacatccttgtgtcctcttaatcagaagcagagcatgagcaacatcttcaaatggttctgcagcgattacaaaaacataaaatgtatgccaagtttaaaaagtgtgaattttgactatcttaaaagtcctttctcggacacattgtcagtaaagacgggaacaaggttgatccagggagattgaatcagtcagggattggccgagccaaaagatggtcatagaaattagaagttttttgggtatggctggttatattgtcaatttgttaaaggattttctaacatctcaaca

SEQ ID NO: 268537 - DNA, 684 bp, Cannabis indica
ttttttggactggtttaaagagtttttgatgagggggagatcgagcatgttggatgagcttttaatggttggttggagtatttggaaagctcgaaatgagcttctgtggaaggaccgtacgactgctgctgctgaagtgattaagttagcaagaatttcactcttcagctagacatctgctcaacaaaatcgcctggaaccattactgtttgactctaacacattgggcagcagtgatttttggataaagcctactgctggaatgataaaaatcaatgtggacggtgctatatttgaagatatcactcagtttggtacgggtctgattgctcgggactgtcacgggaagattatcgaagctttctctactttgcatactggtgtgtgccaacctgctatcgctgaggtaatgagcgtcaaagaggcactcagctggcttaaaagaaagaatctatccaatgggttaattgagacagattgtattgttgttgtttaggctatctatagctcaattgcactcccttctatttttggcctgattgttcaagagtgccaattgattttatcttcccttaataatgtttcgatttcacatgttaaacgatctgctaacaaagccgcacattgcattgctcgtggcgcttgttattggtatgatcgtctttttactgagagcaatattcc

SEQ ID NO: 268538 - DNA, 1268 bp, Cannabis indica
atatggcatagtgtgcatgaagagttgggcggtcaggcattcgcgtgtgggcatgttgttgagaatgccactagataaagttggggagagatcctcacagttcactcatcagatgtgggattcattacaagcatcgagatgggtatcatggagattgattgttgttcaggatgtaaagtcaagacgactcgggacacaggcagtgccggttatctagggtaaaagtctacaggactcaggtactaagataacaccatggcaatgttagcctaaggtgaaagtcagcaggactaaggtactaaggcaacatagaaatgtcgaggggcgaagagttagaatgaccgaggcattagttcaacatcttcatcaaagtgacatttggaatggagggaccgtatgcgagtatgcggttagcttgcgagctataccttgaggggtattcctctaagagagaagtttttcccaagttaaagtgggggagcccactaattcatatgtttgaagaatcagggtacttgttcagttttggtgtgtgaatccagagggaaacactacaacagatgggttgttcagtgcgaagacttgcatgattgttgcaaactgcagatagacaatatgtaggggcgtaggctgagatcaagactgggcttgtttgcggcatgtatgggcatgttttgtgtttatggggacgttggtgttgtatgggacactgtaagccgaatggttcattgagcatatgccgaaaggagagatatcggattgggatgacttcaagttttaagagtaagactgattgttatcaagtttgtcgaaagttatcgagtcatcagaggatgtagggttgattttaggagatggacctgtgacacagtgttagtgagccgacacaagcaggagccatagggcaaattcgtggttttgggtgattgttagatcattgaccacgtgaaagaatctcgaaggagcacgtatgtagtgggttagaggggccttttgcatgaagtcgtgggtgtacgatagggtcggagggccaatgttgagaacttcacaaagagattttgtgcaagagtgcacttggtgctgcattgggtgtagttagcttgcgagcctcgtctaggtgggatgcaccaaattttatcctgcgataggagtgtctagctcgatttccatcaggaggatggtgcaccatggagttggcatgtgaagtttctggagggacttgtctagggggacttagcttcagttgaagcgtgttctataggtgccat

SEQ ID NO: 268539 - DNA, 613 bp, Cannabis indica
tctaccactttcttgtacaaagtgtcatgtgaagtggtaatctttaagtcccgactgattgtggcattcagtcatctcacatatttctgttttctggcaaaatccgtgagcaccagatcactagcaaacttagacagccgatcaaactccagagtttattcggccactgacatctttccctgagtaagcttcacaaagtcttccatgtgtgaagttctcacagcgatgttgtaaaacttttcatcaaacaaacttttaaattcttcccaagtcattacactgacatcccgggtttggcccacgatatcccaccaacgtgggcatgatcttgtaacatgaaggctgcatagttcactctttcagttcccaccacccccatattatcaaggatacgggtaacagtactcatccactactcgacctttattatatcaatacctccaagaaaattcggaggctgcaacttcacaaaccgctcaaatacagagtctctatacggcataacaaacccctagttacccaccactgacacaagtgctggtggtaacacttgatcaacaggggcaggtgccggttgccttaagcttcgtaactcttcttcttgaagaagtat

SEQ ID NO: 268540 - DNA, 1043 bp, Cannabis indica
aaataaataagaaaaataataataaaataaagtgaaaaattcaaaaaataccggatgtgttttgtctcgtgacaactgatgaaggctctaattgttcttctccatcagattcttcttgctcttctccatcagattctacttgttcatctccattagattttgcttgttcttctccatccaattctgattgttcttctccatccaattatgtttgttcttctccatccaattttgtttcttcttgtccacttgattctgatttttcttctccatttgtttcagattgttcttcaaaacttcccattgactaatttaaataaaaagaggtaatattatatcaatcgagtacaaacataatagtcaagctttacccataaacgattaagctcaactgaagatagttgagctttatactaacattacaagaatttggagactacatcttgaccatgaatggtcgagttctaccccgtatagtcgagctatacactaatatttcaagacttttgagactacattggtcgagctctactaaaagcagtcgagattataatctcggccatttatgttggagctctactaacactaatcaagttatataatatatcaaatagactttgaaaatctcaaacatatttggtgaagttctacccatttacctcattatttgattgagttattgttgtgcatgttggaattattttaccaggatcttagatttactaacaagtatgttattaatatcctaaatatgaacttctaaaacgatatgaaataaacacatataaagtataagaaacattacagtggttgcagcagaatataatgtctccttccactcagatctctaacccttgtatcctttctgtagcagagtatcaccaagatctgagtctgaatctccttctcttgaaactggattcttcacagccttacacactatgattgagtactacttgatgtgtgtgggcactcactctttcactataggctcggtttagaagagggaagagagagagtgtgtggtttcagctagggttaag

SEQ ID NO: 268541 - DNA, 585 bp, Cannabis indica
aaaatctccgaaattgagaaattataactctaatatttatttctaaatatttgggtccacgaataattaatgcataaataattataaaataacagaaattagtgctaattgccttttctaatccaatttactaaagcggtcattacaattcatgaggtcacttgtccaagcaattgaagagggtcactcgaccatgcttggtcctagtcactcggccatgataattcaagaggtcacttggtcaagatgaccttgaagtcagccaatgaaaagggtcactcaaccatgcttagccttaggtcactcggccatgaccattcaacagtccctcggccaagccaatgaagaggctcactcggccatgcatggccctaagtcacttggtcatgaccattcaagaggttactcgaccaagatgaccttgaagtcactcggctatgcttggccctaagtcactcaaccaagctaagggagaatgtcacttgaccatgaggataacatgcaccactcgaccattagagtggtgaggccactcgaccaagagaatgacaagaccactcaaccatgaaaaggccaaggtgtaac

SEQ ID NO: 268542 - DNA, 678 bp, Cannabis indica
gagctcaccagaaataatagaaccttctgtaataggaattttgaccacaatatcaaacaacagtttgaagtcgggggtcctagagctgctccaccaactaatagattccatgactactccttacagtagggtattacaaaaactaggaaaacggaaaaatacaaagtgggtgttcgtttcaacgaacccaaagaaaagtggtagaaacaaacgaaaaacccagatacaaactaatcttacgtttagaacaaaaacgaaaaaccatttcccttttgacaacaatctaaaaaaaaaaaaaaaaaaaaaaaaacaaaacaaacaaacaaacccatatcaaagcagagagagaaaatgtgtatgtagtctcagtgttcgtagtaaggaaaatggagggaataagtgaaaatactgagttgtgagtcagttacaaggatttcatgattaaatattggttttttggttgagaattgagaagatgtttcttagaattttcttaggaaagaaaggtgtgaaaatatttgcttggaaatgaagctaagaaattgcgaattgactgagaaaaaaaattaaaaaatggaaatcaattaatctatctggtatctatgataagcaaaataaattaggtgttaatttcgtactagttataattttgttctgttttaacaaaattaatttttt

SEQ ID NO: 268543 - DNA, 817 bp, Cannabis indica
aattaaaattgacatgaattaaacttcctaaaactaaaactactgctgctagaaaaattgcttacaagataaaaaaatgtaatatggtaaaaatggcttgaatagctaattccttctagtcaggttttttcccaggtgttacagcatcagttcagcattactccaacattctgcacagagataacaaaaattcctctaggcttgtgagaattttccaacactcacaaatttaattctaccacttagctcaatatattcctatatcaaaccagcaagcagaacactattcaaacattaattttataagttatgcaaggtaaatgaaatattcctattccacttacaaagaaaaaacctaaatctaggttttcacttgctccattcaagttgaactactagatctagcccttccggaacaagatctagcttagcaaattgttattcatggccaagaaacaacaatcaaatacaatgaaactcacttgaatgaacaaaggcaaaaacatgctaaagtaagcttaaaaattaatcatacccaacttagaagttcatagccattcaagcctcaatagtctagctcatattcaagtaagaaagtgaaatcaaagctaaaaaattattttccatggctgctgcccgtatgtttttacagttcaacaagtttgaagtctctagagacaagaaacaacaaaggaaaaaagagaaagaaaaagataaagagaaggtaaaagaaattcaaacacaagaacttgtgtccttctcccttgcactttggtccccctctttgttcttcttcctctgtacttctgcaattaat

SEQ ID NO: 268544 - DNA, 689 bp, Cannabis indica
ttcttcgcaactatcatcccacataaactttacttcttttcttgttaactttgtcaaaggcatagcaattcgtgagaaattctctacaaagcgacggtagtagcctgccaacccaagaaaacttcgaacttcagtgacattctttggtctttcccactgtagaatagagtctatctttgcaggatcaacggtgataccatcttgagaaattacatggcccaagaatttgacttcagtcatccaaaattcacacttctctttcttagcgtataattgatgatctctcaatgtctgtaatactattgtcaagtgttcagcatgatcctcacgtgtcttagaatacaccaagatatcatcgatgaataccaccacaaacttatccaagaaaggtctaaagactctattcattagatccataaatgcagcaggtgcattcgttaacccaaatggcattaccaaaaactcaaagtgtccataacgtgtcctgaaagcagtcttagggatatcttcttccctaatcctcaattgatggtagcctgacctcaaatcaatctttgaaaagaactttgaaccaccaagttgatcaaataattcatcaatcctcggtagaggatatttgtttttaattgtcatctgattcagctttctatagtcgacacaaagtcgcaaagtcccatcagctttcttgg

SEQ ID NO: 268545 - DNA, 724 bp, Cannabis indica
ctatcattcgtttgctgacgtaatacacagggtgttgagttttttcctcctctcggaccaaggcaacactaaccgcgttttcagagatagccaaatataagtacaagtcttgtccgtgcacccgtttagataagacaggcggcttggccatatgttctttcaatttcctaacgcttctttacattccttggtccattcaaatttttgaattttctttaaaatgttaaagaacaggacacacttatcagtgtatttggagatgaattgacttaaggtagctattttttatgtcaagtggagaaggcatgtctatcaagacctatatcttctcagtatttgcttctatccctcgttggcttactatgaatcctaagaattttcctaacttaacaccgaaagtgcattttttgagattgagcttcatcccgtatttcctcaccactttaaaacactccttgagatcatctgaatgatttttgttagttttggacttaaccagcatatcgtttacataaactttcatgttcctttccattaaatttttgaacattcagttaaccatgtgctgatatgtggctcccgcgatttttagctcgaaaggtatgactaggtaacaatacacctctttgtccatgcaaaagctagtacactcttagttgtgtatctttttattttttatttttgtaaaatatttttacttttttaatttaaaaattaaaaaatt

SEQ ID NO: 268546 - DNA, 1424 bp, Cannabis indica
acctgttgctgctacaacaaccattgatcaacaagctaactcccctgctatctcaccaaataacaccgctccacctaacctaccgccatttccaccagttaccattgctgaacaacttgccacaccacttcctaggcctatttccacttcagccgaggctctagcggccaccactggggcccctcaacatgtggtgccggtctctcaagctttttctaccatattagcggacctgcacccatctcagccacttcgcttcgctgtgggctcttctgcaaaccctgctccaagctcctcaagggttaggaagttcaaacctcagcgtcccgattgcctgaacgctgctgaatttagaagaatgctcaaacgcacacgcaatttagccaagtcccttgaagaagagactgttgaagaggcgggtgacgctcagcgtacccgcctagagccatgagcatcatcagctggaatgctcgtggattggggagtaaacgagcattccgttctctctccctgttggtgaagcaaaaccgcccaacacttttgtatataatggagtctaaactccctgttggagctttaaataagtttgcttcgagtcttaaatttcctaacggtttagaggtcccacgtgtcgggcttagtggtggtcttttgttgctctggacacatgatgtggatgtaaccttgctttcctataatataagtcattttcactgttatcttaagtttcctaactttactgcttttacttttactgctttctacggtgcaccacacgctcaaaataaattgcactcctggcatttaatagatcgacttggttctaaccctcggctccagccttggctcattatgggcgattttaatgattacctgtctctttctgacaaaattgggggtaatatgtcacgtgctccatccacgcaatttcaatctttcatagacaatcatgaacttcaccctctcactccgttaggtaatctcttcacttggactaatcgccaaaagcaaccaaatcacactcaggaacggcttgactggtgcctctctaatgatgcttgggatgccatctttcctgcttcccgtctaaatcatggcgacttttttggttctgatcatcgccctcttattctcaccttgcattatatgagcgatcatcgtaatcataccccccgtttcatttttgataagctttggatgtccgaaccttgattcgagaattgcttgcgcgattcttcggcacagactagttcgaatgctcactccaatcctttaattggtcttaatgaaagactaacaaattgctcctctcgactcaaacattggaagcaatctctgggcccccgcttgctactcaaatccgtaatgtccaatcgcagctcaaattatcaactccttacccccaacctacgaactgatcactt

SEQ ID NO: 268547 - DNA, 654 bp, Cannabis indica
tcaaaaccaattggataaaaccttaaagatcttgcaaaataataggggtagataatatatggatatgcagttcaaatatcatttaattgtacttggaattgaatcccaactgactgtccttatcactccacagaaaaataaagttacagaaagaagaaatcacacgcttttagaaatggttaggaacattcttagctatttaactctgcatacgtccttctggggatatgctattcagatggcaactgacattttaaatgttgtttcatctaaatcagtccctaagacacctttagaattatggagtgatcgtatacctagtttacaccactacagaatttgggcgtgccctgctcatatcttaagaaagaaagatggcaagctagaaaagcaaactgaagtttgcatgtttgtcgggaattctaaagagactaggggtagactattttatagccacaaggatgataaagttttttttttttttctacaaacgccactttccttgaagatgacaatattaatattgactgggagcgctaacattaatatggaatctatagcttctatctggcgaatagagagtaaaggatgatttccttcgagctttaccaaacgaaaataaatggtggagtactcatttcacatagctgaaat

SEQ ID NO: 268548 - DNA, 743 bp, Cannabis indica
aatgcttaatacgaacagatacaaaaaaaatgtaaacagttttgtcataacacttttagattggattataattaaactttattttgacaaaaaaatcaattcaaggtcctatttgtactattttagaaaatacagtgtctattttgtcatttaacaaaacacagggtccaattggtaacttttgtaaaacagagggtctaaaatggtatttaccctataatatataaagatgtgtatttatatatatacatatttatatatttgtttttttatctttttatcttctctttttcaaaagtgatatatggggccaaattagtttgccttttccctcttttccttcaagtaattgggtcctcccccaaagttggctatatataatttgaggatattagaaactaagtagctaaaatatatggatggtttcaaaggtaacatgtgtatatagtgatcgatcgttacactgaaaaacaggtttaaaatatatgtttttcttaggatctccgactttaattgaagattatgacttttaattttatttttttcttttacattatacatatatattccatatatatgatttacgacatgcaaaagattgatgatcaataatcttatcggtatctgtctaactagaatagatagatagatagatagatagctagagacagagagagagtgtgtatgtttgagagtctcatattgctaatgtgtgaaaagataatagaatatataagatgaat

SEQ ID NO: 268549 - DNA, 783 bp, Cannabis indica
ttatattatttatattaataatctaaaatagctaatctatagaaataattattaagaattatatcatgaatactagtaagaatttaaaatacttaaaagaattttaaaaaataaaatatttattgaattaattaaattatacacatttttaatattaaagttctatagttgatcctaatatacctgactattttcaaaatgagcaaaaaataattatgcaaaaagagctcaccaataatatcaagcatctcaagaataataagattctcaatatactcaaagtccaatgaacctacaaaacccttcaagttgtatctgattaaatccgggcattgtagacattttcccatttccatccccaagcattttttttttatttcccatttatatttatagaaaaaaatcccattattttcccattcttcatcaaataagatagatcgatatagcaatgatggaatttctattctgtttattactgaatcacatgaaattttacttaactccatataatataaatagatggagcaatacgtatgaacggaggaataaagagaattttattctcaaatcggaatttgcaacagatacaaacggaaatggggcgataaattccacttagactttaaggagttttaatattcttcaagactaagattcataagtgatcaatttgactattaaattattatttaacttaatgtctttctttttagttttataacttaatgttatgttgtttttattttattagcattagttttttttttttttaggaaatta

SEQ ID NO: 268550 - DNA, 662 bp, Cannabis indica
attaaaaaaaaaaacaaaatatgggaattgggcctggattaacacaaatatggcttttaaaaaacccataaaaaggaaaagaaaagctaaatcccatatacacaaagctttatttaaacatgccataaaaaagtaaatggtaaaaaaaatcccataatttgggtaatttttacaaaaatatattgggaaatctaataaccttcctcacctgaatagtagccatcttcctcaccaccttcgttcctccattcaacatcgccagagccccttgcaccctacgatttcagccctcctccttcgtcgcccttcctaccttcgttccaacatcaccaccagcgatttcatacctgtgcatcattctttctgcaatatcaaagttaggtaaatttcattttcttaaatctctatattcttaaatttaattatccattttatatcctctgatttttttttaagtttgtgcctccaccagtagtcattaatttcctcttaccccttccattgtttgatcattggttctaatgtagttcactaattaaaaccccatttcaaatttcttgaatattgattctgaaactgcttagacactgaaatatcttggaatattgattctgaaactgttcttcttctcaaaaaaatgagatgatatatatatatatgtg

SEQ ID NO: 268551 - DNA, 797 bp, Cannabis indica
tttttgtagtttcaaatcttaaaaacttgttcatactaaatttgctattgaattagtcaataatgataaaagccaatacaactgaaaatatatggtgcaggagaaactctgttcagacaaatgtaaaggattgtagcaacaaatttcaagagtattgtctttacaacacataacaaggtctgcagtttaatttggaagcttgttttgatgagggtagtgttttctaatcatttttcacctcaaataatgtttgctcattaaattaggcacttatgaaatttatttataattcttagtctgaggctttgattaaattttcattgttttggactttatatgaaaattgtactcacaactcacacttgaaagaaactacatacaaaatatgttgaagtagttagtgaaatttttgcttccaagggcatgttgttattctaatttgaaaaattatttattgctttgttagaaatttaattgtaaaaagtaccatatatattttttgtaggtgtcaatgtaaacattttctgaagataaccatatattgtttcaaaaaaaattcctcttttattgttgtgttatatcaagtggtaatggtaacttgcttgttgaaaaagaaaaaaaaaaagaaacaagaagtgttactaataactttatctttatatatttgtaaattttgccaaggccatagagatggaaatttatactgcggggatgggtaatcgcgggacccgcccctaatagggtggggattccccgttttagtggttaatgggacggtgatgggagacaatttcaat

SEQ ID NO: 268552 - DNA, 1095 bp, Cannabis indica
aatgttagattaataaaatactaattaattgttgaataaataaaaactttattaccatttacatataaaaaaataataatattttctaaatgtgaaatttttacagagttagattataaaaaaattgaaagttttcaaaaaataataaaatgcattaaaaaaatggacttcttcatttttacactttaaaccagctttttacatttttacgttattctacatagaaacccttattgcaactagcgctgcaacctaaattgtaacagaaaatcgtacagaaacccctattgcaaccagcgttgcaaccactttagaaacccaaaccgtaaatttaaaaaaaaaaagaaaaaagttaaaaataggttatggggtaattctccttaaaaaatatgatccatcttatcagtcttaaatatataaatttactttttttaattattaacaattaatttattaaaatattttttgagaaaaattattgagagatttttttttttattaaaaaatgataatcagtacttttcaaaaagaaattaacagacacaaataatagacataatattattatcactaatcaattaataaatatacatataaaactttatttaaactttcaataataaattacaatatattaatatcaattactacttaacttttttaaaaatggacatacaattacttaattaattagtttttaaataaattaattaattagcattattcataatttgtaattaaatattaaaattaccacaaaaataaaaagtgttatgacaaaactatttacattttttttgtatttgttcgtattaagaattatcttcaagttggttatataaaaaaaaattgtcaaaaattaagctcagaatcctatttttactattttaaaaaatataggatctattttgtcatttaataaaacagagggtccaattgataacttttgcaaaacacgtggtccaaaatggtatttacccttgattatacatacaaacaaacataatatataatataattagcatggaatagtaactcattgttggaaatattttaccaggatctagatttactaccaagtatgtttcattaaca

SEQ ID NO: 268553 - DNA, 541 bp, Cannabis indica
atggatccgtggctaccaagtattgagtctccaattccaactttggattcaagcgcttataatgatctcaaagttcaaagtttgttcaaggtaggggctagggagtgggatgaggaagtggttcgggatatcttctctgcaagggaagctgagctaattatgggtattcctttagctaggactgatgctatcgattcatggtattggttgaaggaaacctcgggttgttactctgtaaaatcagcataccatttgcttatgaaccgtgataccaatgttgatggaagggcgggggattcaaagttttggaaagagttatgggaaattcaagttccgcccaaggtcaaagatgttctttggagagcagcggctaattgtctccctacaaggaagagactttttgagagaaaggtgcctttagactatagttgtccattttgcttagtctctagtgaaactatcactcattgtctccttaattgtgattttgctactgcttgttgggagaggcttgccgtgtgtgttggggtcggggttggga

SEQ ID NO: 268554 - DNA, 574 bp, Cannabis indica
gtccaggtcccaattaatgtgtgttttagggtcccggtctatgttcgggtttgagtcctagtctgggttcgggtttaggtctctgtttgggttttgatctgggttcaggtttgggtttaggtcctggtcatggtcctagtcctagttcggttctagttccatttgtgattatgagttcgagtttggggttgagttcgggtcggagtttgagtccttgtctgagtttaggtttgggttcgcatttcagtctagggtttgatcaggctccgggtgtgggtttgcctcctgggtcttggtctaggttgggtctgtgtcccacgttccaataccgatctgtgtctggattcagttctgggtctaagtctggttcacatcctggtctcggttcgagtttggttctgtgtccgggtctagctttgggtctgattctaggtgtatgtttgagtttgggtccgagtctgtgtctgggtttgtgtacaggtctacaccccgatcgaggtctaggttcaggtctaggtccaagttcgggtcacgagtgccggtccaagtttgggtctgggtcaggatctcggtc

SEQ ID NO: 268555 - DNA, 690 bp, Cannabis indica
ttctggatggttttcagatgttccttaagagctacaagcttcctccaataccagctcgaatggatagaagctttgtaactccaccaagaatctcttttgatatatacactatgcacccatctcaaccacaaactttcttgctgatttgcaatagcccaaatatacttacacatagcagccctattccactcttcaagtcttttaatacctaagcccccctccttttttgagagacaaacattttcccaagctactgcaccacctccttggaaagtagcttggcctttccaaagaaatgctctacagatagcctcaatgtttttcagaatcttcttaggtagaatcatcatttgactccaatacgcttgaatggcaatgagcaccgagttgattagagttatatattctccctgcaaaagacaaatttctcgaactccaactcttaattctagctgtcatcttttcagcaagtaattcacagtcctttccagatatctttttagaagagattgagatccccaaataagtgaaaggcaatacctgttgttggaatccagagagagccagcagctgttggacctctctttgagacatattactacaatagcaagcagttttggaggcattcaggcataaaccagaagttcttgaaaacagcttcagggcctgtagcatataggtgatactcct

SEQ ID NO: 268556 - DNA, 1028 bp, Cannabis indica
gatttgcatagagatttccatctcttccaatgtttttgtgccattttgattgctaccccaccagaagttggccatcatgctctccaattgatcacaaaacttctttgtaagtttgaaacaactcattgcatatgttggaatggattgaaccacagctttcaaaagtacctccttgccaccaacagaaaaaattttctcattccaagcattaagcagtttccaaactttttctttgatattactgaatagctcctgcttgtcccgaccggagtatgagggcaatcccaaatatcgctcatggcattcagtaataggcatatggagagtatgagcaaaataattctgtgcagcttgagaggtattcggcgagaaagacattactgatttgtcattgatgagtacttgccgcgaagccttatgatatgtatcaagtgagttcttaatagcaatggcagattgtttattcgattggtaaaataataaactatcatccgcaaaaagcaagtgtgacatagtgtgtaacatcatattaacgtgacaacttctataattagttatgagttatttatattatttattaaattaatatatactattgatattaaaatacacaaataataatatgtgacttagtaatattgtacatgtatcttaaatctctcatcataatattgtacatgtatcttaagaagagatactttgcttgaaagtataaaaaaaatctacaaacaataaaataaaaaattccttaccttttttttttcttcttattttggcatcaaaattccttacccttttgaacaataaacacacacaacaaaaaccacccataacactatttaaaccaaagaagccaaatacaaaaaaataataataccaataaattcaagcccactccttctttcctacaaaccaactcttccatttcaccccaaaaacaatccaaatccataaaaagcttcaatctttcaccttcaatggcgtaaagcaaccccaaaatcactcatcaaagtaaaataaaaatccaa

SEQ ID NO: 268557 - DNA, 584 bp, Cannabis indica
aactcttatggctatggagtagtggcgagggatcacctaggtaggttcttagaggccaaaacatgccattgtaatggcacctaccctgccgaagtgattgaagctttggggatcaaggaagctctaagttggataaagaacaagtcttggaagaatgttgagcttgagaccgatagtcttttatctgtgcaagtaataagaagcaaccaaaaaatgtcttctacttttggtattgttatagatgattgtcgtttgttattatctcttttaaaggatgttaagttacgttttgtaaaacgatcagctaatcgagttgcccatgttattgcaaggcagtctcgatttatctctggtggttgcattctagagtaagatatccggtccgatttgagggatatcttgttttctgaatgctcttgatttaatgaagttgatatttcattcaaaaaaaaaaaatactctacattaaagatgttcttaatattcactttaattatcattttcaattttttttaattatacgtaactttgtaagttttattttttttaattattacgcatcgcttaggtgagattttcttata

SEQ ID NO: 268558 - DNA, 657 bp, Cannabis indica
atatttaaataagtgtgtaatttgaagtgaattgagctgtaattctaattagaatgctttaaactttaaatgtaggaaatgctatggctgagttggggaggctacttatgtatgaggctgcaagggattggttggttagttgttactggaactcatcatttagttttagtttttgtttaatcctgtttgtcttacacccctaaacttggactgaagcccagacatgttcttttttagtttttatgttacacttttgttaggagttctctacttggttgttaatttttgggaagatttacctgagataccggtctttcttatggatgtcagcctaccgtagtgggagagattcagacaccaatggatgttgcaacggttgagttcatagacccaagagaacctgttgcggttagtttaatgtttatctctctctttggttgtttatgtacttttgtctatgcatatgttatcatgtattcatttcctcttttagttctgcaggtcattccaattttaagggctggtctagctctagcagagcatgcttcatcaattttgcctgcaacaaaaacatatcatctaggtaagaaagctcatactcacgattacacttcactattcggcatttgattctgaaacttggtatttgaattcatt

SEQ ID NO: 268559 - DNA, 796 bp, Cannabis indica
ctatgcgatatttggtaattttacaggttaatattgtctaattttcacgatattatgcgatttttgtgcgatattttttgagagttaattgtctttttctacaagtttttttacaaatgttacattatttgcgaaatctgtgcaacatttgggcgattaaacttttcacagtgtaatatatttaatatattgcaaaagattatgtctatatgaagtatcttacaaaaaaactattgtccacaaaaaaatatactatgcaaataactaccatgtcaagttctggtaaataagtacacacaccacctatgtctaaagtgagcatgttatcatctgtaacatgctctaacgaacggtccaacatacagtgctcaatgtattcgatggtaaacattccacaatcgccactacaaattaaaaaattaataaatattagcaacaattaagttaagtaattcatagtggagtgcaaaattaaataaattaaaaaagagagattcaccttgttttcgtttgtggtacaacttcaggggtagctcttctataatgcattggtaggagctggctgaaatcaccgcaatcaatcggaagtacataattgttcaattcaaaataaccgctcaaattatggatacaaatagctcgctgtaaggcttcaaatatgactccatgttcttctcagtagtggcaccaatatcacaatcatatacaataatctcccagttgtcaatatctacctcaactaccacccattggtactctgcgggaaggttcaactctttctgacttctcttgaagt

SEQ ID NO: 268560 - DNA, 501 bp, Cannabis indica
tgttttccagtgacctggaaaaaaaaaggaaaacaaaggcaaattcccttttatgtcaatatgcaaaaccaaaaagttatacatgtaaaaagtgcatgaacatgtagccattcatttttacttactttgtcaaactttttcaaaatctttatgaaggcaagcatgttcaagttcctgaaatcatcatcatcatcaagaaaaaatatttagataattgtttcccaaatcaaaactgaatccacttttgtttagctgttacatgagagacgggtgtgtttatgtttagtacctgtaagttttgaggtatcctaatcctttatagagctcaacaaaagctcctttgatcatcttctctgcatgatgaagcttagttttgttgattcttagcttgttgccttcctgagtgcttttctttgaggactgatttccttgatcttctttgaaaaggtagctaatcgccgataaggtacgcgagggcgttgtgagaggaatgtttatgcc

SEQ ID NO: 268561 - DNA, 747 bp, Cannabis indica
aagaaaaaccacctccttcatggttgaaaacccaaaaaatgttaatacaccacttgaggaaactaatcatcgttctgggaaagagcccatgggctctagaaggtctaccaacccgcaatctagacgaaccacccgctctaggaggactaaccaaagggaggtcccagcgctcgaaccacacgttcacggagaacccaacccgacgttggtcgtagtacgcagacaacacgctcgaggagaactcggtgtgggagtagctagaaccctaggacaagggatgaagagctcaatcgtggggggacccagcctatggcagaaagtacctatgaaacggaaaaccgtcgcttaagacgttgtctggaagaggcgcagcggcaaaatgctgaattggaatgtgaggcagttgcggtcaggatggcacaggggacgaatgctcaaaatcaacctaaacttggagtgagaagaccacgaggtagacctcgtggctcacgaatcaagagataggaaaattctcgggaagaacaacccagggaaaatgagataccccccgagaatccaaatgaccagccaaaccctctcacaaaaatgagaatgggaggaaacaagaaactgatgaacgagaaattcctcatgaaaatgaggaaaatcttgggaatcagcctagcgaacgagggtcacctacgaggaatcaccagcattcttcccaaacccatagagcgaggactcatactgtaacgtccccgcttc

SEQ ID NO: 268562 - DNA, 627 bp, Cannabis indica
aaaaaaagtagtttttctaaatagtatagatgacaaataaaccagttgtgtcacctgatcgatccaatcatgaaatacgatcaaatcaaacaagcaaacatttatcaataataacagataaaattctaaaaaaaattggacagcatttcccctataatattaacctaaccatctgttatagcgaacaaataattcaaacaattcaaccacatgcaataagttttcatccttataccaccgcaacacaatcaaattttcgcagaacctacttcactaagggacacaagttagaaaccttccgttatcaccgcaacatacaattatgaaaacctacttcactatggatgaatatttaggatattcaaactcctctaacattggtataatattaattaacataaaaaaattaatatgcacacgtacctcttctaatttaaaatgatcacgttaactttgtaacaatccttgctagtaaccaaaacactaacaataaaaaaaaaaaaactattaaaataggtaatagaaatgacaatcatcatgatcaagctaataataataataataataataataataataaaaagtatagttgctctgcttattattctctttcttatgtttgatatt

SEQ ID NO: 268563 - DNA, 580 bp, Cannabis indica
gtgttccgtcaccttgcaacaagcttggaggaaagacaaagtgaatgtggaagagaagaagaaccaaataggtgaaagagacttgatttttaaaagttctaccttgctagtaattaactctcaaaatttattttttcgcggcaaaattcgggttctgttagcattttgatatttttattcattttttgctgttagctgtcatgatggactgttcatgtatttatggtgtacacatgacacaatttaattgacaaacgtaactaaatgaaatttaaaataacaaaaataaaaataaaaaatatgtatattttttttttcttttctactatttcttctttagagattttatttttctcttctactattaccggtatataatatacggtatatataaatgaataagaatttttcaccattaattaagtaataaatacatataagatacggtatatataataaaaataattaaaagaatacataatataaaaaggaagatagcaaaggaccaaaacaatagtgccgtttgttaacacttttttaatcagttttctatttttaaaattgaaaaagtgaaaatatt

SEQ ID NO: 268564 - DNA, 584 bp, Cannabis indica
gaaagcaataataagcatggccaactaacctttcaagcatttggtcaatgaagggtaatgggaagtggtctttcctagtgacactattcaactttctatagtctatacacactctccacccagtttggactctagtagggattaactcattttgttcatttttaacaacagtgatcccagacttttttggaacaacttgaactggactaacccatggactgtcagaaatagggtaaatgatccctacatctaacagtttaattacatcatctcttactacctctttcatgtttggatttaatcttctttgactttctcgggagggcttagcattttcttctaaatgaattctatgcatgcacacagctgggctaattcccttaatgtctcccatggtccaacctatggcctttttatgttttctaaggatatctaacaactttgcttcttgtttttcatctaaatcagatgcaatgataacaggataggtgttagactctcctagaaatgcatatttcaaagtgtcaggcaaaggtttgagatctaactttggtggttaaggagttgactcaacatgctctaat

SEQ ID NO: 268565 - DNA, 2136 bp, Cannabis indica
ctatgagtcgacagacttagtaagaaaagcatataacatatcatacaataccgacttgtatcaaggtgcccatacacctatttacaaggcttaacagatgagtaagaacgttccatactagggtacaaccactataccacatacactacgtacctcactgtacgagtgttggtagggtttgtttcataccctgagtaccactgagtgatataccacacacaccctataccttctcgtacttgtgctggtatcaccgtaatgtactccttaacaatatacactataccaatgcactctgtaccataactgtagaagtgttggtagtgttacaaaaatataagcatgcatatacacttaacatatacatacatttgcatattcatattacacattatacacagttcttatctcctttctagattcaaatgtgttggccgacctgaaccaaaagtctcatgctggatggatgtcctaatcacataataaaactgggtaaatcacatgtccaaaaccctaatctggaaaacccgaacctgcaacccaaggttcaattataatcactagggactatactatcttacgaaacagggaaacacccaactaaggcactgaaatgaaccagaattgagaaaatgggttgttcggggaacctgccaaaactggttaaccagttttacaggtactggtaaattggttaaccagtttgtaccagtcttccccaaaaaacttaaatccagcttaaaactcaaccaaatgctaccaaaccttccaaagtacctaaacagggtatatacaacatatctcaaccaataacactcaaaaaaacacactgaatcacaacatgccattagagacctaagtttgagtttcaaaactcaaacttgctcaatttcatcacaacacagcaaaaccaatatccatgacttagaatcaactcaaaatcagcttagaaaacaaattacacaacctttaaacctactagcccctaaaactaaaaatcacatactcaaaccaaacttaaaagcttcaaaagtacaaaacgatggttctagggttaccttagcttgattttctctaaattccttcctaaaaacaccaagaatcaacagcaattccccatgtctttggctggttcgaagagagagaagaaaaagagggagagagtccttattttcttgattttttctctaatttcctaaagtgaaaagagattaatcacattaatctcttgctaaaattttggttgctaggtgtcactcctcaaggctgccacttatttcccccaaataccaaattactaaattgcccctttacttacaacataagtaaaataatgtctaggggtaaaatggtcaaaaaccataaccccgctaaaatctggtattttatttcctctaatacacgacccactaagaaataaggttctagacttacccatgtgatcaaactagccatccattgcattttctgttgtcgtcgagcaaaaattataaaaattacataattcacatataattcaaataatacacctagaatttaataaaatctccataattgagaaattataactctaatgcccatttctaataatgggacccaaaattaaataaattcacaaatactataaaaatattagtaattagtgctaattgcctttactaatccatattataaaatgcggtcattacaattattctcccgtttaaaggattttgtcctcaaaatctaacctgaatagctctggatattgagtcctcatgtcagactctaacttccagggggcttcctccaccttgttgttcctccagagcattttaaccaaagcgatggtctttttccgaagaactttttcctccctattaaggatctgaactggctgttctttgtaggataagtctgactgtagttcatgggcttcataattcaagacatgagtcgggtctgaaacatatttcctcaacattgaaatatgaaatacattatgaccagccgacagcggtggtggtaaggctagcctatacactacctgcccgaccttctcgagtatcgaaatggcctaatgaacttagggtttaacttacccctcttcccgaagcgtctaataccctttacaggtgaaactcgcaagaaaacatg

SEQ ID NO: 268566 - DNA, 640 bp, Cannabis indica
attatataaaatatattttctaccttttgaaaacataactaattgtattaaaataataaaatggtaattttaatatttattttactgtacattcttctacatatactcttaatattaaacaacatgaaggagaacaaatatcatctccatccctcctactatccatccattctacactctccatccatcctagtctccctctttcctaccaaacattgtaagagataggttgcagacggaggagagactattcgaatttaatgtttgtcaacataacatttgtctagtttgtggttatcaaaaagaaaatcttatgcatcttttcatcgcggttgcctataaaacaagtgttgtgtagatgccataaaatagtggttgggatggagaacaacaaggcagcagactaatgggtgttagagagtcccacattgctaatgtgtagaaatataatagaatatataagaggaatgggctactcctcacattgccaattgattttaagatggaacctcattcatcttattttcaaattgataactttatgaaaatagagttatttatatctttttgcattaaattaactttgctctcaagtatttttagtgatttttatttggttttatttagttttgcataaata

SEQ ID NO: 268567 - DNA, 775 bp, Cannabis indica
ccgaacaactcatccaacattccagatgctccactcaatcctccgatcattcctccggtttcaaatgtcactagagacaatactacgcgacaacctgttgcacaacctcgacctgtacacgaagacaattcaagcccttgtttcttgaactctggcgatcatcccgatcttactctggtttcacctcctctctcagacaagaatttccagccatggcgtcgcaacttcgagttatcggttggtactcgaaacaagactagtttcctcaaaggaactctgcctccaccaccgattgatgaccctctgcacaaccactggcttcgatgcaaccagatggtcatgtcctgaattttacattcagtttcaccagatatcaagagcagcatcatgttcttggacacagctgcagatatgtggaaggagcttaattcttgatatgaccaaggtaatggaccccgtatattcgaactgagagaagccttgattactctccaccagggtgatgacactgtaagttcatactttacaaaattaaaatgtatgtgggatgaaattcaagaaattcgcccaagaattccttgtacttatgctgcttctgtcgataatcttgcgtccttgaatcaagaacaagtccttcaatttctaacaggtttgaacgaatcattttcccctgttagagcacaaattcttctcattgagccttttccctccctctctaaagttttttccatggtcatccatgagaaagacaaaggaaactcaaaaacccccaaat

SEQ ID NO: 268568 - DNA, 616 bp, Cannabis indica
attactaaaattagagctcttccgtttaactctattaagaaaaatttgaaggaaatcatcagctcacttctatgtccagatagaagctataaattccatatccatgattagcgctcacactcaattgtactatcatgttcccaagctgtacgtgttacccgaaataattggtaggcttgaactaacaactctaagaacataaataagactaatgaaatcaaacctaaccatatcaggattaagatcttttgatctaagatcaacaagtgatatttacttagaaagatacaacggtaagattataatgtctttaccaagatcaatatcggtcccagtacaatgtatactccgtacatctgacagtagcattctttgccaatgtcctggaaagaacataacacttatccaaggtgtaagtatgctttatcgctaactatcacatcagggtaaatcatgtgcactgatgaatcatgggacataaacttttgaagcatataatcacaattaccttccactgtgttgacatcaatctaattgtgaataactatatgttcttaatttatcagaaattgcatattaacccataaacataaaaaatacatgtaaacataaatga

SEQ ID NO: 268569 - DNA, 540 bp, Cannabis indica
ggggttgtgttcttcctaaaattgctgaggtagttggtatcaaggaagcgttgagttggattaagagtaaaggttgggataaggtggttgttgaataggatactttagttgttgtccaagcaataaaaagttcaattcatatgtcatctcagttcggattgttggtggaggattgtcgtttaattttatctactttaaataatgtccaaatttcttttgttaatcgttctgctaatagggccgcccattgtgttgctagggggtcttattttttgtcagatcgtacgtactatgagcataatgctccttcctctttacgagatattgtaattgcggatgcaaattgattatctatgattaaatcctattttcaaaaaaaaaatatcagatgtttgattttggattcaaattaaaaaaataacaaattattagatgttactacgtaaatgggtcacatgagaaccatgtagttagttaaacttaaatataattattccacctaaagtgttacaattaataacaaatttgttcatattgttt

SEQ ID NO: 268570 - DNA, 554 bp, Cannabis indica
gattgctaaccatgatcaatttgcttggtcccatgcggatatgaccggtattaaccctgagattattgtccacaggttacaggtagatccaaattacccacccaggagacaaaagagaagaaagtttgcccctgagagaaaccaagcaataaatgaagaagtccagaagttaatcgagaacgggtttataagagaagtccagtacccagactggctggcaaacgtagtgattgtgaaaaagaaaaatggcaagtggagggtctgcatcgattttacagacctcaacaaggcgtgcccaaaagactcatttccattaccacatattgacatgctggtagacgccacagcaggacacgaactccttagcttcatggatgctttctcaggatataaccagatccttatgcatccagaagaccaggagaagacagctttcatgaccaacctaggaatcttttgttacaaggtgatgccgttcggactgaagaatgcaggagcaacctaccaacgcctcgtgaacaagatgtttgctgaccacctgggaaagaccatgg

SEQ ID NO: 268571 - DNA, 639 bp, Cannabis indica
ttttgggtacaatacatataaaaaaaggtatgtttcaaataaatataaaattagaggtaaatttgactaattgattaataaaaaaggtatttctcaacttaccctatgaatagtcccccggcccaacccatatttacaaaagcccaattattaaacaaagtccaacaaaacttgtgtatcaatatatgggttgtgccaaactaacctatatttattttgaggttaggatcaacacgacccgtaagcacgaaagattcatgtcgagcctgtgtgctagattttgatagaccaatctgtttttattaaagggattttataaaaatactgaattttgtataaaaatttataattttactatcacacagaattttttacaaaaatattgtatttttataaaacaactgtaaaacaacaagacagaacaattaaaataacagtaaaacaactaaaaaacaatcgtgaaaactcaacacaatacacaatataaaacttatatagtatttttacaaaaaaaaattacctatagtaaaaaaaacaaaaaattaaatatatccgtatgtggtgtaaaaatctcttattaaataggccaagccatttctgttaaatggaccaaccatttttgaaagggatcataatata

SEQ ID NO: 268572 - DNA, 961 bp, Cannabis indica
tttgttttttttttccataagaacaatcaaaataaaagttttaacgaaaatacatacattgaaaacaaattatataccaagacagaaaaaaaatcactcttaaattgtttcaaaatcctaatcattatttgaaaattaatcgttcttctaattaaaattttgccttgcatatgtacatatgtataactttttcttctctttattttttgacaaagtatacatatggattaacattaataaattaatagaaaaaactgaacacctaaaccttatacaatatgaaatattaaaaaataaaaaggtgcattttgaagtcttacgattagtcctttttcaaaaaaaactggctagtatggcatgcaccttatttttttagaaaagatttatttattaaattacagtattatttttatttatttatttaattacataatattacttaaaataatttttaaacgtatttagttaattggtaaatagagacgttttcttttctttattttcagcaacgttctcacaattcccaagttttaacgttcttaagattagaaattaacgactttgctcctgttactaacttatgttcattccctatataatgtatccaaaccaatgggagaacaaatcttttaatatagaaaaattatgtacagattttatacgattatattacaatatgtattctaatctcgagcagtagtgttttattgtgtgtggtgttttgacggttctctaccgtgcaataaagctccgataaaatggttcgattgagctgttttattctggaggcgacaaggttgatagtctgcttgcacaattctgaacaatgtcacgaatgttttaaagagagcgatctaatctgtgactcaacccaaattttattcaataaattgtcgagccttttgtacctctcaaccgatgggagccaacatttcttttttggcaatttgataaattataa

SEQ ID NO: 268573 - DNA, 669 bp, Cannabis indica
aagctgtgtggcaaaaggctagagtaaacccgacccgtattgttgaagaaacaaagtggaatctcaagattcggattgatagggtgatgcctaaaaagattaagaacaatgatagagattggttttttgctttgtaaatcatgaaaccaatattgattctagattgatatacttgtgtacatagattttggcccttttcttgggtgcgaatagattgtataaagctagttttgtgcaatacaactcattgatttatcaaaaaaaaaaaatgttagggccttgacctatgtgttattatagggagtagtgacgggataacaaggtcttaaacatcgaaatttgaggtaaggaaattaggtagttttgtatgtgtttatctgcataaattttaattctttgtgcattggaatatgagttatgatttgttattctaagtttgtatatggtactgagaatgtgtggtatggatacaatataagttggtaaattgatatgtagattatggttgttatgacttgtgtatggtgtatgttgtgtattgtatgttgtatgttttatgttttatgctaacgtctcaggtaaagtgagagaccatggtggggtacgtatgatacgaagtaaggtcgttgaatgtagagatagcctaccctgcattttactgagtcgtgt

SEQ ID NO: 268574 - DNA, 1031 bp, Cannabis indica
cgtgctttgtcctcactcgcatgctccctcagaaaactttccaggaggtcacccatccctaaattatcctaggtcaagcacgcttaactgtggagctatttcgtaaggggctaccggaaaacaagatgcaccttgttgatataagcactatcaatcaatcaatgtatgctctcttcaactgtgtagtcacatacctatacaatctcagaattatcacacttaaccttccttataggtgatgtaagattgcacagcttacccgatatttccccttacagatcacgagactactgactatcacaatggtactttataaattttcttacatattaatttagataatataattttagattatgtattttacaaaaattactgactagatcttttattttgttaaatgataatttcaaccttgagtttttcaaaatggacaaaatagaccttgaattcaattttcgacaatttatttgtttaatataaccaacataaagttaatattctgcccagaataatgcaaaaaatataactagtctaataataacacctcgaggttatattattttattaagttttaatttaacaaaacattaaacttatggtctattttataaaatataggctatgaaaatatatggtccaaaaatcttttaaatcttttgttttggtaaaaagttaagtctacaagtaaaaatagaaaaagaaaaatatggttacattgtgaaatcttttggattcaataatttgaaaaataaaaaatattaaattgttaattttttatagcttaaaacttaaaattatattcagatttagttttttaaatattttaccaattaagtatcttgatgtggatctccatctttaagtttttaaaaacataaattattttcaaatctcaaaccaatcaaacctttaaatatttagcacacgattttttttcaaaggtctatcataattgtaagtttagatggggtgtggataaaacaatccaattcaatgggcaatcgatcgatccattacaatcgaccacc

SEQ ID NO: 268575 - DNA, 668 bp, Cannabis indica
gcccaagaacctcaccacaattcttaacctttgccatgattccactcgatgcatcattaccccaacaactttttacaatctcaaaaaacaatggttctttcaaccaagcattttcaaaacgaaacacatgatttctagcaaccaccacttcattaaccaacaccaaatttaaaggagtgtgatccgaagtagatacttcaagattaaaaagtttggctaaaggaaagaaatctaaccaagattggttcaccaaagcacgatcaatacgaacttccacccattccggcttgccacggctccgttcccaagtgtatgggtatccatacaactcaaggtcatgtagtccacagtccaccaaagtgtcattaaaaccatctactaaccatcggggataagggttaccaccctttttgtcctcttgggaagtaacattattaagatcaccaattatacaccaaggcaaagtagacttacttttcagctcccgaattaaatcccaagttcgtttccgcaagtttcgattcggttcaccatacattcccgtcatccgccaatgaccttgatcataaccacatattaccacatcaatgtaagacaccccatactctagaacttgaacatcctcctcatcccgccacaaaagagcaaccccaccactcttcccttga

SEQ ID NO: 268576 - DNA, 1020 bp, Cannabis indica
aaaagaatagctaacacaattaatactatatgcactattgaagaaaataaatatatatatgatatataggtttatatatgattacctttgaattcttgttttgatgaagggatgaatgtcaagagagtaactgggaataatgagaggaagagtttctccaatgagagggaatcccattgagcctggaggaagaatcccattgcacttgggattcctccatttcctaatccaattcccaacccatatcaccagcaatcccactaccccaaatacaacactagtaatccacatctgatcaatttgtgtataatgctctaacacaagtaattcctcctccaaattataggaggatgatcaaagaaaataagaaatgtataggaaattataactgattaaatttttgttttacattattatatagcctaagaaaaccaatcaattattaaccatatcgtaacttaaatataaacggacataacttaatttgtaagagataagaacaatataacaaaatgtatattaattattgttgtatataactgatttattcttttgatttaataacaaaatattacattttccataattcactcacgaacttaaatgactttagtaaattaaataacttaattagccaatttattgattcaaggtttaactactaacaaattcggcaatcaatgtgaagatcacagcaatattaactattaaggtggaaattaactgggggggtccaagattgagaaaatcaagcatttttggcaccattttaagtaaataagagagtgaaatggagaaattgttatataatggctataagaaaattcatactaattataatctcttattataaatttataagtttttattcaattttcacgcttgaaattacatgttaaaatatttttttcaatttttttaaataaaagtattcattatgtatagttataatattatctttgtaaatttttaaaaattacgaatggtttgcagtactaaaaacagagttactaatattct

SEQ ID NO: 268577 - DNA, 565 bp, Cannabis indica
tgtcaagtgatttaattttttgcagttatttttatattctgtctgttctgttttattgctgcaaaattaggttctgcagtaacagaattacattctacttctgcagacgtatacatttttatattttggtatatattattgccatttgcaaaaactcagcttttcaattggtatcattaaacccaaataaaaagctaactttgaccaaagacgaacacaaacacaaacctcaactccccctggacagttgtgtatacaattgaaaatccaattattcccctttttgtttatctataagggccaaagacaaaaagaaaccaagattttccaaaaaataagatctgaaaaataatcatgatcaacaattaaacaaaatataaagaataagaaatcaaattttaagaggaaactcataaaaaatttaccaaataaagcacatgttgatacttaccaaaagaaagacaaatgaccaatttttcttagcccaaaagttaagtcacatgacaccctttttctaaatattttttttcgaaataaaaaaaaaacaagagactaaaatatttta

SEQ ID NO: 268578 - DNA, 577 bp, Cannabis indica
tttatttagggcattaaacccaaaaatcgagctcaagaagaagagaaagagatccaggttcagatcttgataatgctctgcgctacagaaaggaatcaagggctatagatctgaacggaaggagtcattatattctgttgcacccaatgtaaggtttcttaaactttatatgtgtttatttcattattttagaaattcatattaggatcttaatgaaacatacttgttagtaaatctagatcctggtaaaataattccaacacttattgcctgttactgactcaccctgctaggacgtctggtcatgccttactttgggagttctaatagaagatttaagcttacacacttctactccttcttccttggacttcattgcataaagggatcgttgaatttccctcttttacaattatgttggtcagagccatcatcgttgcacttgcctctgccattctcattgtttaagaattgatagagatcgtttgcgctggttggcatgctggacaacatttggggcactatgaggcactatgggctagccgaacaactttttccaactttatgaagccatcaa

SEQ ID NO: 268579 - DNA, 507 bp, Cannabis indica
cgttctccatttagacggagaatttctgccccattaagggcgggtccccgtggggcccatccccatgggaaaaatgtgcatccctagttgagagatgtgtcatcatagtgatttcttatcaagctttgacattatagtaaggagttaataatttggggtaaaaatatactgggagtttcaaaaagagaatttgacagtgtcaaaaggtgataaaaattctcaaaaataaaaagggatctgatttcggtgaaggactacaaggaggctaagaaaaatctatcttaggtgtatacacgtaggaagattttttggaagcaaatgtgattgaaggcaaaagatcaaaatagtaaatttttccatggctactaatagaaggaagatcaatcaaattgacagcttgttgagactgtatggggtttgagttgatttgaatagtgggctaggggtgatgttagattattttaataatttttttcaaggttcaaatactaattttaatggggtttt

SEQ ID NO: 268580 - DNA, 733 bp, Cannabis indica
gtcccggtctaggttcgggttcgagtcttagttcgggttcgagtcttagttcgggtccgagtctgtgtccgggtttgtgtcgagtctaaactcccatctcggtctaggttggagtctaggtccatgttcaggtcccaagttcgggtccaagtttgggtcctggtcaggctctcgctccagatctatgtccagaatttccatctcagtctggatcttactccgagtccaggttcgtatctggatcactatctaggtccaagtttgtgtttgggatcgggtcccacatttaggtccaagtccgaatctcggttccggtctgggacacgaccgtgtaatgcacgagttccagtctcaggttgggtctgaggctaggtctgtgctcggttctaggtctgggtccgggtcctggtcacagtcctagtcttgttctaaggtcctggttcggcgaatcttgtttaggttctaattttgggtcccacgtctaggtctgcattcaggtttggttcttcgtctgggttctggtcctattttgagtcccaaatctagacaccgactactggtctgttccaggcgccgttacccgaatcccgagtcaagctctggatcactttcacggttctcgatcttgttctggttcaggtcccaggtcccatttctgaggttgggttcgggatcgagactagggtgcggttcttggtccggaccttggttctgtgtccctagtctggttcca

SEQ ID NO: 268581 - DNA, 552 bp, Cannabis indica
aaatgaaataataacacaaaaaaaattatacaatattcaacaaactttttagatctgctcatggaaattcttcaaagaggcagattggctcgtaagctcacagctccgacgagcttcttcacggaggcagaacaacggtggtggcttcgtggctcaagggagttgggtttcagcactcggcgaggccacccatggcctccattttcgcctacggtaaccggagtagcaccgtcgtgcattgcaaacagagaacgagagaaagggtttgtttatttcatcatttattattaataatattaaaagttacaggttaccgtttaatggagtcgttcaccatcccgatgctgcgattactataagggtgagagacacgagagagccaagaacttagacaatagggtggagagatagtggctagattcatggggtttgtcttgagcttggacggcgaaagggtggtctgttgaaggacctgccggcggggtggccattgggaccttcatcttcctttcatctgaaccgagatagagaggaacaaagaggagaggaggg

SEQ ID NO: 268582 - DNA, 1999 bp, Cannabis indica
tgatctccacaaaagcccttgtggatttctcagattatctcgcttgtggggagaacacaccgtaggagaggcattgaataccccctccgatacaattttccttctactatcgtgtagcgaggtatcgaatacaagagttttcgtgtctcgtttttgtcaattggaagttactcgttgagaagatagttgactatgggtgtcatccaagtaggcaagctgtcaatcatctcaacttcctacttttcacatatactcagttcgtttaatacttccaccaggaccaaattcaattaatcaagtttgttcttgggaggccagttttgctaaggcatcggcataagagtttggttctctcaaaatttgttcaatttttaaataatcaaaattttctaagttctttcgacctttctctagatattttttccatttttaagccctttgcctggtattcgcctagaacttgattcacaattaactgcgagtcactgtaacatactagaatcttcacttttaacacttcagctattttcaaaccagctatcaatgcttcatactcagcctcgttgtttgaagtgccgaattggaatctgagggcatagtgaaacttaaagccttttggtgagattagtatcacccctgcacccgagccatgttcattggatgttccatccacgtaaaattttcaagtgtctgcatctcacagataagtggattttcatctagaattgtcccttctatcaagatatctgccaaagcttggcccttgatggatgttcttgggtgataagttatgttgaactgccccagtttaatagactattttatcaatcttccagaagcatctggtttgacaaaacttgtctcaggggttgatcagttaatacctttatcggatgttcctgaaagtaaggtcttaatttgcgagatgcatgaattcggcatagggcaagtttttcaagaggtggatatctcgattctgctcttagtaaccttttactatcatagtaaacttgttgctagtgcttcccctcttctcgcactaatgctgcactaattgcactctccaagatagccaggtagataagtaaagtctctccagttattggtttagccaaaactggaggggttgataaatgtttctttatgttcgcgaaggcttcctcgcattcatctgtccattcaaattttttattgcctcgcaatatattgaagaatggtaggcacttatcagttgattttgagataaatctgttaagagctgccattcttcctgctaaggcttgtacttcctttggatttgttggtgattgcatttctatgaaagccttaattttttctggattcgcctcaatgcccgtcgtgatgactatgaattcccgaaattttcatgaggagactccaaaggaacatttcttcaagttgagtttcatattgtagttttttagtatttcaaagaacttcgcgagggcttttgtgtggtctccactttttatcgacttcatcaacatatcgtcaacgtagacctccatgttcctccctatttattttttaaacatttcattcactagtcgctgatatgttgccccagcgctcttcaaaccaaaaggcatgactttatacaataaagtcccatgttggttacgaagcttgtatgctcttgatcaagtatatgcatcttaatctggttatatccaaaatatacgtccatgaacatcataagctcgtgtccagtagtagcatccactaactggacgatccttgatagtggaaagcaatcctttggacatgccttgtttaaatctgaaaattcgatacaattctccaagttccatttggtttcggtacaaggagaggatttgatatccacgaggggtagaatgcctcgcgtataaagtcattagtcaacaacttatccacttcctctttaagtgcccctagtctttcagagtctaagggttgtcttttctgtctcttggttgggtaatttgggtcgatattc

SEQ ID NO: 268583 - DNA, 502 bp, Cannabis indica
acgaacacgacacatgacacgaaaaaattaaaaaacacagacacgaacacagctcgaataagttcttgtcttgttgaacccacaaaatcgcatatcttgttgccgtgttgtaaactaaattgttgattttataatgtcaccatgccatgttcgtgttatgttgaattttgaaatttattttagatgacagacacgaacacgacccgtaacataaaaaattgataaaacacaaatactagtagcaaaattttcgtgtcgtcgtatcaaactcgtaaaatcccaagtcgtgttcatgtcaaatctgcatatcgtgacctaaattgtttccctactttacgactcaacttacattttccttgtatagatgttttgaagtcattgatgaacatttttcattttttttttaaaaaatcatatattaaataaaaaaaataataataaagttgtaaaaatttatctacgttatatactctttccaattaaaaaattgtattaaaagctt

SEQ ID NO: 268584 - DNA, 1119 bp, Cannabis indica
ctgggtaatattctaagttttaggttcatacttgcggctttgatgcttaagttttcaagctttgatatagatgtgaatttggtgtatgtataatcttaaattcttgatgttaatttgttgtgggattttgtttaatggttctaatctttggtgttaatgaatatgtatggtatatattgaatttatgaatgtgtttagttttatttgagttttggtaggtttttgggtaaaaatttgagtaggttggaatggttttttttttgggatttttacccaggagccgtagcatgggtttttacatgccacgacccgctaggtggaaaattctaggtttttccccagaagccgcgacatggcttttaagtgccccagcccgttgcaggttttttcagggcagatgtgttaaacttgataagcataactttttattttgaacatcattttgtacgctctatatgttgttggaaagatcattccgagctttatatgcttatctgtaattggaatgcaattgtgtaattatgtgaaagtgaattttgggattaaccctatttgtgaaattctaggaattgtgactaggattatcggcacttgcttaagagcacctgaggatttggaatctccacatacttaggatatcaggtaagacagtagttaacacgtacagttaagagatttggcactcatatttgatattatgttgtgaataaatgagaatttgggattagggttattaccctaaagtaagcagttatatggtcttgggttattactctagtgattaaaggattttgtaggtaatgtcactctatatatgttaagataaagaattgtgcgggtaaggcataattaggttagactcgataatcagaactgagataaacaagtctaaggccttattgtaaatagacgtgtgagcgcaacacgtaggtctatgctaaatagacaatagatgcagtggcatcagtatttatttgaattgagaatataatgcttattgttatttatactgtcttgctaggcttggctcacgagtgctctactatgcaggaaaagataaatatgtttgtggtcagccatgaatgcgagggctcgacggtggattgtacatgttcgggc

SEQ ID NO: 268585 - DNA, 590 bp, Cannabis indica
tggcagtggaaagcaatcctttggacacaccttattcaaattcgaaaagtcaatacaggttctccaagttccatttggttttgggacaagaacaggattggatatctacgagggataaaatacctcgcgtataaagtcgttaaccaacaacttatccacttcctgcttgagtgcctcttttctctcggaatctaagggccgcctcttctgtctcttagttgggtaatttgggttgacattcaagtggtggcagataatcttacggtcgatccctatcatatctccatggctttaggtgaactaatcctaattttccctcaaaaagcttattagtttctatttgaattgttcaaccaggtttttcccaatgtatacacactttgtgggatttcctgggtctagaacaacctcttccaactcctcaatcggtttcaataaatttctttcatcttgaatccaaggattaagatcttcatcattctttttgccttcttcagttaagactgccattagctggtgatcggcctttttgttctgcaactctatgcagtagcattcgcgagccagcatttggtcacctcgcactactc

SEQ ID NO: 268586 - DNA, 793 bp, Cannabis indica
aagaaaaaaatatctcctctactttgctactttattttcagacttagtcatattcttagaaaagtagtatttgttgaaataaatactttcttatcttaatgaccataggatggtccacccctaatcacttagaatagctatcaaacatgcaaaccttggttaacagttttagcttttcttaagatcacgattaggtcatccatgaatctagtaattatttacactaagtacacaaccatttcatcattctacaattttcctatcactagggtatttccctagaaggacttaggcaactactagtaactaatcatagaccttatactatcatcaatatggaaatcaaatttctgggaaggtaagtttggatacaattcgaaaattcaacttaatgatctttgaactgcatatccaccaaatatttatccacccctatcaattcgtaagatctttaaccacttaccttaatatttttcaaaactgctagaaattcatgaatgaaatacttatcatataaattcatagaaatttaagaagagagagttgaatgccttagtgcttctaaactcttaagtgcatgtgtcgaatgaatgaaaagagagaggtccctttcatgtagggttaaggccatttatatagtgttagggttttaaatgacagatagaaaatgtccttaaaaaatatggtagttacaatatggtgaagctttcctattttcgtgggcagtttaagtcgttccgaagttgtaagggctattgaaggtcttctagaaggcccatggaaaaaaccacaa

SEQ ID NO: 268587 - DNA, 617 bp, Cannabis indica
agttgccaggagttgttttggacatgctgtatctgttgtattgtggattgtattttgaattgttattgtatattgtcttttgattaaatcttttttgacagggatccccacaacacctttttactaccgttatgatgtccgtttttagtattttatcttagtcaagtttttaataattaattaatgattgttttgcggaaaaattttctcaactatcatttcacttgcatttaaccttataagctcaaattttggcggtaaaaccctccaaactactaaactagtaccaaatttaaggtgtcattcgattaactgtcactatggactgcttatgtgtacactcttgtacacatgacacatttatattggtgtgcaactaatattattatttaaaaattattttcaaaattcattttaaaattaaataaaataaaaaaaataaaataaaatattcaaaaaaaataaaaaatattataaattttgaaataatttttatatttttaaaataataatattaggtctaccaatataaatttgacatatgtaaaaaagtttatacataagcaatctatattggcaattaactataaaaaatagatgacaccttaaatttgcaa

SEQ ID NO: 268588 - DNA, 551 bp, Cannabis indica
aatttttcaaaggaaaggccaccatattaaatgtgcaataatttgctcataaagaatgccagtagaaaaaaaaaaaaagtataatttaaaagcacaataagtgtgtatagataatagatcaaaagtgagagaccatgcagaagtccaagtcttttggacaataattttctcttacctaattctccatatgtaaggcatctctaattatattctttattttattttagctaaaacaactaaaatattaaaataatttttattattatttaattattttaataatattttaattttaatttatcaaatataattaattttataaaataatgaaaatactattaaaaaaatttatctacaaagctttttatttaatttttattatagagagctattaaagagacatgttctaactaactactcacctatgcgttttttttttttttaattttttttcttttcacaattgaaatataacaattaattcatatatcagcattgtaatttttcttttttaattgaaaaataataaaatataaatatacttaccaaac

SEQ ID NO: 268589 - DNA, 1282 bp, Cannabis indica
cgggggcacgctgaggtggaggccttaaagaagattctgcgggaggagcagcagaacactttgcacgaggacgccttaccaaaatccgttgggacctgaacatggaccctttgacggattggttcaaccgctttgtcgggcctaccctagctcccttcgcctcggagatgaccagccagtttgtctcccacctaactcagttcccagccaagagatatgcggcttgtgcctccttgaactccgtttaccaggtccaagacatcagttgtgctttggccgcggtgagtatttgtaatttattccctcctttgatattttgtctaaggcatctgatttcattcttgtttcttttttcagattactgtcgagactggccgcctttccaagaccctgatcgatcatggcttcgtcatgtctgaatttgggggcatagacgaggccgtgaggatcctgcgggacttgtctgccgaaaggtgggcgttccaggaggaggctcaacaaagggagtcccttgctgaggcaaagtaccgggaggaagcaaagcaaagggagactgaggcggaggcgaggcaccaggagaagctgaaggcggagggcgaggctacagccagggccaagcgtgagcttcaggaagccagggaggctatggacgaaatggctgccaagttgaagtccttagaggagttgcatcaggcgaacttccagtcgacggccaacctgactgtggaggtgaaggagctaagggattttaaagatcaggccttgaaaaaggccaaaagacatgagttcctgaccccagttgtatgcaagcatcgcgtcaagcgcttcgatgatggcatctatatggcctggcagtcgaatggccagagcatcaaacttgacttctatcccaagcctcaggaagccctcactaagttccgggagaagaagaggaggcttgatggttggctcgaagagcgtcggggccctcgtcttcctgttcgtattgaataggccgagcagtacaaccaatttcaccattacaactattattttttcttttttacatttacagtctcttttctttcctttcaaacaatttaaattattatcttttaaggggagacagttattatggcctgtccccaggcccttaatatttttttggacctgcctttgggttcaggatatttaaatatatattttcactttaatatatattctgcttgattttgttttacttttggcctgttttacatttgtctgtgtggtatgccttagtccccctgagtggcatgaaaac

SEQ ID NO: 268590 - DNA, 506 bp, Cannabis indica
taatgtaccacggaatacattccgtgaaagtacatcacgggacaaaatcgtgtcccttattatttaattataaaacataatggtgaataaaaaaaaaaatcattcataaatgagtaaatgacagtaacatatatgtaccctatcatatttggtaattaatcctaatcaataattataaaactttgagctaaaaacagatagcaaagctatttttaagatactactattaacagagcacagtaaagcctaagagacactatgcacaacaggaaagtgaaactgaaaaataagatcaaatctatattaccataatagcccattattattttaattagggaaatttgaaattccatgcttaataaactcaaaaattggtcccctaaactaatactatgtatcatttgtaaatgggatacttttttctaaaacccaattttacacccctttacattacccccctcccctctctcttcttcttcttaattattcattcaataactccaacc

SEQ ID NO: 268591 - DNA, 578 bp, Cannabis indica
taatgcatcatccagcttcttagcccaatctttttgtgaatgttgagcagtttctccagaattaatttaatctccatgttggatacttctgcttagccattgctataaggatgataaggtagtgcagtcctatgacgaaccccataccttgcaagtaagcttcaaattgtttgttgcaaaaatggctaccttcatcgctgtaattgctctaggagttccaaactgagtgaagatatttttttgaagaaattttaacactattttgccgtcattcaaatgtgttgttgctgcttctacccatttagagacataatccatagctagcattatgtaagaattgttgtatgatgccgggaaaggtcccatgaagtcaataccccacgcatcgaatagttcaacttctaacattccagtcaaaggcatctcattccttcttgagatatttccagttctttgacaatggtcacatgcttggacaaattgattagcatctttagataaagtaggccagaaaaatacactttgaagtacttttgctgcagttcaatttccactaaagtgtcctttacattgtaagt

SEQ ID NO: 268592 - DNA, 758 bp, Cannabis indica
gaacacccctaattaccataccatttttgccctttacgaccaaattttgtaatacaatatatgttgtattatttaatacataacaaatggtccgtattaacttgtattataatatttacaaaggatttagggtcgacaccaatctccgacccgaacccgagacccgagactcagacccggacccggacctggacacgaacccagaatcgaacccagactcaagacctaggcccggaccggacccggacctggactcagactcggacgcggacccggacccggacccgtacgttggtgttgggatcgagtgtattaaaaatatattataaatttacacaatcaattaacacaagtcaataccaaaacatttgtattgtattaaataatactaatacaatacaatacaacacaatccaacacaatacaatacggcgtaccaaacgtgcccaaggtcaatttcttacacttgtacaataataaaatttgtattttataattttttatttttaatttgtactgcaattaaaatatcatactttgtatttttgttacaaatatttatagtattaaaattaaacaaacaaaaataaaaaataaattgtagcaagaagagctaggcacgtgcatcgcacgtgtgctagccttacctagtatattataaaatagtagggaattttttctcaaatatacaaaaaagacctacatatttacatttatacggatacatgcatatttaaacttttatacaaaagaagatt

SEQ ID NO: 268593 - DNA, 604 bp, Cannabis indica
taatgcagctagtaatgtgacaaaaatttacgttgtattttttttcccactctgctagttggagcaacaagcagctggttcaacaagtttactcaccattccataactttcttggaataactctccagggaattcaaaaaaacagttccaggctgcaagggatagacgacctgaggcgacatcgcttatcaatataaagcaacagcccaacgagacacttaagtcatatttaagtcgttttagcacgactgctgcaagggttagaaatttggatgatagtacacaacttacagcccttcaggcggggatctctactaatccatcaatcgttgggggcgagctgtgggacgacttacagggtcgtccagtgaagaacatcactgagttcaacgaaacgggtcaggtgttcgttcgaaaagaggaagctcgaaaacagatgaatctgttgaaaacaggcttgggaggaaaacccatgaatgtttcaacaggtgctgtctctactagagttgataacttcggggtctctggctcgaagagaaaggacgattttaaggaatcgtcaaaggataaaaagaaacaaaaaaagcacgataagtacgtgcca

SEQ ID NO: 268594 - DNA, 580 bp, Cannabis indica
aaaataaaataaaataaaaataccaaataaaatttatcaattaataatgaaaaaatagataaaattatatctaataataaaatttaaatttaagtagtatgctttaaatattttaattaacttatttaattttaatttttttataatcatttaataaaatagctatcttcaaatattatagtaaataaaagattaaaaattgaaattgaaagagatatcatcatatgattacaaaaccgctctcatcactgtatctcacttgtagtcgtcactacattcaaagtgacaatttgataaaaaacatacaaattaataaaattaagataaaaatgaacaaaaaaaaaaaaaaacagctacgaaaaattatgtgtaagacaattttataattcactttaataaattatttgataaatcccttcaatgaaaatttgataattcagaacacaaatactattcatgattaagagttatttattttttaaaaaaaaaattaataatcatataacacaaatttaaaatatctctaaaaacacatagtgatattattctacctcaacattcaaaatttgaaataaataat

SEQ ID NO: 268595 - DNA, 770 bp, Cannabis indica
ttaatttaaaaaagatggtttaatttttgggtttaattattgggtttatttatttgttaacgtttaacgttaacagtagttaatactaaataaaaaaataatcgttaaaccaagaatcgttaaaccaagaattgccgttagataggcacttttaatatataaagatataacatttttttaataggtattatttattaatgattattaaataaatttaattataaaaattaattttagaaatattaaattttaatttttttgaaaaacattaaattttaatttaaatttatttaattttactacttaattaaaaaaaatatcaaaaataagtctttttatactatattaaaaatatatttattgattttttaggaataataacacaaaacactattttttgtaaaaattttacaattttacattcaagattttttttttttaactttcttacagtgttttataaaaacaatacgaaaactacaaaaaaattacataaaagtaacatgaaaataacatctaaacaacataaaaataataacaaaaaataacatataaataacaaaaaattaaacaaattaacaagagtataacatagaaatatattaaaatactgtattttctgtgaataaaatcataaaaattataaaaatatttaaaatttcatacaatcgtatgtttgtaattttattgttgtttttgtgtatttgtaaaataatccctctcttttatgtattgtcataagactaataatagtgtggctcacactttag

SEQ ID NO: 268596 - DNA, 794 bp, Cannabis indica
cttaggagcctcttcagtcaacacaaactgggcattttcacctatgagagcaatattaatgttctctttccatttgacaaagttagctacagagagcttgttgtcagttaacagggacatcatggggttgttcatagttatattgggtactctaaatatcaataaatataaatcaaataaggttcaataaaaaatcatacacattcagaaattattaagcacttagcaagtaggaatgacaagtgaaaataaaaaaacaaaaaatcctaaataatctctaaggattccaacaaattgatacagtgctttgtattaggcgagagtcaaagatatcaatcattgagtagagcagtcagctcaactaaaatggatcccattctagtaacattttattcaatcgaaaaagaggatccgacgttgctttgttttagtcgagagtcaaggtcattcttatttcatgaacttctaccattatttcataccttgtaactcctactcttagcaaccactatttggatggacgttactaagaataaaacacttacaataatactatcttttgagattctacagtgttaaattgctaatgaacgtccatctattggggatgaatctcactaaaataagaactatgtaaaaccagcaatggagatcaaatacccttataataaagctcattattcaaagtgtattttcatctaattttaattttagtctatttattttaatatatatttatttaattaaaattactaatttagaaaactgtaaatataaattttaatttaatattt

SEQ ID NO: 268597 - DNA, 802 bp, Cannabis indica
cggaacccaaagtctgccacataaaaattcaacatgactctcgtgcgtgaaagttcactagggatatgatacgtcttcaaacctccttcccggaagagaaggactgtttaaagtctgtcacacgcgcagtgatgttttaccctttagcctttttaagcgaagtcatcgtttgaatttttttgcaaatttagcctttcctcgtgaaagttgaagtatgccacatgaaaattcaacatgactctcgcatgcatgtaatatttcgtgcttgaaagatcactagcagtatgatacattttcaaccctcattcccggaacagaaggactgcttgaagtctatcacgcacccagtgatgtttcacctttttgtcttttgaagtgaagtgatcgctagcatttttatgcaactataatttttccttgcagaagtcgaagtgtgctacatataaattcaacatgaatcttgcatgcaagtagtttttttctgtgtgaaagatgagttgggtatgatacatctttaaccctccttcgcggaagagaaggacaacttgaagtctatcacacgcctagtgatgtttcacttggtcttttaaagcgaagatattgcttgaatttttatgcaaccttagcctttcctcacggaagccgaagtttgccacataaaaatttaacatgactctcgaatgcccatagttttatcgtgcatgaaagatcacttgggatatgatacgtcttcaaccctccatcccggaacaaaaggacttcttaaagtctgtcgctcgcccagtaatgtttcaccctttgg

SEQ ID NO: 268598 - DNA, 1149 bp, Cannabis indica
attaaaatgaggtgtctgtctttagaagttttgaggtgtaaataaaatttctcattttttaaatacatgtaacattataaaacttaatttttttttttattatggctttttttaaatatttttttctcttcaataaatagaagttatttgagtaaattagttagaatgacattattgtaataaaagtataatattatcacttgttattaagtaaaagtaaacattgtttaaatgataacatttgtcattaaattggataaagagtgtaaaagagagtttgatagagagtgtccttagcacttctctctaaaatatagatgaaggagaatacaaatagactataattttttttttttttaaaaaaaagtgcttaaataaattttgaaaatgactctttgagtgaaacttttgattctcattttaaaaattaaaaaattaaaataattttacaaaacatatttttttaaaatattttacttttctaattaaaaaaacaaaaaaaattattgaagtatgaatttgtcaccttaaaaatatatataaaaagttaaattattttattttttaattaattatagtaacaaccgtgcgagacgcacttacattgtctagttatattataaattagttattgatgtaaatagtataaaatatgatatattttaagtaaaatatatttatttagtgtgaatgattattagagtagtcactaaaagtaatagattctataccaaattatattgctgagaaaaaaaaaaatacaccaaaataatactattgttgaaaatgtaattgtattaagatgatctccaatagttacagcaattattcacactaaatattctaccaaataaatatattttacttaaaaaatttctcattttatatcatttacattaataactcaaaatagccaatttatgaaataattagtaaaaatatatcatggctattaataagaatttaaaatcataaaataatttagtaaaataaaatatttattaaatcaattaaatactatatttttttttcaaaaaaaaaatcttattaaagttctataattaatcctaatatacgcgactattttcaaaatgaggaaaaaaagagttcaccaacaatattaaggagctcaagaatattaagtttttc

SEQ ID NO: 268599 - DNA, 581 bp, Cannabis indica
gtatctaatacccacatatttcagtacaatctccgtaattaatcaattacgctttattattcatttactcatattttcctaatcaactcgtaattagtttaagtaggattataatcctactctaatacccacttaatcacatatttaataaaatatctccaattaaaatatcaatatatttttcgggatattacaaaattaccctttgaaaatagatattctccctctatttttgtgggttgttaaggtgttgtccgttgcttgacttgttgtccatgaatgagggctgcacatcaatctcctaccatggaaaagatggttggctatgcacctgcaggatgcagactggccgaccatacaatgtctacaggttgaggtctggctggccatgctcctgccagggtctggccggccatgtgcctgctagggtctgaccaaccatgtgcttgccaagatcgaaaccattgttgggtttcatcctggtgaagtattgggcgtaggtactggcgtcagtgacatatgataagtaccaggcgtaggtatgggctcatctgattagacgatgcgatatattggtgcca

SEQ ID NO: 268600 - DNA, 612 bp, Cannabis indica
tttactattccaatttctcagaatatcttatgtcaagaggaaaactattcttatcatctaaacttttctcattcacattctcattaacattttgactttcttcttctttgtcatttaccacttgatcttcaacttcattcacattattttcacaatcaagtccatccttaattgcattcgtaatagatgtttctactttattgttaccaaaatacttgctgagggaatcaacctgttttttgagcaaaacttccttttttgatttctctttcttctttagagctctagatttgtattttcttttagtagtcattacctataacattaaaaaaattatatgacttaataaataaaaaatattgtaactgaatgaataaatttatacacaattaaaagaattataattatgcaaatcatattaatcatataaatttagaaaagattaaaaataatttaaaaaacaatttttaaatcaagataccaaataaattaaatggtatcattcaaaccattcactggaaagaaaagaggattcaacctcaaccatttatataatataaaatatataaataaatataatttttttcctatttttttatactgtggtgtggt

SEQ ID NO: 268601 - DNA, 971 bp, Cannabis indica
aatattaattttcataatgaattgaatgtttgttccttttatgtgttaattctaaaactcgaatgttgtgcacaaatttagatgggatcttgaattatacttccactagtgaattaatggtactaaaggataaagaagtaattagaagggtaaaatggtattttgaccaaaactaattacgaaccaacacatagagggctaatcattggaattgattatatcaatggacactgcagttaaacttagtaaatataattttataattactaagagttcaatttcatatttatagtgaagtaatcatgaaattaataaacaaaggattatttagttgatgagactcaataaataatctactctattagagcttagaatataggtccatggtccccaaatcgccaccttgaaacactagctatcaaggataggaataaagagttgtacaaagttgttcgaaaaaatctattttgaattgacaaaatactaattatttatttttgtaacaaataaataatttttttaaatagagaaaagacagaaattgttaagataaaatttgtcaggacaaatgttttcaagacaaaaaataccaaccttgtcctaaagacagtggtaggcatctatggcttgtccctatccctatgaagtttgtttttttaggttaatcaattatttgattaattcaattaggtaatctaatttgaaaagtagttatagatttttcaaggttgttgagatattctctcaagtggttaagaaattctctcataaatattagtaaccgaattcggttacagatatttatttatttaaaaaattaaatatgatttaattaaaggaatttaactattataaataggagtctgatttgagaaattagaataagacttctcactccttctgaaccagttttttctaaatacatagagagaaaaagaaaattatttttctctcaattattcttgctcatg

SEQ ID NO: 268602 - DNA, 715 bp, Cannabis indica
gatactattgcaaactcttggagagaaatctcacatgttttccattaatcaaaaaccataactcatgcctcttttggcaatctaccctcctcaaaactatctgatttactaaggtgccaagaaaaagtcctttagtatcgaggtccaagagacgacccaattgggagtaatatttaaaaacatcctggtcagactttgtgagccaattctttatttgtcctattacacttagcggggatttgacggtaactttagattttgcagctgtattagtagtaatggcacgaggtatacatggtagctctattgttaatatagttttgggcatctacaataataatgtgtgaaatgaataaaaaatatataaatgataagaacataaatataaaaattataaaaagaattacaaatttaactaaatgaataaggtcacacgtggtatgaaaatagatagtgcgaccatgtgcaaccctatgctacttgtgcgaccgtgtccgaccttagtggtcgtttatggttgttcagagaaaattcaagttacatagtgtaaattaaaggtcgttcagagcaaattaaagttctttaaaattggttgaagaacataaaaagcaaattatggtcgcatagtgtaattaagatcgttatggtcgtttagatcaaattcaagttctttaaaattggttaaaaaacataaaaagaccatgatggtcgcata

SEQ ID NO: 268603 - DNA, 997 bp, Cannabis indica
atatggtcgaattgatccttctattatttcaacaaaaacgaaggctattggacaaagaatgaacagtagccctgaaggatgaagttgaaaagttgcgcaacaacaacttcataattgaagctttttacttggcttgggtcactaatccaatactagtccccaagccgaacaagaaatggcgagtctgtattgatttcacagacctcaacaaggcgtgccctaaagactgttttctacttccaagaatcaatcagcttgtagatgcaacagcagggcacgaaatattaagcttcatggacgcttacttgggctacaatcaaatcataatgcatccaccaaaccaagaacatacaagtttccgaacatatatgggtctctattgcaacaaattcatgtcgtttggtttaaaaaaacactggggctacgtacaaaagattggtaaacaaaatgtttaaagatcagatcgggtgaaatatggaagtatacgtggatgatatgctcataaaatccagaaaggctaggggcacatagacgacttggacgaatggttcaaagtcctcagaaaatacaacattaagctaaatcccttaaagtgttccttcagagtcagctcgggaaagtttctaggcttcatcgtcaatgcccgaggaattgaaactaatccagaaaagattcaagccctcctgaatatgaactcgccaacaaaaaccaaagaagtgcaaagcttaactggtcggatcgccacgcgaaaacaagcagttcaagtggacagaagagtgtgaaaaagctttccaagagctaaaggcaccacttgctaaacctcccgtacttttaaaacctctagacggtgaggaactgggaatatacttagctttcatagaacatgccgtgggtgtcgtgctgatcagagaagaatacaacgtacaatacccagtctattacatcagtaaaagactcattgaggccgaggggcgatatccgttgatagaaaaactcg

SEQ ID NO: 268604 - DNA, 871 bp, Cannabis indica
ctttattttgctatcttttttccagaaatttcctgctgcgaagattgatagtattttggccataactctcttgatattactcggaattggacgattcaagatgttctgaaaagctaagaaagagacctaaaactttcatgttgagctccaagtccaattatgcttctaagtttgtccgaatttgtaattaagttctgccttgtacaaacaaactcgctgacttccactattttccaccaaaatatgctaaaatctctccaaaagactcaaaatgcatgaatagtctttaaaatagcctaacaaataaaaatcacactaatcaataatttaaaaaatcaatttaagaatattaataaataaattaatcatatttataagataaatatgaactcatcattattcctttcaaagttgccataactaaaaccctgactactcggcactgccggccaaataagttgatatgtacatttactggaaaagatctttaactcatggctgacctagcttagtcctttccttacctacaccataaaatacatgtaagtcacaaagacccagtaaaaaaagtaaaagcatgcatcaaagtacaactataaccaaacataaccattaaataataccaaatattcacatacttaactcaaaagcaagaattcacattatctaatataaacaatcactataatcaaatatttataatataagacaaactaaacggttacttaataaaataacagtttctcacctttgcctaacaagataatctcatgtcactatcgtaatctaatgagacaaccatgttgttactgatatttcgcaacaccaaaaagtacaatttaactggaaaaagagagaattatttgagaga

SEQ ID NO: 268605 - DNA, 1393 bp, Cannabis indica
aactagtagaagagtgccttataaacatggaagatcagtggttaaatgagaaaaacattcctctaaaagggttgtagagaacttggcgaaccattgtcttgatgcttgctttaaaccatatagagacttttgaagcttgcaaacagcatttggtggtaatttgttctcccccttaggactataccgaggaggtagagtcatatagacatcttcatagagatctccatgaagaaaagcattatttacatcaagctgatgtaaaaaccagccatggatagcagctaaggcaagtatgagcttgacaaaagcaagcttggtgacaagagcaaaagtgtcatgataatcaattccttcaagttgattatatcccttagctacaagccttactatgaatctatcaatggagcaatcagcattgtatttaattttgtaaacccacttacaacctatcacatgctgagagtaaccacaatccaagtgtgattcttttccaaggcatcgatctcattatccattgcattatcccattcaggaatgccctttgcttgactaaagcacatgggtttaatatgactagaaatggacagcaccatagctcgaaacttaggagacaattttgagtaatcaagcacttgggagagagcatgtgcagtcactgacattgtaaactcagaaaaatcaacaagatcattagtggcaagaaagcaatgatagtcactaagatatgaaggtttagtgatggttcgagaaaatcttgtctgctgctgcctagcacagggaactgaaaatggaagggggctcaaaatgaggctcagatggggtgaagaggctgcaaatagctcaggttcaggtgtagaaataggaaaaaaaaccctgaatatctggtggtatttcagcagactgaacaaaaggaaaaatggtctcatgaaacaccacatcccgtgcgcaaaaaacaccacaccacatcccatgaaacgcaataaaccattacaagaatgggacaaaccccatcgagcaagagcatgcgcggccttatttaaaacacgagaaatctaactaacagaacagtcaagactaaccaacaactcatacaatttagcaaaagagaaatgagacagccaggaaggagaagatttgtcaatcagacctttgaccaacagagaattatcagtgaagaaatccacccctactaactgcaggtccttggccaaagagaccccaaaaagcaaggcctccaattccccttgcaacacatcaagagtcataattttcttcgcgccacaagccaaaatcccaccagaggagtcaaagaaaaccactgccccagccccaaattctctggcagacgcaaaatccacataaccccgcacccttccaggcctaggaagtcccc

SEQ ID NO: 268606 - DNA, 626 bp, Cannabis indica
actaattatttaataaaagagacaaaaaaatcagtttcatcaacaatataatgaaaaatacacaatgtttaataaccaaactttaaaacgatactaactttaaaattcaatttcgaacatataaattttatatcaatgcctaataacgaaacttctaacttcattctttaatttggttaatttcattctcgaacttacaatatgtagcaaaaataataaagagaatcagaaactggaactagagaaaaaaataaataaataaaattaaagaaacaaaaacacaatattgaacctaataggcggaggagtagtataagagggacccgtagcaaagagacccgcagtatgcgtggttgacccaggtatattgaaccttataggcggatgtaggagcattgaaatttcccaaggaattgaagagtgaattatcagctcaacctagaggcatattagacaaagggacatgataagcaatgtaagggtggtacagaagaagcatctcatttggctaaaaactcactgcaatggttcactatatgatgagacaactacaatggactatatgattgagacaattgcaatagtgtcaaaaatttggtagattttcgaagcaaaactcaagccag

SEQ ID NO: 268607 - DNA, 1185 bp, Cannabis indica
gggccacatttcacaaagggtccgggccgccatcataaatgtgagattttcactattttgatgaaaataattgttagtgtttgaaaactaagtttcctctcaacgtttccgatagaaaagtgatagaaaacggccttggcttcctccctgtgaaatatcatgatttttgagatgtgtagaatgagattttaagagaatactaatgagtgtaagagtaaggaaaaaactagctaaaatttactctaaaacaaagacgtttttcagtttttgaattaagggtcattttaaccaaatttaacatgaaattaatcttcgtactcacgtcttagtagtacgaatttattgtgactagtagggaaaaatatttcgagaagggtccgggccacatttcacaaaggggtaccactattagaaatgtgatatttttactattttggtaaaaatgattgttagtgcttgaaaactaggtttcctctcaacatgtccaatagaaaagtgatggacacggtcttggtttcatccccgtgaaatttaacgattgtttgagatgtgtagggtgagattttaagagaaaactaacgagtgtaagagaaaggaaaaaacttgtttaaataaaaccaaaaaagaagaacatttttaatttttcaattaggggccattttcaccaaatttaacgtgaaatcaatcttcttattcatgtatgagtaatacgaattcattgtgactagtggcaaaaaatattctgagattggtccgggccacatttcacaaaggggtactactatcagaaatgtgatcagattttcactatttcgattaaaatgattgttagtgcaagaaaactactttttctctcaacgcgtctaatagaaaagtgatgcacaacggtctgtgcgtcgtccccatgaaatttcacgatttttggaggtgtgtaggatgagattttaacagaacactaacgagtgtaaaagaaaggaaaaaacttttaaaatttaacttgaaaagaagaatattttcaatttttgaattagagggtcattttaaccaaatttaacgtggaaccaatcttcctattcatttcttagtagtacaaatttattgtcactagtggcaaaaaaaattctgaagatgggtccgggcacatttcacaagggtacactatcagaaatgtgagattttactatt

SEQ ID NO: 268608 - DNA, 635 bp, Cannabis indica
ttttcggtagcccatctcgaaagaactccatagttaagcgtgcttggcctggagcaatttcaaggatgggtgacctcctgggaagttttcctaggatgcgtgcgagtgaggacaaagcacgctgaaaacactcgtgttggtctgtagggccagtcattagtccatgaagcagccagagtgacgtacccgtgtataagagccattagtccgtgggtgtaagggcccaatggaggcttgaagcgggaacgttacacaacttctactttttcatttttttagaaatatttaatgtataattatggatgattaaaccatgaagctcttaagagttaaatttttttagggtaaattgcgacataaatacctaatattttagattatacacttaaatattttatctttatttttgggggcaaaaatgtctaatgttacaattctcttacacccgttatactaccactcactacaagaaatatcacttttactgcagcacagcattttgcaaactgtgctggtaaaaatgtcaatgttttaccagcgcacatttgtaattgttaaaatctaatttttacccgctcatttacgcgatggaaaaaaagttatttttgccaacgctttttattttgtgctgacaa

SEQ ID NO: 268609 - DNA, 694 bp, Cannabis indica
attgttagataaattatttggggttgtacttcagtgttgaattgaatgagcccaagtgatttttggagatacaaagaccccacttcacattgtttaatcagtcttgggcccaattatgtggtcaactgggccccagcaagttttgaccagtccaattaatggtcaacccaacctcaaccctaacacattcagcatcatcattttcatttccctttaccaaccgaaccagcagctccccttgaagccttcatcacctgaccacaacccagtcgaagctccaccgtgaccaacccaaccttcgaaccaccaattcacctgaacccgtagccacagaaatcgcaccagcagctcgccattcgaaccacctccgtttgactttcaccacctcactcatcaaccacgaaccaagcaccaagcggagccattgcatagagtctcagtcgacccaccaccgtcgcaccttcactcaacctagaaacccccattcactcaaacaataacccaggaactcataccagagccattcacaaccaggtgcaccaactcaaacccactgcccctccgtgcacccaagtcgacccaacaacatctcgacccagcttctattcgccgagcccttccagcaatcaccctttaactcgcaccacccatgacttcaccagaacacaccaccgagcatcacagtccctgcaca

SEQ ID NO: 268610 - DNA, 632 bp, Cannabis indica
gttacccggacttgctgctgggtttcccaaagaatttgtattgtcggttcgtgctagtttcagagctttggttggttaattccctattagtttagggtacttccatgttaagttacagtagataggtttttggtttaacacctaagtcccttgttgtgatttagcgcgtcacttatcctcgttgttatcgatgtgatttacgagtcgtaattcagcgagcagttgttccactcaagttggccggcacacctgtattcgaacttgaggtaagactagtataatgtcatgcatatgttattacatgtttagcatacatgttgtttatgcctcttagattatattgatagcggtatgcttatagttgtactgattactgataaatgtatgttagctgaaatactgatcgatattgtcacatcaatatagttagagtatgactagcatattgagtataggctgacattatggtcgatagtattgccatataaccgttctagactctgtaccgtgtgggacacaaggatagggttatgatcgggtgtatgggtgcctagttataacccgggatatttctatgtttatgttatgcttttcttactgagtctgtcaactcacagtgctatttccatgtg

SEQ ID NO: 268611 - DNA, 545 bp, Cannabis indica
aaattccaactgttgacatcccaacagcaacccaaacaacatatcctgttgtacaaaatcaatttcccattgctgaaatcccagcagaaacccaaccaacacaaccggttgtaccacactcacatatttccaatcaactgtcagacaaatctgataaacataaacaaaaaccttctcccattgctgaaatcccagcagccataccaacaacaccatctgctatacccaactcccacattcacaccaaaagtggtcgaaaatccattccccctgcccacttacaagactacatatgtcaaactcaaactaaggcacctcccacttcttatcctattgcaaattatatatcatacaaaaagttctctaagcaatttcaagcagctatccttgctgctcatcttgttgaaccaaaatcgtattcacaagcttgcaaacaaaaaatatggaacacggcaatggataatgaaatcgatgctttagaagccaacaacacatggattgttgtcccccttcctccaggacaacatgtcatcagtaataaatgg

SEQ ID NO: 268612 - DNA, 511 bp, Cannabis indica
tgcttgcaagcatgactcggcaagagttgttcgagagacggaagtgtgcatgaggcacacagtcgcgcgagaaatgagccctttgttactcggatggttagaaggctgaccttgacatggagaagtcaaggtactgcacgggtgttccgctgcctgaaaaggtgagcccgtgacaccatgtcatatatcaagtttacatattcttattttagtacaaaaatatatatataaaacttcctaaatacattttggggggaaatcagtagtatttgtagaaaaatttttgtagaaaggtaaagatcgagtttgatagcttggaatgatgtgtgaaccaaaatttgttggaggttttgagtttttgaaattgaacaatggaatatgggagctttaggaaaatatgtttgggacatatagctcaaaagaaagataatttatgggtaaaatagttaattcggtttacataaaagatcaaaattggtggagctaaagctccacaaggagggagttggta

SEQ ID NO: 268613 - DNA, 820 bp, Cannabis indica
ttcttatttagattgtatgtggatgtatgatcataggaatgatttgttttatcaaagtaatatttatgccattataattggttattcaaataaatttagtatatataagtcatatctaaataatacttattatttacttatagaaaatttggaggaacaagccataagttttgcagattttaaagcaaacattataacaaaaattaaagtgaatatgcgatcttaaaatagaagaaaaaagtattaaacaaagtcttaatatatgaaatattattaaaaaaactaaaaagattataatgaaacttctacccaatcttccattagttcgactgcttgaatggtaaattgattgtactttaaactaattgttctttttagatctatatacaactgagtatcaaaggttggagatttaccaactgagtaaaccaaatggtaaaagacaacttgaaggcactgtcttatggagtctttaggacaaagccttgaagctgttttataggcaaaatatttcttccaactctccataagattggatctttcattaaaatagttccatctttctcttgtgtctatttaatgaaaaataatataatttttataagtcaaaatttaaaagtgaatgaatcaaaacataacaattcaaaagttactatatattatttattattatggacaaattacaatgagtatttgggcaaaacgagaattttatgttcatctaatcctcttaacataaacactaaaacttaagctttgactcattacagttaaaccactctcatttcatttcattatatgccaatcaatgaacccacac

SEQ ID NO: 268614 - DNA, 493 bp, Cannabis indica
acttcatattatacatctgcatgtataacttctaattacccaagcagggtggaaggcagactatccgagaaggaacaagtttggctttccaaactacttatcaagagttaactatttcagaatgatctcgtgaagtccaagcacaaaaacaatccctacgattgtgggattgagtcagaggaatatgacaacatgttccaatttcttattttgtgtagcataattatgtaatgaatattctttcctattttatacattgtaagaaaaagggaaacctttcctcatgcattaaggccctataaaatagtgacttagcctcactgtgaaagggatcgaaagaattgcttcagagagagagagagatctaagagagttactcagagatttcattgtaagagctctgagagagaaaaaatactttattctttgtctcaagttaatacaatctaaggggagtaggctattaccacacttacagggtcgaacctcttta

SEQ ID NO: 268615 - DNA, 521 bp, Cannabis indica
aggaatttggaggatatgatctacctggtaagagggaaaaaaatgttgaagcttaggcacattccaagtattatcatggtttataaagaaggagacaaaagcttgggaaggatcaattgggtgtatgagagttggactgagaacgttagggatccagttaggtgcagatagggaataattggtactagccccaaccttccagaccagacctttcttgagcaattgacggccccaaaggagacttctccaggtgaaagaatagttatggccaacaggagcattcagaagatcagtatgtttatgttgcccctgattttgcccaatatacgtggaccaaccagacaaggacacgtggatcaagcaacttataatccaaaaatatttgctaagtctttatgccataaggcagtgtccaagacgtagctcccggagaaggcatatggaaccccatatgctcccggaagctcgagtaacgctaaggcatctccgcggggtgtcaggtttctcctgagcaatcaagt

SEQ ID NO: 268616 - DNA, 766 bp, Cannabis indica
ttgtgagatgacttgcaaggacgtccaatgagaagcatcaacgaaagggtcagggttcgttcggaaggaagaagcccaaaacgaaatgaatctattgaaaacaagctctagaggcaaacccagcaatgtttcaacaggagctgtttccactagaattgataactcgggggcttctacttcgaaaagaaaggacagagttatggaaccgtagaaggataaaaagaaacagaagaagcatgacaaatacgtgccaatgtatactatttataccgagcttaatgaaactcgagagaatatttacctcgcacatgagcaaaaggtggccttcgacaaacccgagcctatgaggaattcgagaagcaaaagagatcctaacaaatattgtaaattccataaggatgttgggcatacgaacaacaaatgtcaccaattgaaagatgagatagaaagtctcgtcgctcaaggccattttaaacagcacgtgaaaagacagggccagggatacaaccagcccagtctgcccaataacccaaacaaccaggggttacaacctattcctattgaaggagaggacatcttggttatttcgggaggaccacatatcgtaggggaaagcaataatgcccagaaaatatatgtgaaagggacaaagaatgagcagtcggcctttgccccaaaaccttctaagaaggtgaaaatcgaggaacctcccatcgtattcacagaggaacatgagaaaaacatgagatatcctcacgtcgatcca

SEQ ID NO: 268617 - DNA, 594 bp, Cannabis indica
tataacttcgttagttttttcctgattttgctcatagtaagtatgtggcacagatgagtggtacacgttatgatgctgttgctgttgatgttgttgctgctgttgctgttgtttctgctgctgaaggtcatcgtcccaaccattgtagaaggctcggctttgcaacttctcagcatccttggacatgaaagcatatgttttctgaggtgttggggttcttgtttcaatggaaggaagttcatcctcatctggtatattgaaactttcttgcacaggccaagtattcaaatgattttgttgttgtagattttgatattgatagtccaaagctggttttcttcgaaagctaggaaaggctgcacccaaaatttccatcccagctgtttcagtgtttaccaatagctttccaatcgatccaaagaaccccttcccttgtttctccagctcgtcttctgttgggataaaaggtggcctgactgatttcggaggcttctaatatgcacttgctgtaaagctcgtcttctcggggcctagatcctgaaaaaaccaatacaacacatgtaaacaaattttgtactcttaccaaatgaaatc

SEQ ID NO: 268618 - DNA, 616 bp, Cannabis indica
ttgaataaaatagattacattgaattggagttttatttagggaataaaacccaacagcatatgatgcgaatgataagaaaatactttctaaaaatgctaaagctaaataagcacttatatatggtttggattgagatatatttaaaactattgaaaaagcctatactgcttttgatatgtggaaaattcttgaagttactcatcaaggaactagtgttatgaaagagactaaaattcaaatttattccactcaatatgagaactttaagatgaaagtggatgaaaccattactaacatgtaaactcgcttcactacaattactaatggtttgaattctattaggaaggtactcactcagaaggatatggtgaccaagatttggagaagtttcaccaaggcttatcaaagaaaagtggtagccattcgagaagccaaggatctctcaacacttcccttggaataattaatcagttcactcatgaaccatgaaatttctatgagtgctcaagaagaagaggaagttgagaataaaaagaagactattacattcaagtttttctcctcccatgccattcgtgaagaagatgaggatagcttatgtagtgacatggagga

SEQ ID NO: 268619 - DNA, 755 bp, Cannabis indica
attaatgcaaaataaatagaaaagggtaaaaaaaactcccataagttttctttgtttaacgtcgttagcgcgactgtatgttgcgctcatgtgattttcacgtcgggtcttctaacaaagactcattccttatgtatttatcaatggaatctaacacattatacttaattactacaccatcgaattccattgtaagtatccatgctttcatatccaactttttattagtgagtaagaagggtctcccaaataaagttgatgtaggattgggatcaccctcatcttccatctcaattatgtagaaatcacctagaatgacaagtcaataagtctacacaaaaacatcttcaactatccatgagggataaagattagtctaattagtctgattagtcaattgaattaaaacctgagtttctcttaatggaccaagatttaaagaagcaatttggaaaagacatcatattaataattgctcttaaatctatcatgcaatgatcaaacatggttttaccaattgtgcattaaattgtacttgatttaggcaataactttcattggagaataacaacaaccttctcccccacacttactttctcaccaccattcaactttttctcatttggacacaactccttaagaatgctagcacaatgaggctcttctttgattatctcaagacatggaatttttaccctaactttgggaagattttcaggattctccttgatgggctcctctttcttagatttttt

SEQ ID NO: 268620 - DNA, 893 bp, Cannabis indica
ttgtgtacctgaccaaatgatccaacgactagggataagggaaattcaaaaaggagaagccatgggatgacacgtgtatgaggcccggcctgtacaatttgacacccttaaatgccaccaaccaattcaacggtcagatttcaccccaatgatgatttgcctaatgcagcatttgcaaagaagtagcctataaatacccctaaaagatcataagagaaaaaggaccctttttttctggggggggggagggggaagacccattcttcatcatcataagtaaacacatttttgtaaccctacaacaaactccaaaatattcctactaagcttcctcttcttcaagaggaacacgctggaaaggagttacatccatagaatatctatttgtataaatagttactggacaatgtgcctaacaaaatggactcgtggactaaggatagttaacggctaaaccacgtaaaaattacttatttgttatttttccatatattttttcgttactttcttaagctctaaaaatatttagttgtcgaaaaactcggtaaacactaaggatgatcgagcagtagagaaagcccatatattcccttgcaaatctacaaacatcatgttaaccaatctttagtacattgcagctgcattttttaacctaaaagacattactttataacaatacaaacctcgattagtgatgaaggaggtatgctcctggtctggctcatacatcaggatttgattatatcccaagtacgcatccataaagctaaggagttcatgacctgcggtggcatcaacaaattggtcaatgctaggtaaaggagatttgtccttgggacaagctttatttaaatctggaaagtcaacacatgcgccatgagccattgggcttt

SEQ ID NO: 268621 - DNA, 627 bp, Cannabis indica
ttatcatgatgtatagtattgttttattttttatagcatcctagattgatttgtatgttaatataaattagaaccaacacatagaatttcattcaaacaagtaatttaaaatttatggagattactgtgaactttatggtcaaagatcaaaattgattttgagataagtttcatgttatgttttgagggtgttggatgagttttattcatttatttttggatttcatgttacaagctttagttgtgttgcaattgtaaaatatatataccaaatttattaataattaatttttcatgtagggtcaattcattcatcttaaataccaaacacaagcttatattaaagtatttgtactattaagtgtttgaatttaggattaaggggaatgaggttctatttcaaaattaattagtaggggaaaagtaactcattcatcttatatatatattttattatctttccatatattaacaatgtgggattttctaatattatgtatttgtaattatattttaattcacctgtcaaatcattggaagattagactaaaaaatttattaattcttttacattatatttgtttaacttggctaaaaataatgtgatgcttttattatttttttttt

SEQ ID NO: 268622 - DNA, 546 bp, Cannabis indica
gagcacctggggattcagaatctctgctatttcgggacaacaagtaagatagtggtcagcacgtggagtatgcgcagtggcgcttatattgaaaatgatatgtatgattgtttagtaactggattagggttattacccttataggaacggtcttatagcccagtaatattaccctagtgatatatgtgtgtaaatgccatgccatgttaaatgtaatgagattcaaggattatgcagttaaggcataatcaagttggactcggtaaccataaccgagatgaaccattctaaggccttattgtatttacacgtgtgagagcaacacttaggcctacgccacgtagatataaatagatgtgtgagcgcaacacgtaggtctacgccacgtaaacataaatgggcatgtgagtgcaatatgcaggtctgtgtcacacagacatatgtgaatggcattactatttagatagcatgatgagcttattattgttattgtttatattatcttgctaggcttggctcacgggtgctctactgtgcaggaaaggg

SEQ ID NO: 268623 - DNA, 741 bp, Cannabis indica
aggctaaaaatagcctaacagggctctatgactatcatcaaaggacataaaaatagtggcctatactacttgcaaggaagcctagtagcttgctaccacaacactaaggagcatgtcacagaagacactaagattgtactatggcataggagattgggacacattagtgaaagggggttacaactaatgagtgaacaaaagctacttggtaaggacaaggtaaccaaagtggatttttgtgaattttgtgtactaggaaagcatcatagacttaaatttcaaactggcacacacaaatcacaaggtatcttagattatgttcactcagatttgcggggtcctgagaaaaccctaacttttgggggtagtgcttatttcttatcatttgttgatgactattctaggaaagtatgggtttatctgttaaaacataaaaatgaggcttttcaaaaatttgtgcattggaaattacttgttgaaaatttaactaacaagaaattgaaaaccctaaggactgataatggcctagaattttgtaatgatgagtttataggttattgtcaatacaatggaatccagaggcacaggacagtgagaaaaacccctcagcaaaatggtgttgctgagagaatgaacagaatcatactgaacaaagcaagatgcatgcttttcaattcagggctctctaatgggttttggggagaagcagttgtaaccactacatacttaattaatagaagc

SEQ ID NO: 268624 - DNA, 860 bp, Cannabis indica
caactagttaacaacttaaggtgttttaaaagaaaattaaacaaaatgaataaatgattgataaaagtaaaacaaattagtggcactaaaaataaacttaaaatagcacaattactactggaaaattatctgtaagaaaaagtatctatagaaaaatagacttgaatagctaaatcctccttatgttgaatctactaagttttgcagtgttacttcagcattgttccaacaaagttgcacagagttaacagaatttttctatgtttatgagatttttccaaaacgaacaatttaagttctaccacttaaatcaatatattcctatatcaaattagattgcaaaacaacatttaaacatcaattctcaagttatgcaaggtaaataaaatattcctatttaatttactaagaaaaacctacatctaggtattcacttgcatcatccaagttgtaattactagatctagccttttcagaactaaatctagcttagtaaattgttactcatggccaagtaataacaatcaagaaactgcaagcttacttgaatgaacaaaggcaaaattgcttaaacatgctaaaaataatcatactaagcatagggattcatagccattcaagcctcaagaggcttagctcatgttcaaaccaataaacaaaatccaaaataaaagtagttcatccatggctgctacctaattctttacaatttaacgaacttcaagtatttaaacaaaggagaaaaatagaagaaagagaagagcaaatcaaacaaatgaagcttgtgtcctccttcttctttttcgggtggtttcctctttagttacttcctcttttgtacttttttcttctgcatttaa

SEQ ID NO: 268625 - DNA, 547 bp, Cannabis indica
cgagaaagatatggatcagatcatctctttggtatcttaacaggcattgataaatcttgtgccaaaaaatatagcgaattcaaacatcaactcaaacaacacttggaaaataatggtcctacaactccatatgctggatgcactttagaccaatggaaaaaggccattgaattttttgaactacctaatgtgaaggtgttttatttttattcaacctcaattgaatttttactaaactattttcatttcacatattaatatctccatatttatttttgatagaaacgttcggagatcaatgcattaaataggaaaaaattgaaggagttgagccatggaggatctcaatctatacctgctttgcgttataaaagggtacgattaatttataatataattacctccttacattcaatatttaaagtaatgaagcttaagacgaatggtactctttctgcttattgaaacattactagctataatgtaattgcaaacattacttgctgtattgttcttggtgattatttaatacttcattgtgctatca

SEQ ID NO: 268626 - DNA, 527 bp, Cannabis indica
tgggaaactggtttgcctcaagtggttgataattattttcatggcttatttacttcggctaacacctcttgtaatgaaataattgattgtgtgtcgcacatagttccggattgggtgaatgtggaacttggccatccgatacaagaggaagaagtgaaaaaagctctctttcagatgcatcctgacaagagcccgggacccgatgggatgacccctgctttctatcaaaaatgttggccgattgtcaaaggagatgtggtccagtacgttcgccaattctttgaaaatggtgagttgaaggatgaatgtagtgaagccaatgtagtccttattcctaagaagaagcatccggaattcattgcagacatgaggcctatagctctttgtaatgtattgtataagatcattacaaaagtcttggtgaatcgaatgaagccatttatgaattcgttgatctcagaaaatcagagtgcatttattccgggacgcttaatctctgacaatgttatggtttcttttgaaatctt

SEQ ID NO: 268627 - DNA, 605 bp, Cannabis indica
cgtcggaaaaatttagtattcccagctgtttaaaatcgtagtaaacaaaataggcgacattttttttaataaaatgcgaattttcaggagagccttatacccgacggtgttaaactgtggggtataacggcccattaaaaaatcgtcacctacttctcgtcacattttccacgcgcccacctacttttttttttttttttttttttttttcctacatacccacctatttcttctccatttcccacaccctaaaacgaaaatcttaactctccaaaaccccacccacgcctctgcaccatcgccctcccctctcgctatattcctccctctctcgatcttcctttcttttcgtctctcttgtccatcgatctctacccacccctcctcctgtcggtctccctctcctctttgtcgcatacgttggaccaccaccacctcccgttggtgtccctctcatctccgtctcatacatcggaccaccaccaccttccatccgtctcgctctctctctttctctctctccgagctcggtataaatacatttatttatttatatacttttttatttattatatatatttattttattattgtataaatttaat

SEQ ID NO: 268628 - DNA, 800 bp, Cannabis indica
ggccaaccacctagcaaccaccctgcaaccatcgtctgattgataccttcgtctgatgcaaccaccgcgcaaccacgcagcaaccactttgcaactatcgtctgattgtgtaagtgatgatagtgtaagtggtattttggtaattaaaattacataaaaggtataaatgttgactttaccttatggaggtatttttgtaaataaaatgtcaatttatattttctatgtaataattccttatttattatgtgataaaatttacattatttttttttatttctttgatgtcatttatattattttattagaatatatatttttttttttaaatgaaagtcataacaactcaaccggaatagtgtccaagttaaaaaagcgatcagggtgagatatagaagcccttgcaaaggaatgagctgctacatttgctgatcgttttacaaaatgaaaaaaaaaatattacgcaaagtacttaataaattcttgcaatcactaacaactttgccaaacaaggaaagcataaccacagagttacgaatagcttgtacaaccgaaagacaatttgtttctacaaccacaataagccacgaatgatctttgatccaactcaatgcctctcggaccccaattgcttcgaccaccacaacagaaatcgaaccatggaacaactttgtaccaccctctacaaaaaagtcgttggaatctctcgccacaaacccaacaccataggtagagtttgttgggttttatgccctaaataaaactctatttcaatgtaatctctatctttgaaatatcaa

SEQ ID NO: 268629 - DNA, 801 bp, Cannabis indica
aaatatatttttattatacgtattttttttaaatcaaatcaagacatattttgaacattatacatgtgaactaccaatttatctttttatgaataacatttacacaaaatatttttgctaccgaataatttctctgcacttttcaagcgaatattccttctcatcaaataatatcttgaatatatgaatgaacttaatatgaaatttatttatatatgtagtcaaatttaattttgtagccaaaatgatatatatattatataaattactgagtaaattatgttacaaaatttatttttgactaatactcagcgacgaattaataaaattttaccagtattaatacaaaatttaaataattaataaatatacatatacaattaaaaatttattaaaattataatactacatattcatagatcaataataaaatatactataaataccaaaatatacaaatgtgagggcgctagaatatgttttaggtattatatgggtctgccaatatttatgctctttattttattaataacatatataaataagaaaaatttacatggtatatcgacttttgctatttttttactaacaatactaccacacggcagaatttactttttactgtgtattttattaaattttattactgcagtatactgtatttatttatttttattttattttagttattattttactagttgtttttctataatttatttttttaaggtttagttgtggttcttttattattttgtctaagtgagaagtatcatatatatatatatatctgtcttatta

SEQ ID NO: 268630 - DNA, 853 bp, Cannabis indica
ataccaattaaagatcatttaaaggttgattttatggactctggtacgcttccgctattccttaatcttattgtttgattctcttgaattaattagggctatatacagatttacagtattctaatacaaggtgctaggggatgatggagagctgacactaggtactctccccttaaagagtattctaagattttagccttctaccaagaacatatatgatttttgctatatagacatatggtcatcaccatataccaaatcatagagtttcttaaatatgattgcaccattgtattcgtagacccaaataaatggcgaataccaagtcccgtcccgattcgggtaatattgatgatatttacaaaaatatcactaccgtacaaactaagcatcagcatgcacacaaagatgcgccaccacttgactttcacttggccaccttgtgggcatcacctagcttgtattgtgccatcttgaatgacacattaccctaggcagtggggtaagctagagattttgaagtgaatgtggcagaatcagttgcccttagactgaggttgcatattgctcaacaatatggtttttttttatatctccattattaaaagtgatttgacaggctaaattaatagtcataattctaataatgtatgtcagtcaatcacttttgatgtgatttctttttcaggaatagttggtggtagttcttacagggttattttaccttctgcaaactgcgaacgttgttgctggtgcactaaaaaaatgaactattctagctcattgggaatgcaaggatactatatgtaccaacattaatttttctatggcgttctttttttttctttttttt

SEQ ID NO: 268631 - DNA, 1409 bp, Cannabis indica
ccaagctttgacttcagccaacacttgatgacgaggtctcttaccccgttttttattattttggagagaatgtttggagcaaaatttgcatttgagtaatcgaaactcgtgtaccaggttaattgttaatctaggcgctggctcaattttgatacgctcttagaattgctgtttcctccccgaatttacttgtattttcgctactttttatgacaaaaaattacctgaaacacaattctcagaacgcgaaatacaataaaaacccgtaccaactgcaactaataaagaaagcacctcatcaatgaggccccaaacaaacaacagtactacaagaaaaattaatccaattacaaacagtagtatagagtctagagtccaactacctctattctatcaataaatatagatattttttcttttcggtatttcttgaccacaaaatatttcttgaacacatctattatttcagtaaatttgatatagatatatatatatacataaaatatttcttgaacacatgcactaattaattatatataggatacttctaatgtggtgacattggttttgtccccatagaataccgacactttttggactatagattataatgactttgtgattctcacaataagtaatgtgtagataacagtatattatagagctctgttgagaatcatggggtttcaactcaaaatcaatgagtagcgtaacccatgttcttatatatggtttaattttctaccatttattctatgtgggacaatatccataacaacctccaacccccatttcattgtcttttttatttttctcagtattagcttccctctttcactctaaaattttgtttttctcatagttttgcaagcaattaggagtcctcttacaatgttgtcttactttgggactgttatatttgattgtaaaactctgttagaaggtttgaatgatgtttctgttctttttattagacaatctgcgaatagtgttgctcattacttggctaaagcatcctattctgttgttgatcgtgttatcagaagtaatgatgtttcttctgattttcataatgtaatcttaaaggattgcagttaataaattgatgatttattttcaaaaaaaaataatagtaacttgtttaactcgaaggaaacattaattaataatatatttgatccaaaattactaatgatacaattattagagcattattatttggttttccaataaaatgttgaagacttacaagttatttttttttataatttgtctaaattaagtacttaaattttataaaaataaattagaagcttattcttaaataaatgattcttaaaaagaaattttattatataatgtaaattttgtaatatgactataaataggtacaagtcactacaaaaaaa

SEQ ID NO: 268632 - DNA, 762 bp, Cannabis indica
ccccgagcttgtctttaaagatctctttctcaaatatggcattttgcatgattttacttgtgtggaaacacctgaacaaaatgccatcgctgaaaggaaacaccaacatttactaaatgttgctcgtgccctttgtttccaagcacacacaccactgaaattttggtccgaatgtgtcatgactgctgcatttcttataaaccgcataccaactccaaatttgaataatatgacaccatatgagttattatttcacaagcaacctgattacactgatttgaaaacatttggttgtcttgcatttgcatccaccctcactgctcatagaaataaatttgcctctagagcaagagtttgtgtttttctaggctatcctcaaggtgtgaagggatatcgactctatgacatcaacaataaacaagttttcatctctcgaaatgtggtatttcatgaacacatatttccctttcataaactaaatgatgaaattggtcacatagatccttttaccactactgttttgccatccactagtattgatgatactccaattgctgattatcctattgacactactgctatatctagcaataacttacctgtacaggatcatagcactaatagcaacactcagatacaaagaccaactactgtatcaaacacaccagtcgatacatctacaacaaatccaccagcagcctcctctgcaaccaatgcaccagcagccattcctacaacttcagaagttccacctcgcagaac

SEQ ID NO: 268633 - DNA, 1356 bp, Cannabis indica
caagcttgcacaagaaaacctttggaccagccaatcccaagtgttgataaatttcctgaggctgggaatgaggtcttggctgcaggaaatgggatcttttgatgtggagaataaggtctatgtagaggtcgagaccttttacgtgtagacgatctttctcaggctacgtgtagacggtctttctcaagctatgtgtagacggtcttcctcgagctcaccaaccctccacgaataaccttgtgttctttatcttaggaagatggcttaatggtctgcccctagtagcatttttgtaaagacaagtttgtaaacgaacttggttttctcttatcttaaatgtcttgtactttttcatttgatcttaatataattgcatttacttgcgtttttattcataatgtaaacaattatactttgatcaagtgtagagtacttttgggtttttccatggctcataattttcctgtttaagtagttagttatctaccaaacttttaattttcaagcagttatcaactctgcctcgcaatgacagttataatctgtcttaagcaaacttgaatatacgtttaatgattttatcacttttgtatatatttgtttgcttatatgaatagttatattatctatccatgcactaggtttaagtacttttatcaagcatcgcgatgtctcatttagtacttttctatcttgcgcgaaccgttagtattcagttttgtgcacaagttatgagttatatctcatttataacttttgattttcctttctcgtcaaacaagtttaaaccaaaaagttatgatggtttgatccccttctcgtcagaaaggtttgatcagtggtttgatcctcttctcgtaaaaaaaagtttgattagtggtttgatccccatctcgtcagaaaggtttgatcaaaaacttaaaaaaaagttttaaagttatgggtttgcattatactatgtatttccaaatgaatttcggttaatcatacataaatgccccttaagtaattttaaagagtaaagctttgtaattacttaaatagtagtaatgattctctttattcataactaaagttaaaatattacatcattaatgtgagttacatcatttatttactggtaatagggttgtaaatattccacattccattagttctttattagcgagccattgagtcgagccaatttgtaaactccgattcctactactgcattgattacatatggaccctcccagtttgggttgaacactcttacagacgcgtctctcgtgtttgcaaataccgatcttagcaccaagtctccaacattgaatagtcttttcttgactttttgttgaaatatcttgtaactcg

SEQ ID NO: 268634 - DNA, 738 bp, Cannabis indica
cccgtgcctagggcccacgctttgggcccaaaataaaaaaaaattattagattttatttaagtaaaatttaagtgtattataagtaacaaatattcatagattagttggttgaggtggagaacataatgtctaagatcatgagttcaaatcccataacactcttcttttgataattaatttgtcttgggtccatatattttcagggccaaccttgatgatactcacacataagaaagtgctacgcactactagtatcatttagcatttgtgttgtagtatgagtgattttaatgactagttacaatacctatactttattttgtgacattgccgggaaaaactttataggtaaagcacagctggatttattaattactaagagaaaatatgactagtctccaaccatcttcacaattcctttccttgttgatttttttctttttcataatttattacataatttttaggaatatttacgctaaactgcacatattgtataattttatacattataattaacactagataaattagccggtgcggcgaattaaataaaaaataaaactttaatataataaaaaagaaaagaaagtttcattaatataaattaacttaaaaataataattttaaagtatacaaattttgaaataagatttttttttagtacaaaatcacattatctaattatatattattattgattattgatttagttttttcaataaaataaaataaa

SEQ ID NO: 268635 - DNA, 633 bp, Cannabis indica
ctaaaaaaatataaatattgaagaaaaaggttatcacacaaataactagttaattactcgctattggtaagaaattaggtgacataacacaaataattatatacacattttatataaacttatcaattattatgactgacaaaccaaacaaataaatgcattcacttcaggaaaagccattccactcccagatccattccactaactaaacactaccctagttagttaattacagcttaataacatgaatcaaactaaaacaagaattatagtaatatataaattaatatgatataattgtgagaaacctagttggttacattgtgtaagtaataactagttataattagttactaaatactgaatttttttggttagagtatttgttatggagtaaatcatggattcgtgaggaaagagacacattgcgatttcaagtagggttcgatgcttttttagagtttgccttaaagaattctaaaaatcccgaacatcttcaatattgatcgtgtgtagattgttaaaaatgtatctaaaggaaatattatgattaaggaaatattacaatgatctaaaagaagttatactacttagtattggcatgacgaacattttagctgatgatccatatcc

SEQ ID NO: 268636 - DNA, 534 bp, Cannabis indica
ttcttcttaactgaaaaaaccctagcacctaatcacctaccccacaacccaaccttctccgagtcccctctcacacactctctcatggtgtacaacgtcggccttctccgaccatcccatgtcagacgagccacaaaactaaaccccacgactcaaaaaatcccaaccccgatctgccctcttctctctctccttcgatctttctctaacccccctctgttttttttcgttcagtccgaaccccttccagcgaccaccatgaagagagagagagagaagaggcgagaaagagcaagagagggtctggaaaggagaagatcgagagagagaaagagagggcaaatggcttcggcgaggtatgggtgcctcggcttcagcgagatcttgggtggtgagacgagagagagaaagagagggtttggaagggagggctcagagattaggatttccaaaaagtttaagaaaggaagaagaaaaagaaaaaaaaacgtaaaaaaaattaaaattattttcgatttttgtggttaagtgtaa

SEQ ID NO: 268637 - DNA, 668 bp, Cannabis indica
ggtgatcaacgctccaaagtgaccaaatcgaaattacagtcgccctccctcaaataatcgaccttttatgccaatttgtgtatgaaatatggtcatacagccactacttgtcactacaggtttgacaagaattggatcacccccaagaatcctccttctcagcctcatgttcatctcactgaacagcaccttaatcctgatcatcacactcaaactctccctgactttggagatgatattggctggtatgtcgacactggtgcgacaaatcatgtagcttttgctatggaatctttggacactgctaccccttaccatggtcaagaatcggttgctattggagatggtaagaaattacttatttctcatattggtaaaaccactcttccctcttctcattctactcctcttaaacttcactctgttttgcatgtcccttcaattaccaaaaatttagttagtgtctccaaattaactaaagataatgatgtctttcttgagtttcacaagtcttgttgttttgtcaaggacaaacactcgggggctgtccttctcaaaggaattctcaagaatgatttgtacctgttaggagatggccaatcacctctgtccaacagctctcttcaatgcaatcttgtcaattcaatttctagttcctctcactgtaa

SEQ ID NO: 268638 - DNA, 944 bp, Cannabis indica
atggtctgcagcttttagtaccatatccccttcttggaatattcttggtcatacaagcttgtcttatgcttgagctacacgtccttgatactgtaataagttaccttgggctttatctcttcattcatcaattagctctaattcttctaatcgtgcttgatgtacatccattcccgcaaccatagctaatctagctgatggcacaactatttcggcaggtaatactgcttctgatccataaaccaaagaaaatggtgtgaaccctgtagattcccattttgaagtgcgataggcccatagagctaaagggataaattcttgccatattgtaggactatcgtgcaccatgcgacttaagcaccgcaataataacttattaaatgcctcagcaatgccatttccttgtggatagtacctagttgacttcccatgaaaaatttgatagtcttccaacaatttcttggttgcttttccagtaaaaggagtgccattatctgacaaaatccttttcgagataccaaaacgacaaataatgtgttctagaatgaaagtggccacagcttctatagaggcttttttcaaaggaattgcttctgaccattttgtgaaacattctgttgcagtcaaaatccaaattttccttgaggtggtgaaattggacctataaggtccatagcccaagtgtgaaacggccaaggggtggttacagatcggagaggaatgtctggcgcgtgaattttctctccaaaaatttggcatttttgaccttttttgtgaattccattgtatctgcttccatggttggcaaataataccctatacgaatgatttcttcgaatagtttcctccccccttgatgttcaccacagtccccgtggtggacttcttccatgacttcctcagcttcttctttactaatgcagcgtaacaattttccattgaat

SEQ ID NO: 268639 - DNA, 771 bp, Cannabis indica
taagaagagtaataataataataataattaatttccaaaacaaaacaaagaaaaagacaatacaaatttaaagattgtatatataaataattaattaattaatttaagtaatagtatagctaaaatttgaagtggtggaagaagaagatgatgatgatgatgttgataatgatgatgattccaaaagttgttctaaatattctggcccaagatcttcgaatactaattgctgcatatcatgatcactactcttattcttatttttaataataattttatttttcttttgagtagtttttgaaacctttcttctcatattgtaatgcctctcttttaaggcctcagctggagatcttccaaaattaaagtcataaaacctaatttcttgaagtgacttttgtaccctttcaatcggaaaattaagcactgcagcttgccctctcatcgaaaatgctgcttgatcataagcaagagccgctgattcagcactttcgaatgttcccaaccacacgcggtggccgttcctcgtcgagtctcttatctccgccgcgaatttcccccaaggccgccttcttactcctataaaagacttctctttactactactactcatcgacgtagtagcagtactattactattactattaccattactattcttattcttttgattctgatttggattctgattctgattctgaagacgagagctttcttcttcctcttcttcttgatcataactgtaatcgagtgttgttgttgttgttgttg

SEQ ID NO: 268640 - DNA, 2755 bp, Cannabis indica
tttttttttaaaaaaagttcagtttgggcggtttaaattgaccaaactgaggttcaaaacggtcagttttaagatagcatctgaattggtaggccggtttttggattgcaccaatccagaacgaaaactgaattttggatttttatatagaaaaaaaccgaccaaaccgaccgatgctcaaccctactagggcatttattcactatgactcaggttgacgctaatgctagtacatcagtggtaacaggttagttggttataaacggttgttcttattcagtattatttgattcgggagctactgattcttatgtatcaagtagagtaatagagagttttcataaactgtgtgatgtttatgctttgggtttggaaccctgttaccctctggagacctaattgtatctactcgatggattaggtcattgtctttttggattgaccgttatgaattaactgccaatctaattgagctacaattatgtgattttgatataatcttgggaatggatttcttgtccaagtatggggaaacaattgattgcaagcggaagatggtagtgtttgaacctgatagtgccaatccagcagtgtctgtggataaggtacaaggatcacgcacacccagaattacaatcctgaaagctagagaccttatgcgtaaatgttgcataggattcctagttacaatagtggatactagtcagcctatttcaattagacctaaaaatacgagattggtgtgtgaatttctagatgtatttccaaaggatctacctagattacaaccttcccgagagattaaatttgttataaaattggtttcggaagcagaaccaacatcaaaagcaccttatcgaatggcttaaagattcaacttcgagaattacttaacttgggattcaccagaccgagtttttccccttggggagctctagtgttatttgtgaaaaagaaagatgggtcacttttcatgtgtgtcgattatcggaaactgaataagctcactattaagaacaaatatcgtctacctcgaattgatgacatgtttgaccagttgaagggtaagacagtctattctaagattgaccttcgttccagttaccattagttaagaattcgaggagaggatatcccgaagactgcattccatacttggtatggacaatacgaatttctagtgatgtcttttggactcaccaatgcccctactacattcatggatcttatgaactgagtattcaaagattttttagacaagcatgtgatagtatttattgacgatattctggtttattctgaaccagaagaagaacatgaattacatctcagattagtacttcaacgattatgtgatcacaaactttatgctaaatttaagaagtgtgagttcttgtcatcacgtgtctctttcttagggtacatagtggataaagatgagatcatggttgatctggccaaaattgaagttgttcgagattggccaacaccaaaatcaactactgaggttagaagcttttttggtatagctagttattatcgtcagttcattgaaggtttctcaaagatagcgacacctttaacaaaattgacccaaaagaatttgaagttcaactaaacagaccggtgtgagaaaagttttcaggacttaaagcaacgcttaattactgctccaatattaactcgtccttttgataaggaaaagtttgtcatttattgtgatgcctcaagacaatgtctaggctatataattatgcaaactggaaatgtaatagcttatgcttctcggcaattaaaagagtacgaacagaggtaccctactcacgatctagagctcgtagtagtagtatttgtgctaaagatttggcggcattacttatatggcgagaaatgtgagatttacaccaatcataaaagtccaaaatacttcttctggtaaaggattatgactgtgaaatcctttatcatcctgggaaggccaatgttgtagctgatgccctaagtaggaagggctaaaaccagatgaatacaatgaaacagattttcaagcaactggcagttgaaatgacctaaactaacattgagtttattgtgggatggttagctaacattaccttgcagtctactctcctggaaagaattgaagaagcacaatatcaagacccagatttagtgaagtctcgagacaagatttagctaggatgaccaatgactttatagtggataataatggggtgttacagtttatgaaccatgtttgcattcctatggatgatgatattaagagagaattctgaatgagatttcccccaacaaatacacaatatcctaaagtgaatcgtctatctaccttggagcctgctcaatctgtatcagagaaacactcaatctgggtatgtccatgatccttgtaaactataccttgtcatggcgctcctttcaagtaacatcaaatttgctctagtgctgcccaatgatgaattgttggagaagacataaactaactaatgacactaactgggaatgcaatatctggacgagtcacagttagataattcaactttcccaccaatttgcaatatttctcaggatcttcaaatggttccccatcacgtgtaagatgcacaattggattcattagagcattacaaggttttactcccaattttccattcttagttaacaaatcaagtacatacttcctttgagacagaaaaataccttatttactttgagtaacttcaatacccaagaa

SEQ ID NO: 268641 - DNA, 755 bp, Cannabis indica
aataatactaatacaaaattaaaaatggaatataaaaattataagttaaatattaaaaatctttaaacaaaaagagtcggggtcagatcaaatctaattcaaataagtcgggtcggatttgatccgattcgagtatttgatctagcggagcgaggtggggcaggatccttacatgatttggatctggtcggatcataaccgaatcaggtcgggtcatagccggatcagatccgacccgacccatttacactcctagtataataatagataatatatatttatacttaatggagaagtgttccatatttagatatcttctaagtataagggttattatcattttgaattagagtctaattaatcattgcacgtaggattggtctagaatattattatgcaacgtcgtatatgttatcttttataagtttcactttgaattagtagaatattcgtctcaagtataattttaaaatgacaatcatatacttattaataataagaaagataattaaaattaaagtaatttgtggctgaatctttctaactattattttacttgtatttttaactctctaacctccaatttgggtggtaaaatccttcaaacggctaaacagttaacaaatttaaagtgttatccatttatctcagttaactgctgacataaatttctacgtatacctaagggtgttcgcggtgcgggtggtgcggtttttccaattttccaaaccgcacccgcaccgcgacactaaaaa

SEQ ID NO: 268642 - DNA, 670 bp, Cannabis indica
agctcagggtcctacttttactattttagaaaatataaggtccattttgtcatttaacaaaacacagggtccaatctgtaacttttgcaaaacacagggtccaaaatagtattttaccctattttaatttattgcacgctcgtgttaatttttcttatatgtgtgataattaactatttaacttttatttcggcactataaactatttaagattttctaaaaatttacaagtgatcttaaaaactacaataatgtacgcgattataaaaaatttagagtaaaaaactctcttgaatgtcaaaacatataggtatgtaacctctatctaagaatactctatgtaacctctatctaagaatactttatttaaccctctatataagaatactctatataagaataacctctaatttgttataaaaataaattaagtcttaatttgggcaagttataaataagaataacctctaaattgtaattagttaaaaaattctgtattaacaaagtatacctctatataagaataattacatcttaataaaatatatacgtatattttgtaaatttatttacgtaaatttcataattttattctaaattgtaatacatgtataaatattatatttacttgaaaataattctattatgatatagtattaaggattgttta

SEQ ID NO: 268643 - DNA, 626 bp, Cannabis indica
actaaaaaattatcctacgtggtcatattttacaaaataaaattaaaatgagtaattaaaataaaaataaaaactttaagagtaatttgcaaaaaaactctctaactatcaatttacttgcaaaaaaccatcaaaccttaaagttatttagataattttttgcaagtaaattaatagttggggggttttaccacaaattaatctaaaatattatacaaacattatgtcttttaacatttatagttgaagtttagtgcagtactgaatattattattattattattattattattattttgagaaatcaaaatcattgtattgctcaaaccattccaagtctttttatttcatttttaggcaaaattgataaaattctaactttcacctcatctcgaatgcagagcattaacatgggtaataggggtgttcacaaattggtttggtcccgatttttatagtttttgaaccaaaccagtataacggttttttgaatattaaaaaccaaaccagaccaataaatttctcaaacccaaactattaagaacggttaggtttggttcgaaactacggtttaagtagaatttataattattcatattttttatttttattaagtttttaattt

SEQ ID NO: 268644 - DNA, 660 bp, Cannabis indica
taatcgtacacctatatctatatgacgaaaagtcattaatttttgcaacatctaataaaaaaatataaggaatagagttgataaattaattatagtataattgagttaatagtggaaattaatcattgaagaaagaaataagagagtggtgcataaaattatgggagatgatgagcagcagtaccaaccattattgctgggtctggagtcacattcgaggattccagacttgtcatcagttgctgtggaagagtttttggagcagaggccggtggcgtgtagatggtggccgcgcctcgtgtgctgggagtcaaggctcctctggctcctctctggggcttctataattgtctctatttttaactacatgctcagctttgtcacgctcatgtttactggccatttgggtgcattagagcttgctggtgcctccattgccagtgttggaattcaaggtcttgcttatggcattatggtaatattactttcttttctttttcttattaagggctcttgttagtgttacccccaaataggaaaaagaaaaattttactttttaaaaaaatatatttgtttatttgtattttttttttttttgtagtgttatttgttttattgtatgttagtaatgtttctattagatatgatatatcatgatg

SEQ ID NO: 268645 - DNA, 919 bp, Cannabis indica
tataattcgccgagcagttgttccactcaggttggccggcacacctaaattcgaaatcaaggtaagattagtattatgtcatgcatatattgatacatgtttagcgtacattttagttgccgtcagaataacatatcaaatatatgttaggcaaatctatagccatcagattttcatatcagggcaatagtgaggtgtatatagatttgcaacaagatgacatcagatatatgttaggctatcagatagtatgatttaactgctaccacatcagtacgattagagtactgagtataggctggattcgcggttagtcatacattgtcaagaacgttcctgattcagttagggttatggttaggtgtatgggcgcctattataacccgagatattagtatgtttattatgttatgcttttcttaccgagtctgtcgactcacagtgctatttctatgtgtaggtacgggcaaggctaaagctaaggagccgtgagagcgagcaggtgaagattgtacatgtcggggcagttaggcctggagcgtacgatcctcgagacaccagggcttttgtattttgtcgctaggcgacaagtattttgtaattatgtagtaaacttttgtaacagtattttgtaaacgggatcccagaagtttataaaagttgtttgttaaattttaaattaaaaagcaaaattttaattattcacgtttttccaataacctcgttgattagcaacgagctgcacagtacgttaaaaatcatgttaacacgcctatgctagttagggtgttacaatttggtatcagaatcatcgtcaacagtcagctcgttccacggttcagtaagcttttattgctttagtagtttattttagtagtatgatttaagaaaagcttgttaggaagcatgttagtagcct

SEQ ID NO: 268646 - DNA, 533 bp, Cannabis indica
gttcattaactatgcaaaacaagtgtatatatatatatatatacatacatatgatgttttcaaatggtgtttcctttgattgtcttatttgctgtattcttttctgtagagcaagacattagaagaatattacaaaacacaaaggaaacttgttgatattcaagtaagtgatgcacctagagaaacttggcaagttttattggctgcgttacatctccagcatataaatgctgcaaatgtatttaaataaagaattttattttatttttttaatcttgttgtctctatattttttcactgcttttaacagaaataaataataataatggtaaaataaaattaatgtaaatatattttaattataatattaaaaatttaattttaaattttgatatttgcaagtcacatattgttagtttaattatcaacattattaattacattatttgaatatacataataataattccaagcaataactaataatattttttcttcaattatttattatatcatttttaaataaaatataa

SEQ ID NO: 268647 - DNA, 704 bp, Cannabis indica
aaaattgaaagtcatgcttttcaaggctttgaatgttcttagttgcatgaatgttaaatcttgataagtttgattaatttcatgatcttttggtggtttctattgttgaactataaatgaaattctagggtgcttctaatgcttaaacttggtctttatttgttgattatgctgctggaaaatatttggggtagaaggatttaaagctcaagttcatgagcttgaactttcttagtttgaagattgatttgggtattgttacaatctgaaattatggggtttattgtgggttttgatgcatgaaataagtatttttgactctctaataattgttagcaactttatttactaatttgagagtttgattatgtttctgggtttggaacccaggtgacgcggcatggtctttggcatgctgcggcgtgcggcgacatggcttttgcatgccgcagcccgccctcgagtttttgggcagatttgagtgtaactttgaaaatacataactttgtgatccgaactccaatttgggagttctatataccgttggaaatctcattctgagctctatgtgattatctaaattttaaattccatgaatatatattatgaatgtgaaatcaggggttaaccctatttgtgaacatcccagtatttgtgactaggataaccagcacctagtcaggagcacccggggatttggaatc

SEQ ID NO: 268648 - DNA, 1026 bp, Cannabis indica
gagaaaatccttgaatactatattcatgatccataaaggccgctggagcatttgtcaatctgaatgacattaccagaaactcatagtgcccaaatctggttcgaaatacagtctttggtatatcttcttcccgaattctgagctgttgataaccagatcgcaggtcaatctttgataacacagtctttccctgaagttgattaaacaaatcatcaattctgggcaatggatacttgttcttaatcgttatcttatttagttctcgataatcaatacacattttgagggaaccatctttcattttcacaaacagaaccggagctccccagggcgatacactgggttggataaaccctaaatcaagcatcccctgaagttgtatttttaactccttcagtaccactggagccattctatatggtgcttttgaaacatgttcaattccaggtgcaaagtcaatcacaaaatctatttctcgttgtggcggtaatctcggcaacttctcaggaaaaacgtcaagaaattctttaacaaccctgactactttaggcccaaatgttttgggtctactggagtcaatcacaaccgctaaaaatcctacacatccactgtgtagtaaatgtctagcccttaaaaatgaaataatcgggcttcaagacccctgaattgatccaacataaacaaatggatcctcaccctctagttgaaaagttaccattttccgcttacaatgaatgttggccggatacttggatagaaaatctatcccaagtataatgtcaaattctgttaattctagctctattaggtcaacactcaactccctatcttcgatcctaactggcatagacctaattcacctagtggagataaccaactccccgctaggcaatagggttccaaaccctctttcgataaaatcacatggcctacccaaaagatcaattacccgtgttgccacatatgagtgtgtagctcctgagtcaaatcacacagtataaatggagttgttaacaagaagctgac

SEQ ID NO: 268649 - DNA, 862 bp, Cannabis indica
ctttattgatgttgaataaaatagattacattgaaatggagttttatttagggcataaaacctaacagttacccgccgctggaggtggcatagggtctccgttctgggtatcttgtgcctaagattggtcgttttacacatgacgatgcaactagagattgttctcccttatgaggaattcaatctccctcttcaagttttaacactcgttggtgtcatggccaaagtcattgtaaaatcggcaaaactttgacatgtccctcttgctcatctcctttttaatgggagggggtttcttgtatgggatagtgttaagattttatgccctaaataaaactgatttaaatataatcagatttactaattaataaaagatcaaaaataattttatgttgcatgattcacatgatttctttcatgattatatgtttaatgtataaattctatcgaatccaaaacatatagttattcatgattatagtgtggtcagcacagtgaaatataatcatgattatatgtttcaaagtttatatctcatgatttatcagtacactggatttagatcgacatgataatcagcgataaaggatacttacaccttggataagtattatgtcctttctaagataagtgcaaagtatgttaagatcggatgtatggagtatatatcggactagatcgatattgaacttggaaaagatatcataaacatactgttatatctatctaagtcaatattagttagttgatcttaggttaatagatcttaaacctgatatggttgggttcgatctcaactgtattatttatgttcttggagttgttcgttgaagttgaccaatggattgacccaatacttaca

SEQ ID NO: 268650 - DNA, 661 bp, Cannabis indica
atcccccaagccttgtttaattgcgaaatgaacaaggcttgtccagatgcctccggttggctcctcggtttcctggcacgtgctttgggcgcgtgaaggtgtaattaatgatagccattactgcagcgattcactttttgcaggcgtcgattcgtttcacgtccattaattgatacagcgcattaatgggtgtcagacggacactcaagcgtttccaccgccttgattacaaatcaatctagccgttggatcttgggaattcgaatcgtgtgccttcccaaccgtacgattggtaggtgatcgtgcctgttccacatgcacttttgcctataaaagccaccattcttccttcattttggttactttcagcctttcaccaaatttcttcgaattttccagagagaaagaaaaccctcaaaccagaaaaccttcaaacaccataggtttcttactaaccttcattcgttactgtgagtaaacatttcttcgtcgatcaacaacaactcccagttccaacactttatgtaagtttttcgcatcccttactttatcgtttatgttcatgtcatgcttcactgttcatctgcgttttctgggtttaatgttcgaagtttctgggaatttttcgtcttgagtttctgtgtaacacgtttagatttct

SEQ ID NO: 268651 - DNA, 812 bp, Cannabis indica
ttttttttctaggttagcatgaaatctgttgttagggaatttttttaattgaagttttggctgttgaatttgtgatttgagcatgggattgtgcttgatttctcattgaaatgtcatcctttgtgagattttgagcctacctttgtgtaagttgtgcatgtacattatgtggaatgttaaacttgtttatttttagtggtgacccttgtatgccattttggtaacagatataagttggtgttggatttggggtaaaatttgagttttgtgttgtgatatttttcacacgcaagtgcacgtatcgtttacgagtaatagactcactgagagtgaggtcgatcccacagggattgtagttaagtacgttaaaattaaacttttacttctatttggttagataaaaattaagaaagaattttaaaaataagaaaaactagtaagaagcaaataattgagaaaattagcagttaataaaaactagggcttcgatttcaattatttcctattgttaatttctatgcaatagtaggtttactaaggtaatttatagtcttctcagatatataaatctcaattacatgcaaattttctactctcgtgataaatttaacgtgcaacaggcattaagcacagaaaccctataagctatctaaaccatgcaggtactctcgtcctatatcgaaattcagttgtatttcactatagcatatttgacactcacttctcagatctcgcatcaaaatcatagacagttaactggtgatcaggcaattaaatgtagttaagcacaaataaaatagaatacataaaaa

SEQ ID NO: 268652 - DNA, 455 bp, Cannabis indica
aaaatgataatatgcgatgtagttggattattattctttgtgattttttttctgaacaagtggatgaattattattattattccttgagctgtgactttattttattcctttttctgagtttttaaataattaaaaatagtttacttgtgcagtcattaatattgcgttcatacaaatttgaactcatttcatatttcagctacatcttcacaagcaaatatgaaagtgttcatatctagagtttagaagcaagaagatcttgctgtgtttgccaaggaagttgacattgtgtgtaatttgattactgcaaggaattagcaatttgtatagaagtggtatttgtaaatacgcaaattatatactaaagttttttactctggttcaaggaattcaagcaccactcgattaaaatgtgttttaatgcagtataaacttgtaaattaattgtgtttcc

SEQ ID NO: 268653 - DNA, 904 bp, Cannabis indica
ggattttggtatcaagatgagccgtacatccttgctaaccaagccaagcaagttttctatcttgaagatccactcagaggtcgcgattggaatgttgttgaagatattagccatcgaaaaatttgggacattaatgacaataaagatgagacagatgttgatgttgtaaatgattctaactcttcaaattttgttttgacggttgatcttggagagttgattttgcaatcgaatgaacctccagtaattgttgaatcgaccgataagttagtggattctgagaaggaaaataatgaacatgattaaagttatgttgccgaagaagtagatgatttactagttgaacttgttaaggatgaaattgaaaacttggtgaatgatggaaacgatagtgattcttcgttgtaactttaatcttactattgttttttttaaaaaaaccctatatagttaaatgatattttatttttctttcgtattaatatttgtgtcaactttgaattatctgcttcacattttgtgaatttttacattttcttatttttcatcttcaaagtaaagtacaatgtcagctagtctagcgacttaccacggtggggatggtgatggtagggatccccctaatccttctagggtaccctcgtcctgctaatcaggttttcatatttttccaaatctaacattattcttaatataaatggttaatgttcaatgtactaataaaataatttttctctcaaataaataaagttcaacctccggtcagaaagggtcgtggccttgcatcaaacgctaaacttgaacaaaaaaggacagatgctagtaagcccttaaaggttgaggtggatcttgaagctagcaaagtacttgggattgaagtgagcacttatgttcgatttatggg

SEQ ID NO: 268654 - DNA, 433 bp, Cannabis indica
ttaaacttggattgctatcctagcgagttgagtcggatggttggacagaagggtggagattgtccaagattgaagatgaaactcataatcttctttaattttggatttaattgtttcattttgtgaacaatttagtttcaattattagtttgaaattttattccctatttcatattatatgcagacaattcattatgacattttaaagattataaataaaattttctcttttaagaaattttcattatgaattgcatttatgaattgagctttatgttaactttatcttgtacatgttgataccaattatattttatatgggtgactattcaatggttatatttttattgtaaccatatggttacatttttctttgacctgtaatagcaggttactaataggtagactttctttttttagaattaattaatta

SEQ ID NO: 268655 - DNA, 869 bp, Cannabis indica
ttagatcacttgatgtgaaaaaagatccttttcgacctagagaagaacatgaagagctccttggtccagaagtaccatatcttagtgcaataggagcatgatgtattttgctaactgtacaagacctgatatagcttttttctgtcaatttgttagcaatatttagttctgctccaacatatagacattggaaagggattaagcacatacttcattatctccagggtactattgctctattctaataattgtggttcataacttattagctacgtagatgcgtgatatttatttgatccacgtaaagccagatctcaaactagctatttatgcacttgagttgacactgatatatcttggcagtcaataaagcaaactctggtggctactttctcaaatcatgctaagatacttgcatttcacgaggcaagtcaagaatgcgtttggttaagatcaattacacaatatattcgagaaacatgtagattaacatctaataaagaaataccaacaattctctatgaagataatgctgccagcatcgctcaacttaaatgagggtacatcaaaggagatagaactaaacacatttccccaaaattcttctttacgcacaatcttcaagagaatggtgatatcgatgttcaacaaattcgatcaagtgataatcttgtaggcttattcacaaaatcattaccaacatcaatttttgagaagacagttcacaagattggaatgcgtcgattaaaagatcttcatgaatgccaaaaagagggggagtaatttcacgctgccctcttttttcattgactgagttttgtcccactgggttttttcggcgaggtttttaatgagacagttattatgga

SEQ ID NO: 268656 - DNA, 3091 bp, Cannabis indica
aaaaaattattaattagccaaatattaaatatggtctaataaatatctttaaatgtgataataattaataataaattaaatattaaatataattaataattaaatttagtgtattaaaatctacattaatgattacagacaaaattgtatttattatatggcaaatatgatataatgttatctcttctattaaattcgatacaatttttaaatttgacacataatttaacacactaaatttctaaaaagtgttagaatatactttgtttctattaatagtgtgtaacaccacaaataaagtaaaattgaaatatgtaaatctccatatttaaaggataatataatacgtcgtactaatgctaaatagtatttctctaaaatatagcactacgtttcattactctactcacgctcttgaatgaattccgatggtttctagaaggcaatgttattgcaatgcaattatgcatagcctgcaaacaatttgaattcagtcagatttaaaatgacgtcttctgaaacttttcaggtaaaagtccactttggagtgctcccatttacttttctaaactacttttcttttcttagtcatttaataaagaatattgctattacgtaccagtggtgcttaatcctttttcaatatgtgatgttgcgattggctagcgatacttcctaaaaactattatattaaactatgtaagatctgatatttaattaaactaatagcgatactgatacataaatatcagacaccactaatatcctttaacatttctctttaataaattaacaactatttcacaactaatccaattacactatttttttgagaaattctattatactacttgtaaactttggtctttaaaatattaaagttggaaattgaatctttttgttgataaagaaaaaattaataatttttatccctgaactttgatatgtattaaattatgcattttaaacttttaatgtcgttaaaaatacttcttgaactattgagattattatatttaaggacttttgtctaatttcattcaattttactatttcagtaattatttatgtactaaatcatgcttccaatctttgatatatactaaattatgctcctcgaactttgatatgtactaaattatgtccccttaactttcatccatgtgagacttttttactaaaattagacaaaagtctttaaatccaacaatttcaatattcaggaagcatttttaacgactttaaaagttcaagggcataatttaatacatgtcaaagtttaagggacaaaaattctaattagcataaaaatgtaaaaaaaaaaaatgaatctaggagctcatgtaactttcacatagtacaagttacaaagtatcaattagtagaaacttaccacgttacaccaactcttaatgaaacctttatcaagccctaaagctctttttactagtggttcgtgagcatcgttattatcttggctagagacatgcctaagagaaacattagaaagatgagataaacagtcataaactgactgacataacaacatcagacaaagaagattcttctttaaatctacacttaattttttccaccaggatctttgagtctttatcaacttaagtattaaatgctctgatagcttcacaccaatataaagaaaatttaagagccaaaacctgtgtagaagtggatataccaggaataggaataaaaagaccagctattttgaaatcatgagaatccattacaatcacacctaatcaaagctccccttatttttgtctatggccgtatctacatttaatctaaagaaatttggaggaagagattgtttggtaaatttagtatgcaagcagcatacgcaatcgaatcaagcattataataataaaatagagtatcgttctcacgagaattgattatcaattactaatcaattaaatttttgtttctatataatcaatattaattctagagaaaaataaacaaaacaaaataataattaaaatttagagaattaacaataataaaaataaggattagtatgatccctaattattattcattttacttccatatacaattactcaatttctcttcttcttattcaattgacaagttaaattaagtagtttataatctcgttaagacttacaaactcaatctatgtgaaaactttctatattcctatgataatgtttaattacaaagaaagcattaaacaaaataacttataaaatcatacaaataatctaaatacttttgttctaaattaatttacatccatagcaatcaaaacacattcaaatcgcacttttcagtattttaattcgaattcatagataacaattataggtgatcaaacaataattgtaaaataaaatcagattgtatagaattaaaataggagaagaagatgaaattgaacaactacactaatccataaaataaattcaagtggtttacataataatcattaaaagaaaattagctattaaaagtcattcttaaataatagaaattcaattaaaaacataaaagataaaaataaaggagatagaacactgtttggagtcctctaatgatgtcttctgctcatagccttcttcctatgctccaaattggtctatattttcaaatggtctcaaagcttagccaccagccctctttaaataatgaaaattcgagtagactttttttcaccaaagttgcggccttgcttataaagtaacggctttctaagcgattttctcagtttccatttttcccctcgcagattcttgatttcccaactttttcttctttaccaaacaagaaatgtcgcgacctttcttgctaagtcgcggccttgatgagcacattcctctttttcttcatttttttcactttatttttgaaaagtgtcccctcttatttttagactaaaaatttttgagctaaaaatgcaatctttgacttatttgaggcaataagaaatccaactaagcttttagaaatttcctttctcctcagaattaaataattttgtctcaaaaagacttgaagaacaccaaaagtactaaaaaacgaagatctcccaatatttctttt

SEQ ID NO: 268657 - DNA, 1421 bp, Cannabis indica
cgttgctgctactgcaccaacaatctcacaccagcaaaaccattctgtagcagccccctctccgtggtcccctccagcttcaggtgtcctcaaacttaacatcgatgcagcagtccattcctcctccaatactactggtgttggggctgttctcaaagacacaaatggacatgtggtagttgcgttagccatgccaagcatcggcagtttcaaatcacatgaaatggaggccaaagtacttttccatagtctcaattgggctcttcaacaacaattgcaaatcacgcaaattgagacggatgcacttatggtagtgaatgctttgcaagctcccttcaatccaaactcctctttttcagatttaatattagatgttgttagtctattatcctttttccctaatgttactgtttcacatgtaaaacgttctgcaaatgaagcggctcatggcctagctaaattttctttaggggtggatgagacttgtacttggctggagattatccctctacctatttactctgttattgtaaacgaatcactatttgtttaataatagcaagtattttctctaaaaaaaaagtacagtacatgtatgtttattttttttaattaggtaatgtatttttattttttaatttttgaaatagagtttgacactttttatctttgagaatttttttagctgttgcggctgcattggtgtgtgctctttagatgtgataattaattttctttttaattaggtttaattaacgagtgttaagtgcaatatatgtatgtttatttttttcaattaaataatttatttttattttttaatttttaaaatagggtttgagatttttgatctttgagaatttttttagatattgcagctacattggtgtgtgctctttaaatgtgattatatatacgtattttatatatacaataagagaataaattttattgttatacgtattttatacatattttatattaatccttctatatatataaggattatagtaaaaaatattttgacaaaatttgagtttgattagagaattaattactcaaaatacattttatatattatgtccaaacatattttaagaaaataatggcagggataaatacaatattattaatctgtcgttaggagagtgtggttataataaagtgtacaaattattagaagcatatatatatatatcattaatcatttttaaaataaaagattgtcgtgaaattaaaatttaaatatatattttatactagatgagagttacgtggcgagccacgtaaatattagttttatataagttctagtggtttttgtttaagaattcagtaactaagcaacgacaacaacaatggtagatagatctatttaagtttttcatatttgtaaagattataaatctaaacttttaatt

SEQ ID NO: 268658 - DNA, 779 bp, Cannabis indica
cttgttctttgagccgatccgacttttacatttagtatgcttattgcaatgtaaggtatgtgtcagtattctccaatgcctcgctattcacatttagcgacatatggtttctcgtgaatacaataagtgtcgatttgtacattgattcctcgcttaagactttacagtcagcaagttacaaatatactctaatacttacgtaattaatgaattattccataaaaatattttacactgattcacattccctttatcttgacacgtgtcctccagccaaatttcgggtataataattgtcctttaaaaagttcttttttagtaaaaagagctttttaataataacgcgagtttttctaaaaggggatatcttgattctacccctagtaaccttttacttacgtagtaaataggttgttggtgcttgccctcttctcgcacaatagctgtactaattgcatcttctgagatggctaaataaagaaataacgtctctctagttattggtttcaccaaaattggaggcgttgcgagatgccattttatgctctaaaacgcctcttcgcactcttttgtccactcaaactttttgttgcctcacaatatgttgaagaacggcacacacttatcagttgacttcgaaatgaatctgttaaatgccgccaatcttcctgtcagggccaatacttccttaggctttgtcggggattgcatgtctattaatgccttaattttttaaggattttcctcaatacccctcgcgttaactatgaatccaaaaa

SEQ ID NO: 268659 - DNA, 518 bp, Cannabis indica
ttagagagagagttgtgaatgttacaggacatagggtttctgagagtaaactgaaagagctagactattcactttccttaggccttaagtataggcaccctgacaccagctgaccaagcaaagaaaaataatgatgagttttttattttatttgatctttgccaaaaaaaatgtacacgcccaaagtgaataactccagcacatattacggcacacaatacgaaacaaacccaaagtcatcaggtactaagagtagtatagtgacctgaaaaattttaaatatgccaacaatatatgcacacaacccacacttgacacatcagataaaaaaatatacacttagagatactcaaaaatttagaaaaaaataggtaacaactgatcaatgaacatcaataaagcctctgagtattaaaaaaatgcacaccctgagcagcatatcatttcagcacacccatccacaatgatactcatgggatcactaagacttgaatttccatacgtgtgtgagcagtgat

SEQ ID NO: 268660 - DNA, 614 bp, Cannabis indica
actaaggcgaagctcgaggaggaggctaaacagagggaagcccaggcagaggcgaagcttcgagaggatccaacgaagggaggctgagctggtggcgaggcatcgagaggcgttgaaggtggagggtgaggccgtcgccaggccatgcgtgagcttcgggaggctaaggaggccatggacgaaatggctgccaaggtgaagtcgctagaggagttgcaccaggcggacttgcagtccaaggccaacttggccgaggagttgaaggaactgaaggactttagagactaggcattgaagaaggctaaaaaagatgagctcctatcccccgtctcctgtaagcattgtgtcaagcgcttcgacgacggcgtctacatggcctggcagtcaaatggccaaagcatcaagctcgacttatatcctaagcctgagaaggcttttgccaaattttgggagaagaagaagaaacttgatgccatgctcgagtcgcgtcggggccctcgccttcttcctcgtattgactaggtcgccgagttcagcccatttcatcaagattatctcttttttttatttacagctatttttcttttctttaagacaatcttaactaggtagct

SEQ ID NO: 268661 - DNA, 637 bp, Cannabis indica
agtggtggtgttgcgttgttgcgggttagtgatgaagttgttttgttaggttattctttgaattatatttatttaaagataaccacgtctagagaagctccttggaggcttacggggttttatggtgagcctaatagatcatttcgtgctagaacttgggatcaaattcgtgctttaaagtctgactctcctttaccttggtgcattatcggtgatttgaataatgtaacgtcccaggcggataaaaaaggtgggcagccgtacccacaaatgttacttgatggtttttgtaaagtgttggaggattgtaatcttaacgacctggagctctcgggttatccattcacttgggaaaggggtcttggttctaataagtggattgaggtttgccttgatcgtgttcttgcttcccatgattggactcaacattttatatcggcccagctatttaatcttgaagtgacgatctcggatcactgtcctatccttcttcgtactgctgcgatcaatctccaccattcggttgctcagtttcgttttgaaaatgcatggctccgtgagccattgtgtcgccaagtaatcctagacagctgggaagtttgcgtggggctgactttaactgacaaaataaaatatt

SEQ ID NO: 268662 - DNA, 758 bp, Cannabis indica
aacaacatttatatgaaagggagtgatttttgggagtatgaattaaaaggagatgttagttggtattggaggaaattgagccacttcaggaagagatattcgaagatgagtttcatggctgctgtcaagaaggggaagtttatagcagctaggctttatatggggtctatacaaagggacatagatagcttttacaagtcgatttggagctttgcttcaattcctaagcaccgcttcattttgtggcaggtagttcatggcaatttacatactagagataattttgttaaatttcagattactctagactcttgtatctgtccggtgtgtggcttggaagaagagagccatagccatctgttctttaactgcaggctgtcaagagaggtgcttcagtaggtttttcattggtgtggggctgatctttggcctttggattttattagatggaaggtgtggctggccaattcgaaggctagtgtgaagattcttattactgctgccacaatctatatgttatggaataataggaactcttgtgtgcataataattgttgttatactaagatgaaaattgtaaatagtataaaagatatagttatgcatagattgtatagtttaaagcataggaggaagatacaaactcaaaaagccttgattatgaggcttattggttagtttcggctgctggtttttgagcaggtgtgttggggagccggctggttgtggctgggttttgtttggttcagttttgatta

SEQ ID NO: 268663 - DNA, 811 bp, Cannabis indica
aatatccatttttcatcaatggatccgaactgtatgttaatttatggattatgagttttctattctatgaccagaatccactttctaagaactctttgttgtaactagacctaagattcatcaaaccacaataatatatctatggcatttgcatcttgttcataatggttttgacaagatcagtctctgcaaagaaaaaatatgccaatatccacttagaagtaggatcatctgtattcgaatatatggatgtacattcaggggtggatatgagttgtcgctaaattcttaagacgatcactctagattataccttaaataaagaaatttgaaatatttaagaaatttcatgaatttctagtaatggtgaaaaccattaaggtacgtggctaaagatcttgtaaactgatagcggtggagaaatatttagttatgcagttcaaatatcataaagttgaacttcgaattgtattcaaacttacctcctaagaacttcagagttgcatattgatgaaagtgacaggtctatgattagttactagcagctgcctgagtccctttagagaaaagctaagcctagaatcgtggatgtcctgatcataaacttaagagaagctagaattgttaacttaagttttcatgtttgatagctattctaaagtgattaggggtgaaccatcttatggtcattaagataagaaagtgtttgtttcaacaaatactgctattctaagaacatgaataaatctgaaaaacaaagtagcaaagtaaatgagacctttttcttatttcatgtttgtattcatattat

SEQ ID NO: 268664 - DNA, 726 bp, Cannabis indica
cataggagtaactagttaccataacaggataaccagttaccataaaagggtaattaggtaccttatgttgtttttttatattttataatttttttctaaaattttctcataaaataatttttttaagaaaaaatcatatgtttacaaacatatactttaaaaaccataaaaataaaaattactgtatattttcattttctatcaactcaattttttattttattttagtttttaatttttttaatgaaactatttatattagattccaataccaaacacccttaattttgccaactatgatagtacaaatacaaagaaccgttctgtaaaaccaagcatatataatccagaactagtcagaataatattggaccacttataattataaatcagaacattggataatcttagatgaagaagaagaagaaaaagaagaagaggacatacactaaaaaatgaagacattaaaaccctactttttttattaccaactcaaagtacttaatatttattattattctaaatgttacaaagtactgaaagtgaaatttgcataagaaagaaagaaaatagatgaccaaatatgttattattttgatcaactcaaaaataaagtgtatgtatgcatgtttgtactatgtttgttttgataattaaaagcacaccaaagaaaaagtaattagtacataatagcttaggttactctttactcattactggtccaaa

SEQ ID NO: 268665 - DNA, 1402 bp, Cannabis indica
taacatagaaaaaaactagcataaaatttagtatacgtgcctcgcacacagcttttcgctagtatatatatatatatatattctttaacaaccatttcatgtggcgaatgttctccatttcacttaaaaaatacactaaattattatacacctctcctaaacaaaaaaataaataaattatatacactaaaatggtgtacaccaacaattatcttcaatttctgatcgtttgaatttatgttttgctgttagggaaactaacaataacaaagtggcacaagtgttattgtggcacaagttctagctaagtcagttttaaagtctaaagctaatgctatttggaagaaattttgtccctctgttgtaagggcagctgctgacttacccaatcatgtttgagtttttgctctgttattgaaattcttattaaaataaaaaatgctgtacactaaattagatgatactaaaatttaaatctgtcccaaattaatgtaattaatactaaaatattatcattaattaattatttgttgtcaatatacatatcataaaattatttattagttattaatataaataataaaatataacactctcccactatattaaaatttttgatacctcattgtatcacttatttaatcaatcaaaatacctcatatatcctccactttgattgaataaatcaacactctatagagaacttgctcaagtgcataaggtaaagtatttttcaacttgaattttaccatagtgtaatcatcactaattttattaaaaatttatttgacaaagcactgaaccaacttttctttataataaagtggcgatgacatgcacctttgctaggttcacccaatgcctcaatatctctttttgcaccgttaatgaccttgtgcacattgcacactacaaaaaacatgtacctttattgataattttttagtcacaacataatttttttgtgactaaatatgatttttagtcaaatcaaaaaattacttatgattaaaatatagtatttagatacaagttgtcactaatttagttttagtcacaacaagcattgtgactaaaaatacatttagtcacaacaaattataatttttgtgactaatacttttagccacggaccttttagtcacaacataagaataatgatttataattatccacaattttcttacttttagtcacaagtgttcttgtgactaaaagtaagatttttttgtagtgctattcattgagcttttgaggaaatatatatactccccaattcttatatagggcaacaccacccttaggtcaatgtaggtagaattcttacagtaatttttatcaaaatatgttttcgaaactgagttctattaaagacttttgaagtctaactcttaaattggta

SEQ ID NO: 268666 - DNA, 623 bp, Cannabis indica
cttccttacacagaggacacgtatcttgaatatcctgcagaatagtagccaatctacctttcgtgggaaggatatccctatatacctgccaccataagaacttcagccgagagtgaattggagaactccaaatgagtttccaaacaccttcctcataattcggatcgtggcccttgatcatccgataggcagatttaatagaaaacatcccattatgttcgcccaaccacatccatgagtcgtcaatcttgtcattaggaagatcaatattcaagatagtttgagcctcttctctttcgaaccactctttcaccattcgaacattccaagaattattcggatttaagaattgatgaacccatgccactccatgtgagacatccttctgaggaatgggggttcggttcacggcaggaacccaaggatcgaaccaaatagaagttgattccccattcccaatttttctacaaatacctttctcaagcactcccctggagtccaagatagctttccacatccccgattctcctccttgtttttcaagattcaggaagtttcttccctttaagtacttatcttgtaccaccttactccacgtactggtattatcagtcaaagctttc

SEQ ID NO: 268667 - DNA, 746 bp, Cannabis indica
aactcttcataatacttcctgttcaatggcccataggaatcaagccatttgacatactccattacctccttcccttcttgctcagtcaagtcatcttcaattaagctcaattctagaggatcatctatcaactttttctcattcacaatggtatcaatcagatcaacaaagaaacagttatcacttgcctttgggaaggtcatcgcctttaacacgttgaaaaccacttcttctccttgcactcgcagctttaattcacccttctgaacatcaatcaaagcttggccagttgccaaaaatggtttcccaagaatgattgggacgttgttatcttcttccatgtccaaaataataaaatcaactgggaagatgaacttgtcaaccttgactaacacatccttaatgactcccctaggatgagctagcgatcgatcagccaattgtaaagttactgtagtaggttttgcctcaccaagctgtaatcttctgaagactgacagaggcatcaagttaatgctggctcccaagtcacacaatgcgtttattccttcaattcttccagtggtgcaaggaatagtgaaactcccaggatatttgagtttgggagggagtttcttttgcagaatggcgctacactcctcgttaatgccactgttttataatcctccatttttctcttcttagacaatatctccttcatgaacttcacataactatgcatttgttccaaggcttcagcaaaagga

SEQ ID NO: 268668 - DNA, 1210 bp, Cannabis indica
  modified_base (671)..(671): a, c, t, g, unknown or other
ttatattgtttaaaatatttaaacttatttactatattttattgtttcataaaattaattaaatatatttttttacgaataaatataaaactaaataaaatcttatatatttaaaaaatataattgaattgtattacatttaaatgttattattattatttaaattaataattaggtaataacaactataatacaactgtaaaaaaacatacattgcatgttactaatactatatgaaatatctcaatttgtattatctattaataattacaaaatgaatttaactctaaatattaatttttaatatatataaatctatatatgtgaaatgaagacgaattgtttgttacaagcacatcattttgctataaatttacttttagtcacaataaaatttgtgactaaaattaaaacagttgtgactaattataaattattaatttctaatgttgtgctaagaggtctatggataataatattagtcacaaaaatcacaatttattatgacaaaatttgtgactaaaactaaattagtgacaacttctattgatatactatgttttagtcacgaataattttttgttcacaaaatcacttttagttacaaaaagtttatattctgattaaaaaattatcattaaggtagttttttttttttttttttttttttntttttttgcatcgatcttattttaaatctaacaaaataaatgaaggagaattggaatttaagtttaaatataagactaatttacgagatggtctaactatttagatgattcaagcattcaagctaacaccaatattgatgaaataaattaaatatgaattttaagatcatgcaaaaaaaagaatgtcctcgattaaagagagatattgtcgttgtttagattctgtttgtttggctttacacagaagaagatgttagaaaaaaagaagttgcataacaagataacgtgaaagaaaatgaagaattaatgtgttccattcttataggttcatttaaattcgatgatctagcggtggcacagacgttgaggtaattaacttgtttttatagaatttttctccaacaaaaatttggatttcaacatgagaaagaaagaattggaatgactggaaaaaggaaggaacaaagaaataaaatagtttttttttgtcttttttaatctttcatagtgaacgactgaacgccgtaaaaagagtcaca

SEQ ID NO: 268669 - DNA, 589 bp, Cannabis indica
ccctaaaaattatgcgacaggggtattactgtcctaccttgcgacaagatgctttcactttcgcaaagaaatgcgacaaatgtacgcggataaccacatatacccatcaacctccgagccacttgcattccatcacaagcccttcgccctttgcagtatggggcatcaacttgataggtgaattacctaaaggaaaaggcagagtcaagtatcctgtagtcgcggtcgaatacttcacaaaattggttgaggccaaagcactagcaaccattacaacgactaagttgcgcaagtgtgtctataactccataatatgtcgatttggcatcccttacaagctcatttcagatattggaaagcagattgattgtaaggaggtgcggcacttatgcgatgacttgggaattaaaaaagcattctcagcagtcgcctatccgcagagcaacggacaaaccgaagcggtcaacaagataataaagcacaccatcaaaggaaaactcgaagaacgtaagggggtatggccagacgagctcctgcaagtttttgttggaagttattttaccaggaacttagatctactcacaagtat

SEQ ID NO: 268670 - DNA, 504 bp, Cannabis indica
caaccttgtctagccaagtgttggctttttgcatggcatgcttttagatctttgatcttctctctccatatatgcctcatcttattttctttgacatctcttctttgaactttctattgataagtttcaagctttttaagcttttacaaattttttgattttcacgttagattgtaatcttcttttagtattttgattcacatgatagttttagaatgcataatgtgtgatctcttgatgaaaaagattcaattttggcctttcccgtgattcttaactctttgagtcatggagaacacgaagaacacatctgagttttctaaaaaaacacacatttcgattcaaaactaaccttggatggccctagggggtcttgtttgagatctggctagccctaggattcagtcatgggagttggccagctctagagtttcaccttaggaagctagcctattcatgcctgggttcggtagccctagtcagttcttggctgagccgtgggac

SEQ ID NO: 268671 - DNA, 1157 bp, Cannabis indica
ctttgaaaattcaatcataaaagattaattttcacacaatttaaattctcaataattttgatatcaaaaattaaacactaatttagacacctaacatgtctaaattacactttattttgagacaccaagcatgtctcaaaaatataaattttagttttaaacaccaagtatgtctaaattttttcatattggagtatgcacccccacattttcacatttcattatgaagacaatatcttgattttaaaatatagaagaccactttgtctctataatttctcttaaatttaattttttcttgaaattattttcacgaaaatttgacaccaaaatatgtcaaaattttacatatgcacatagccaaagttaatttagaatttgaattaaaaatcaaataaattaatcaacaatgtctcaacacactttgattaaatttgtggctcaccaccacatttctagcataaagtgtatataaaatatcacttttctgcatttcctcttaaatgattttttaaggtcactttaaaaatatcatttgacgtttttagttttctcaacatttctaaaatatcaaactcacatcaccacttacaaaataatgtgattattttactcattattttaaagttatctcctcaatgagattaacctaaatattacacaaaaattaacaaaattctcatcaattttattcactattttgattatttaagatttaaaattgtttcataattttttgaatccacattgattcactttatttgaatttaaaattgctcttctaatttatgactcatttcacaagtgtacggatacatttttaatctatttgttcttgctatgacaagacaattctcataagtgtaactctcatagttcacttttatttatctcataatatgagatgattatctcttataattcaataaaagatgtaacttttcaaaatccatcttttattatctcataaagtgagatgttcaccaccaaattgaaaaagaattcaaaatattctttatccacaaaataaatgataataattcttacaataataataaatacaattttattactatcaacattattatcatgctatgtaactcatatattaatataaaattaatatataactcccatacacataatatattaattat

SEQ ID NO: 268672 - DNA, 833 bp, Cannabis indica
aaagcttagtccgaacgttaatggtgtttttcatttaagggctcgattttaactttagttacgcaaggatggtaatatttattgtatatatgcgccctttgaagtttggagtgatttggattagttttggtactgtttcggtgagtgcgaaaaaattgtaatttttgagttttatagtttttagaaattcctaagagatcagaaatcgtatttttgtcatagcttgtgacttgtatgtccatttcggatattctatataccgttttgaagcttgcaacgagctctactatatggtatatgtttaagagcaaaaatataagttttatttttagtgtatttatatcgcggggtttggtagaaaaccctagattatcttatgtgaatattaaggagtattttgggataaacatttattggtttatcattgttgtgacatagggccgagatcatcggggatagttctccacttgggttggccaaaatgtatgaacctggattaaaggtaagaaaagtatattgtactgcatagtacgttgtatgtaatacaattagtattgttatgaattgattaatattgagatatagttaatattgttatataatgaaaagactcattggttgaatattgataatgtgatgttattatgcatgtgatatggacttaactgattaggtgatgtgattttcctggcaacatagtgggcgtaagtacgggcgtcagtgatacatgatgagtaccgagcgttggtacgagctcacctgattaggtgatgcaattttcctggcaacgtactgggcataagtatgggcgtcagtgatatatgtgttgggtt

SEQ ID NO: 268673 - DNA, 682 bp, Cannabis indica
tcgtggcttccatccaatcatggctgtcaaaacttcacgtcttgaaaagatgaagaattagaaaacgaaaaaagatttattgaatatttcgatgattgcccttacatcattaagtgctacggtcatgatactactcttaagagtattaatggtaaagaggaagtgcattacaacgtattcttggaatacgctattgggaagacactgtttgatttcatcttagcttctcccctttacaacgaatctaaacaagtcaaacagtttcttcaacagattttgagaggtgttgactatattcatgagaaggggtttgtacactgtgatctaaaacctcagaacgtattattagtcaaagagataagagaagaatattatttctttgtggctaaaatttttaattttggattggcaaagatggttgacgactcgacaactgatgttagaggtactaaagcatatttagctccagagtgtcgaggtgaagacagagtacaaggacagttttcggacatttgggcaattggtgtcatggttttattcatacctaaattggaacaacaatctatactacaatatttccaacgaagctattgattttatattgaaatgcaccaatcttaatccttccaagagaccatcagcaaagatgcttctgaatcacccatttataacaaatatgtaa

SEQ ID NO: 268674 - DNA, 653 bp, Cannabis indica
gtgcgttaatgaccatgcacgtctatctcagtatagtgaacgctctagaaatttcgccattcataagaagcagtcccactcacacattcacataggtgagtctattaagagtactcctgtagctcagtactctactccacttggagtatagaatcattaagagcttctattaactcggccttaaatcgctttaggaattcatgcttctcttatcaaataattatagcatgatctcacttttatcacttcttaacttattattacccgttgaacctattttttgggatctccagtctataggttgggtttcattacaagtgattaatcaatctaagagcaatagtctcattcctttcgatgtttaaggactttctttctagctaaactttttgtcaaaagatcagctaagttatcattagtgcatacatgatccactctaacaactcttgttgagagaatctctctaaaagtgatttgcttacaatgtatttgtcatctcttaccgttgtaatagcagttctgaacttttgcaatagctgcaatactatcgcaatggatcaacatagttggaataggtctttcccataaattaatctcaactagcaggcttctcagccaacctacttctaaactagcaatagctagtgcaatta

SEQ ID NO: 268675 - DNA, 735 bp, Cannabis indica
aaaacccaattcccattcccattcccattcccattcctcgacgcattccgactcccattcccattccaattcccattcttattcccattcccattcccattcccatccccatctccattcccattgccattcccattcccattcccattcccttcgcattcccattcccattccccggcccagtcctattcccattcccatttcgcagcccattcccattcccattcatattcccattcccattcccatttgcattcgcattcctattcccattcccattcccattcacatttccattcccattcccattctcattgctattcacattcccattcccattcccattcccattccaattcccattcccatccccattccaaatcccattcccattcccatccccattcccattccctggcccattcccattccctttccctttgcattcccattccccaaccactcctattcccattctcattccccagcccattcccattcctattcccatttgcattcgcattcctattcccattccaattcccattccaattcacctttccattcccattcccattctcattccctagcccatttccatttatatccccattcccattcccattcccattctcattgctattcacattcttattcccattcccattccctggcccattcccattcccattcccattccaattcccattcccatcccattctcaatcccattcc

SEQ ID NO: 268676 - DNA, 1589 bp, Cannabis indica
ttttaattactatttcttttattttaagttaaaatctctactattcgctacaaaaaattgctacttttactgataaccttttagtcacaacataaatttttgtgactaaatataactttagtcaaaacaaaaagttacttgtgactaaaacatagtatttagttataagttattactaatttaattttagtcacaacaaatattgtgactaaaaatacatttagtcacaataaattgtaatttttgtaactaatacttttagccacggaccttttagtcacaacacaataatgataatttataattagccacaactattttatctttagttacaaattttattgtgactaaaagtaagattttttgtagttatttttaaatatagtgtttcagttttagctagttggtgccatattttttggttagtttgtgctatttcgttaggcttttgatagcatatttttggctagtttgcagtatgtcattggcttattttgctcatggatacaacctcaaagagtgctattatcaattcttacagataaattttaaatcttgcttttatattttaacaattttggaggaatttttctattattttgtatcattttttttatcttttgttgttagttaattgagttttgttacttttttggcaaaatagttaattttaggtgggttttgatttgctaagtcagattaatctctcaaatcttatgtatggtgcaggttaattgactagtatatttctgccttggaagacttaactctacaattgtgacatgctgagtgaaaaaagcttaaaagataagttttttcttattaaaataatgattgagtaatttccttaatttaaaaattcacaatattatcgttatatagtgtgctaatccactttctatatttatttattttgtaggtagttttcgtccaattggtcatttttttagatgccgcttgaaggtggtctcgagttgttttgtctaaatttccaagataacttagtcttatataagtcgctaggggtattcatccaatccaattcgcactaatttgctcatagtgcatccgattcgcactaagtgcggatttcattttttggatgcaatccaatccgcataatagctcaaatccaatccaatctaatctgcaaaagtgcggattggatcggttattttagattggttactttttaatattaaattatttaatattaatgaagaaaaaaacaatttcacataactagtaacaaaataaaacaaattataattaatgtatgtcttcaactgttggaatgtattttaccagtatctagatttactaacaaatatgtttttaaaatcctaaacatgaacttttaaaaagatataaaataaacacataaaaggtatgagaaaccttacattggttgcagcggaattaaatgactccttccgctcagatctctaacccttgtgtcctttctatagcaaggtatcaccaagatctcagcctgaaactccttctattgattggattcttcacagtcttacacactatgattgaggactcacttgctatgttcgcccatgcactcaatcactaaaggc

SEQ ID NO: 268677 - DNA, 1247 bp, Cannabis indica
agattagaagtcatttatatttacatgtagtttacatgtttgtagtttaatatacaatttttgttaaatccagaacatatagttattcacaattatagtgatgtcaacatagtggaaggtaattgtgattatatgctccaaaagtttatgtcctatgattcatcagggcattggaaatatttacactgatgtagtcagcgataaagcttacttacaccttgaataagtattatgttctttataggacattggcaaagtatgctagtatcaaatgtatggatcgagtatacattggactgggactgatattgatattggtaaagataatataatcttaccgttgtatctttctaatatatcattgtttgatcttagatcaaaatatcctaattctgatatggttaggttcgatttcaagagtgttatttatgttctttgagttgttcgttgaaactcatacgggtgaacacttacatcttaagaacataacagtgcaattgagtgggagtactaatcagatatatagaatctatagcttctatctggacatagaagtgaaatggtaatttccttcgagcttggcttaatagagataaatggaaaagctcttatttcagtaattatttattagtttactgaaatattatttatatgaagctaagtgttttaaggataaaatacattgagaggtggaacggtaaatttatccctacttaatttaaaatcatctatataggatctttgattattggaattagaatgatggagaatttcatagcctatctatatcctggaacatatagaacactctatataattgagagtgctattctaaatctatagtggtgcaaggaggaattagtaaattagggaatttacttggtaaattctagatctacttattggaaacttggttatataggcccatagtccccacactagttgagacaatactgcttgtaagactcggttatttgattttaattaatcaattataattctaaatttagactatgtcttatttatgaatttttactaagcaagggctcaatattgtgaagaaaaaatatttaaggtttatttgttaattaagagactttattaagtctaattaatataaataaattaaatggtaattttatttgataattaattttaattattaaataaatatttctgacaattagaggattaaaattgaaaaatatgtcatttatgaaagaaaataataaatagttgtataaaat

SEQ ID NO: 268678 - DNA, 1819 bp, Cannabis indica
atcctgatctcgggtcccgatctggttccattttgggtgccgagtcacgagtgggtacctaggttcgtgtccgagtcttgtatcgggtcttgggtcccggtcctagttccgttgccgaagtccctatcctgattttgggtctagctcccagttctagtttgggtttgggtccaagtgtaggttacggtttgggtcctcattgcggttcgagtttgggtctctgtctgggttttcatttgggtttgggtttaggtttgggtccttgtcgtggtcgttgtcctattcttagtccggttccagttccaatttcgatttcgagttcgagtttgggttcgatgttaggtcagggttggagtcttggtctgagtttgggtctgggtctgaatctcggtctaggtgcggatcgagctctgggtgttggttagggggctgggtctgggtccaggttcgggtctgagtcccaggttttttatctcgatttgagttcgggtttagtttcgggtctaagtcctgattctgatcccgatctgtgttcgagtttgggtcttggtgcaggactaggtttgggtcttgttctgggtctaggtcttagttggggcccaacgtttttgtctgggttttggttttgtcttggtatgggttcgtttctaggttcgtgtcctggtctgggtcctgtgcaggtttcgggtacggggttcggtccaacttcagatttcgggtctaggttaggtcctggttatggttcgagtcccggatttagatctgggtcacggttctagggcctaggtccctggtctaggtcccccatccaagtcgggttcgtaggtcctagtctgggcctaggttcgggttcggctattgagtcttggttttagtccagatcccagtctgggttccggtccaggtctcggtcctagtcttggttcgggttcaggtttgggtccttgtcagggtctggatcctggtctgggtcgcgggtctaaggtctcagtgcgggtttaggaccatgtcaggtcaaggtcacggttcggatgctagtctaggttcgtgtcccaagtctcaagtccaagtcgtagtcaaggtctcgaccaaggttctggtatgagtttgggtaatggtttgggttcggttggtctcaggtatgggtcctagtcacagttccagttctaattccgagttttggtttggttctaggtccgtgtctgggtctaggttgcggctggggtccgagtcatagtttgagtttgggtatgggtttttcgaatcccgatctcggtccaggttcgggtcctgggtctgggtcccaagttcgggtctgggtcctaggttcgggtctggatctgcggctaggacagggtccaggtctcgtgtttcgatcccggtctggatctgggtctgggtcggtattcgggtccaagtctaggttcgtgtccatgtcatggtatgaatcaaaaatttaggttaggggatttttttgcgtctgggatcaagtcttgagtttgggttcgggttcaagttcgagtcgcaatcctagtctgggttcgggaccgggtctaggtataggtctgggtctgggtccgagcccgagtttcggggctgcgttctggtctagtttcaggtcccagtctaggtctaggtcttggccacgaccccaagtcctattagggtcttggccacgttctagtacaagtttcggtttcgtgtcctaggtcagggtctgggtccaggtcctagtcctgcttcgggtccttctctgagtcctagatcaagacaccgactatgggtcttgtccaagccccaatttccagatcccgagaca

SEQ ID NO: 268679 - DNA, 485 bp, Cannabis indica
cgggccgaaccgggttcgggccggaaatgcaaatagaattgaattatttggtattttatttgataatgtgaaatttgaattttatttggaaatttatgagtatgaaatgacatgaatacccttggatgtgtgaataggtgaaaattggccctaggggcaaaatggtcttttgaccttaattgatttattttattaaaagttgaattttgagataatggaaaggaaaattctggtttaatctccctctcacccgacccctctctctctctctcaaaaccctattcttattcacacttgattttttggaagaaaagcttgattcttggattgttttggagctttattattgttgaatcttaagcttgctcttggtttgagtttgaggtaatttttatgggttttgatctttgtttactactgaaattatttatggaaaagtgatgttgtgtttagttttgcataataggagatttagctcttgactt

SEQ ID NO: 268680 - DNA, 802 bp, Cannabis indica
agtcccgtacagacttgggggcaaatgttatcccaatttctgcactctaacgtggcatcacacgctggtgaaatgtgaaatcaactccgagtatctgctcgcaagatatagtacgaacaggttacctcgtatgcttgctcaagacaaagcagttagtaacccgcacagaacgacaaacacttagcgaattcaacttctgcgtcgtgagtcatcaagggaatccctataatttggggatcagattacagagatatggcatgctatccaaatcccacgatcagtgtattctgtatttactatgcaatctttctgcttatatcaattgtaacgagaagggaaatacttcctctccaagctcatagccctataaatagtgatacatattcactgggcaaagggtcgaaacatttttagttgagagatactgtctaagaattcatattcagagatactgttgtaagagctataagaaaaggaacctttttcattgttcttgagttaatgcaaataacgaggattaggctattactgaattgctcggggctgaacctctataatattcctgtgtctttatattgctttattatatttcaatcgttataaaccacttgtcgcttactaaaatagactcactgtcgttggctaaaagcgaggtcaacaacttataagcgaaactatgtgtatatattgctaattacgcatataagtacaaatatatatagaatatgtaacacacaaatttaaatagttcgacagaatattatttacttacgtctacgatagcatttaagctatgattaag

SEQ ID NO: 268681 - DNA, 535 bp, Cannabis indica
gggcataaaacccaacaggcagtctttctgagacaaaggaagaggaggaggctgtacctctaaattttgggggatacaacgaggccggagagtcggtttctgcggacgatgatttcctggttgaaggagtggactacgtcactgaggagcttactgctgcagttcctcaaaggagacaaagtgccttgggtatcaggtgggtgagtcctccttccaaggtcattgaggtacgcttacgggatctcgaccagggcggctatctaggcgagctggaatgttatgttcctacttcgaacaactgagcctccaacccgaagaaggggatgtgcgcctggtcgggtgctcattccaaacaaggggcactgctgcctttgcacccgtactttaggaaggtggcagacttcttccgcctctgttcgatccaattcactcccaagggcgtcaagtatatgtctaccctattcgttctctaggccacctagaagtgggatatgccttctcctcataaggttagctggtttttttatttgaagtc

SEQ ID NO: 268682 - DNA, 576 bp, Cannabis indica
cttcttgtacaaagttttgtctatcctaatgaagatcaccatgatggattgctcagctggagtaggagcaatttcacattgaacttgtctccgaaccaggataaatttattgtgcttctttactgtttttgcttatgttttatgctgttattgttcccttagattcttgatcgagctagtgtcatcttgagcaaagaatttacaacagaagggctttcatccaaaacagtaatacaatcccacattttgcttgaatgaattagtgtcattgtgtgtcataaactagtgttgttataccgaaattaaatagagtaaaattggaacgaattaccgatagaatagtctggctgagtcgcggacaatgtcgctctctttaagacgtttcgcggctctgcccgaagtgtgcacggcagtctagcaaccacggcgtccccaggataaaacagcatctgtataagtacgatacgttctgcaccgaactgtatcgctctgtaacaccctactgtttgctctcagaaaaatcgtgaaggaagaaaagatttttttgttaatattgaaaagatgtgttcttacgtt

SEQ ID NO: 268683 - DNA, 912 bp, Cannabis indica
tgatcaaatgcagagtacttttggatttttccattgctcgtaatttccatgtttaagtagttaataatctaccagattcttgagttacgagcagttgtcaattctgcctcgcaatgatagttacaatctaccttaagcaaacttcaatatacttttaatgattttatcactttgtatatttttgattgctcgtgtgaatagttagattatctatccctttactaggtttaagtactcttatcaagacgtctcaatatctcgtttagtactttcctatcttgcgcgaaccgttaatattcagctttgtacgtaagttataactttttaattttcctttctcgtcaaataggtttaaactaaaaagttatggtggtttgatccctttctcgtcagaaaggtttgatcaaaaacttttaaaaaatttaaagttatgggtttgcattatatcatgtatttcttgatgaatcccggttaatcatacacaaatgtcccttaagtaattttaaggagtaaagctttgcaattacttaattaatggaaatgattctctttattcataactgaagttaaaatattacatcagcaatgtgagttacatcattaatttattggtagtagggtcgcaaatgttccacgttccagtcgttctttattagcgagccatttagccgagccaatttataaactccaactccaactactgcttcgattacatataaaccctcccagttcgggttgaacactcctgcagatgcatctctcgtgtttgtaaatactcgccttagcaccaagtctccaacattgaatagtctttcttgactcttttgttgaagtatcttgtaacttcgtgttgatacgttgcattagtgatttgcgacttagttcgtttttcatcaagcagatccaaggaaa

SEQ ID NO: 268684 - DNA, 816 bp, Cannabis indica
tagagtggaattaacagaatttgatatcatacttagaatggatttcctatccatgtattcaaccatcattaaatgtaagcataaaatggtaactttttgccgatgggtgaatatccatttgtcaatgttggatctgttcaggggtctcggatcctgattatttcagttttaagggctaaagatttactacacagtggatgggtagcatttttagcgattgtgattgactccaacagacctgaaatgtttggacctgaagtgttagggttgttaaagaatttctcgacgtatttctcgaggagttactgggattaccgccacaacgagaaataaattttgtgattgacttggcacctagagttgaacctgtttcagaagcaccatatagaatggctccagcggaactcaaggagctaaaaatacagcttcagggaatgcttgatctagggtttatctaatccagtgtatcgccctggggagctccaattctgtttgtgaaaaagaaggatggttccctcagtatgtgtattgattatcgggaactaaacaagctgacgattaagaacaagtactcattacctagaattgttgatttgctcgattagcctcagggaaagacagtgttacatagattgacctgcgatctggttatcatcagctcaaaattcaggaagaagatatacgaaagactgcatttcgaaccagatatgggcactatgagttcttggtaatgtcattcggattgacaaatgctccaacgacctttatagatcttatgaacagagtattcaaggatttcctcgataactgcattat

SEQ ID NO: 268685 - DNA, 876 bp, Cannabis indica
aaagagttttatttagggcataaaacctaacacatacttgtgagtagatctaagatcctggtaaaataattccaacactgatcacccaactaaggatcacgaggctcttcatcgttacgaggcatctgagaacacaccctgaaaacagcgttaaggtgatcacaaagattgcccttatgaacttggtatctccctccttgcggtgtttccaccgtacctgacctggtgtacctgctgggagtacgactttgcgaagacgaaaagccagaatcaatatcattctctttgtttcgcgaatggggtctactgcgaggattacgtcgctctggatcttcctctgtttgcgcctcgcggttgaagtttcttgcggattggtctctcgacatcggctgattcaaatcgagcccttcttgatctgtccttcgttccctacgagtacgggtatttcgacgtctagaatttgttacacgggggttatctgagcgagtagtgggcactcgaggaggacgtcgagtcctattccgtccctcgattttggcctacaaagcacgtatctgatcctgtattgcagtatactgatcagtggttagttgaatgatgccctcggatgctactgcatgcgtaataggcgaaaaatgtcatgtcgtagccgccggtgtggatgcttccccgacgtgtggagcagcagtctccgggaataagttgagaggtgttacgtttgtccgtcccacggcgccgttgatagtatccacgggaggtaccctatttcctgacagtggaacattcatcatcccaatgttgattaattcgttgttaagacctccatttgtctgatttccagccatcgtaattttccttctaaatcagcaaagtatt

SEQ ID NO: 268686 - DNA, 818 bp, Cannabis indica
tggcgacgtactgggcataagtatgggcgtcagtgatatatgataagtataggcgtaggtatgggctcgcctgattagacgatgcgatatattggtgctagaatgtggcacgggctcccctgattaggcaatgcaattatatgatatatgggtgcaggtttttggcacaggctcacctgattaggtgatgtagttatgcgatatatggttgctaggttatggtacgggcatgcctgattaggcaatgcaatacaggattatcatattaaagtatcgacttgcctgattaggtaacgtgatgttatgaagatggttactttatgaggtaatatatattatttatgttaaatgaatatgaattctattattaatgtaatggctttgtattaccaaatatctgtttgctatgtttattcgtggcataaatgacaatacttgaataataagccatatgattgttattattacttttcttgctgagtccttgtgactcacgggtgctatgtggtgcaggtaaaggaaaagaaaagctagattagccatgaggtgacagtcttctctaacaatgtacatattgacctcaccggcctgggtgtcgagttgccagaagtattttgagctggttgtatctgttgtgtattttgattttgtgtttaaatggttgttgtatatatttctttagcaaaaccttttacaacagggatccctggaatacactttttatgccgttataatgttcgtttttagtttttaattttagttaagttttttatattataacagttttaataattaattattcttaattagtaataaac

SEQ ID NO: 268687 - DNA, 496 bp, Cannabis indica
agcccaacaaaaaatggcgagtatgtattgattttactgatctcaaaaaggcgtgccccaaagtctgttttccacttctaagaatagatcagcttgtggatgcaaaagttgagcatgagatcctaagctttatggatgcctattcgggatataatcaaatcaaaatgcatacactagactaagaacaaagaagtttctgaatagatttgggtctgtactgctacaaagtcatgccatttggtctaaagaatgttggagttacctaccaaaggttggtgaatcgaatgtttaaagatcagatcagatgaaacatggaagtataagtggatgacatgctcgtcaaatctaggaagccgtgggggcatatagatgacctggacgaaagctttaatatcctttgaaaatacaacatgaaacttaatcccttaaaatgctcttttggagtcggctcaggtaagtttatgttgggttttgtgccctaaataaaacccattac

SEQ ID NO: 268688 - DNA, 881 bp, Cannabis indica
gatgacatcatcgttgctagcaacaatgacattgctactactcatttcaaacagcatttagacactcacttcaaactcaaagatacgggtacttcggttctttcttggccttgagattggccgaaagaaacaagggatatccatctcctaaagacccttcacacttcagctattcgctgacacaggatatctatgatccaaacccgtgtctactcctatggaaaccaacctaaagttgagtaaagacaaaggggatcctctcggtgatcctaccacatttcgcagcctaattggcaaacttatttacctcaccataacaagacctgacatcacatatgttttcaatcacctaagtcagtttttaacttgccctaaagtccaacatctccatgctgctcatagaattctccaatacctcaagataacacctggacaaggctttttttttccatcaaacacatctccaaaactgacagcatacgctgaaactagtctttctccatcaaatgtccaaatatctttcttttcaaatgccaattagggtggatgtcaagatacacactgctccatctcgggctattgcttgttccttggtagttctctagtttcctggaaatcaaaaaagcagcgagttgtttcccgttcttctgtagaagctgaatatcgtgccatggccaacgcaacctgcgaactaacatggctccttgctctcctcaaagactttggcatttctcattcatgtccagcagtgtttactcgtgttcttcgcacagaaactacctcttcgactcctcttaatagcgccttggtgagtcgtaatacttctgcatcggaaaaaaactctactccaagtggtttcaaaggaggcaattcacaaggac

SEQ ID NO: 268689 - DNA, 1542 bp, Cannabis indica
tccttgggatagagcccgtacttcacaaagttatcctcaggggtctactggataatatcctagtcttcccccggtagtggagcaagattttgagctctatccctgagagcaagagtgaggggagggtggtgatagatcggaatctgctggaaccgagtgcgagtgatgcacgtgccatccaccatgaagtactcatcaacaaaacgcccaatcttgctgatggccgaatcgtccgtgcccgtcaaccacttgaagcctggttgagagaaatagaagtaccccaacctgccttgcttgggggtggacttcaaatcaaagaaccaggcaacttcatgaggagaaggcataccccatttctgggaagcgtagaggacgaagagggcagacagatatttgatgcccttaggagtgaactgggccgggcagaggccgaagaagtccaccacattcttgaagtattgatgcaaaggcatcaatgccccttgctaaccatgggcacccgaccaagcgcacatcccctttttaaggtttgtggcacgattgttgtgggcgggaatgtagcaatccagttcgcccaggtatccgtcctgctcgagagtccgaaggcgtgcctcagtaaccctggacggagggcttacccaccttgcgcccaaggcaccttgccttctattaggaaccgcaacagcaagttcctcattaacgtagtccacgccgtcaaccaggacgtctccatcaacatctactggctccccagcatcgttgtactcgccgtagtttgggagttcaacctctgcctcttcctccgccttagaggaactgccaggacgtatatcgtcttgctcctcgatctgctagacctcgacatcgccttcatgatccccctccaactggacagatggatcctgttcggcgctacgcaaagtggcgtgccgagccatttgaggttcagatgcgtcagccagacgcgctattttctttgtacgagccatcattctatggctgggtacagggtttagagaatatccttcactagaggaaggtgggctagaacaaagacgaggacgatcctcgtttaaaagttgaagcaggtcctggtccatccgatgtcccttctcccaagactcacctgagttcatctacaaaagacaatacacaatatgagtgtttggtcggaatattgaaggataaacaagaaaatatgccaactaggagtactcaacagattaaagaacgagaatgttcaaggaaaagttagaactcaagaagttaaaaaaattttcgagttagggcaaaaaagttcatgaagcttagaaaaagcaagatgaaagacagacgttacgcagttcagaaaacaagcattatggactgtaaaatcgcatgtagacatgacaaagaagaatcgcagaagtttctggacctagggtttcctagatattttatagagcaaagtcgaaggtgcatttgaaatgtaatcatgcagagataagcataaaggaaatcaaaaacttactcgagagtcagatgtttgggttcaagcaacgt

SEQ ID NO: 268690 - DNA, 505 bp, Cannabis indica
agatgacaaatgaatctaggggtttgaattaaccggtttcatgagttaggcacattttcaattactttttaattcaattcctcaattacaagaaataagaacaaccaataaatactttttgaaagatatatatataataataataataataatcttacttttgtattagaagattgctccattgataaaatttccaaactctcttccattgatgaatgattttagttttagggtttaaacttttctattttgaattattttttttaaaagattttaacattcagttattcttttagtggtggggtgcacttattaaaaaataaaaataatttttattaaaaatatctattttggtaattttacataaggttaaatatgtaattatattttaggggtgtaattataattgggaaattttatttatactccaaaattttctaaaggtattccattttaataatttttattttatataaaatttatatctttaattgtactaaatttt

SEQ ID NO: 268691 - DNA, 574 bp, Cannabis indica
cgaacagctatgaaaggccaaggcttggccgactttctggtggaatgcacaggaaaaactaaaagcatcccagaaggcgatctcaagtcaacaccacagccgagcaacactgaaaacaagccgacctggaagctgcatgtggatgggtcggccacagatcatctatctggcgcaggaattgcccttgttacacatgggggcaacacttgcatgcaacggtcaaatttggattcaaagcctccaaaaacgaggcggaatacgaagccctaatcgctggactcaaactagcaaaggagatgaaggcccagcacatcgagatcttcagtgactcacagctagtggtaaatcatgtatctagcgaatacgaggctcggggagaaaaaatgatagcatatctgagcaaaatacatgatctgctcgcacaattcaagagctacagcctcaggcaacttccaagagaagaaaatacaacatcagatgccctagcccggctggcgagcagcaatataagtcacaaggcaaacctggtcccgatctagtttcttgaagagcctagcatcaccggcacggaaga

SEQ ID NO: 268692 - DNA, 580 bp, Cannabis indica
cttaactaaaaaaaaatcttttacagtaatatgaattacagtaatgatctggagcattggaaaaaaccgattgtttataaatacaagatcaacgttgatagagccatttttgaagctgaaaatcgttttggtgtgggaatagtcattcgggatcagattggtcatctagttgaagctatgtcaactagtaaagttggtgtggtgactccagaaattgctgaagttattggggtcaaagaggctctaagctggataaaaaatcatagcctctctgatgttgaaattgaaactgattcattagtagttgttcaagctattaatggagaggttcatatgtcatctcaatttggaatgttagtacaagattgtcgtatgatgatttcttttctgaacaatgtgttaatttcttttgttaaacgatctgcaaataaggctactcattgtgttgcgagacagtcttgtttattgtcaggttgtatttttagcgagctgaatgctccttctgatttattatctattgtaatggatgaacgttctcgtcaaataaaaatttatccattttaaaaaaatatattttaat

SEQ ID NO: 268693 - DNA, 516 bp, Cannabis indica
ttaaaaatgttctgtgacaattcagttgctgtttttatggctaagaagaacaaaagtggacgtcgaagcaagcacatcgacattaagtactagctattagagaacgtgttaaagaaaataaagtggtcattcaacacattagcactgaatttatgattgccgatctatgacaaaaagcttcccacctcataaattcaagtatcatgtagagaacatgggacttggttcccttatgtaatttgtacaaataaaatattattaatgaaactcttatttttatatttttcatatttatgcgcatcttaattttacatttaagaaaattttagaggacctgaataaacataagatttagggtttattcggttaagtacattgccacataaaatacattgttatatagtaaatatattgtaatacatggaaaataatactcgacacataatgaggatatgtcactatgattcatatattttttatataatgaggaacattgggtttgaatattttaattta

SEQ ID NO: 268694 - DNA, 1493 bp, Cannabis indica
ctccgggatgagtctcaaatacgaatggcagcttatcaaaagaaggtgactaagtactttaactctaaggttaaaagtagaaaatttactattggtgatatggtcttaagaagagtcttcccagccactcaagaacccggagtgggggtacttgggccaaattgggaagggccatatgaaattgaggatgagatcggctccggaacctataagctaaaaagattggacggaaccattgtgccaagggcctggaacgccgatcatctccggaagtattaccaatagtccaaaaatgtaaacttaggctttgttaagagaatttgtaccgtaaagtatatgcaacctctaaattttgaataaagctgagtgccttaaaaacaatattttcatgccactcaggggggtactaaggcataccacacggacaaatgtaaaacaggccaaaagtaaaaacaaaatcaagcagaatatatatcaaagtgaaaatatatatttaaaaatcctgacccaaaagcaggtccaaaaaaaatatatatattaagggcctggggacgggccataataactatctccccttagaagataataatttaaaattgtctgaaaggaaagaaaagagactgtaaatgtaaaagaaatatatatatatggttgtaatggtgaaattggttggactgctcggcctattcaatacgaggaggaagacgagggccctggcgttcttcgagcaaagcatcaagccttttcttcttctcccgaaacttaacgagaacttcctcaggttttggataaaagtcaagcttgatgctctggccattcgactgccaggccatatagacgccatcatcaaagcgcttgacgcaatgcttgcagacaactagggttaggagctcatctcttttggcctttttcaaggcctgatctttaaagtctcttagctccttcacctccacagtcaggttagtcgtcgattgcaagtctgcctgatgcaactcctccaaggactttaacttggcagccatttcgtccatagcctccatggcttcccgaacctcgcgcctggccctggctgtagcctcgccctccgccttcagctcctcccggtgctttgcctccgcctcagcctccctttgcttggcctcctccttgtactttgcgtccgcaagggcctccctttgttgagccttcttctggaacgccttcctttcagcagacaagtcccgcaggatcttcacaacctcgtctatgcccccaaatttggacataacgaaaaccatggtcgatcagggtcttggaaaggcagccgatctcggcagtaatctgaaaaaagaaacaagaatgaaatcagaggccttggacaaaaatataagagaagggaataaattacaagtactcatcatggcaagagcagagctgatgtcttgcacctggtatacagagttcatggatgcacaagccgcgtatctcttggctgggaattgagtcaggtggga

SEQ ID NO: 268695 - DNA, 739 bp, Cannabis indica
tacataaaaataaacttaacatcgcatgcgtagtttttcttttttgtaagggctaaatgtgtaatttaaattttaaaaattaattattttatttacaattaataaataaacaactaataatttttcaaaagagaaaataatttttttgaattataaattaacttcatttaaaatatatattttgcactaacacataagctaaataaacatttagtcacccatatgagttaaaatttaacagagtgtttatatttcatacgtaatgtgaatagttctaagagattttttaacaggcaaaaaaactttaaaaatcacaatttaataaggaaaatttgataaaattaacatgcttacatgcattaagcaaaaaataacaacctaaactaaagttaaatcactattagtaatttaagttttttttcatatctccccaaattacccgtcttatataaaaaacctcacctaatctctctttcttctctcgtcttctcgcattcccgatggaaccaagacccaagttgcactcaagagccaccatcatcttcatacccacgaccaacaggaatcaaagctcgcacccacaggaatcacgaccgtcattcacgaaccaaaaactcaataaatcgaagaaaccaccaagaccatttttgctattgtggtatagatttgtgattttttttttttttttgtgtttgtttttacttattttttgttaaaaaatcgagttttggtgaaatct

SEQ ID NO: 268696 - DNA, 1741 bp, Cannabis indica
accccctgcaaatccattttcattttcatttaaaaatacttgagatgggaaagaggatcttctctcccagtatacatcttccacgtcgtcattttgaacttgtggggtagtggcaggagattgatctctggtgagaaaggagtttcgtgtgcttggtccagcttaagatcattgtttctttgtccagccatgccgtggaaaatatttttcagtttgtcaagctgagcctgtacagctgctctaacttgctcggcattctggtcaatttgaattacgttagcatctttctcagcgggaatttgagtacgggctccaggctgcatgatcatcgtaatattttgttcgtctactcccctccttctgttcaaatcattctttaggtcatgggttgcccccaaccttttgaacacggaagtgcctggttgccttagcgattaattcgcttagttgtcgggtggaatggcaccattaatctggttggaaccatcaggtttgacttctcctgatgaattaccagacaaggtctgctcccctaccgctgggcccacgagcgaaactcgtgatcggggattgggcggctaaccatttgtagtctgggaagtattcatcgttggatcttcgtctgttccacccaagggaatgacattcggcggctgctaacctacattttgataggcttttcgtatcagcacggtagcctaccgactacaatttttgatatcttcatgatgagcctttaatgcctccatctctctatccctccattcggcgaacatgcgcctttattcgtcaaatgcgagatttacagcagcacgcagttcatcctgatcatgatgcaggctgttgttatgattctggatgagtccaagagcgtcgtggagattttgtaactcagtagcatctccgatggtcgtctgggcgttggttctaggcggaacagttgtgttatgaacgccctggtttggtgcagaactgttattcccagtcttttgcacactaggcgcggtttcatctataagaagtgttcccccattgcccacgttcgtcgtctgtccaggattaatagatggtggaacccttgtgtttcctagattctgcaaggcaggatccaccgtctgtgaatttgctagatcagtcaaacctctacgagtttgcaccatcctatttgtggtagattttgaatagagagcgattcttgagttcagctctcaatgaaagcaccaaaatgttgacctcacttttagcctacgacaatgagtctattttataagcgataagtgatatataataacagatatatgataaagcaatataaagacacagggattttatagtggttcagccccaagcagttcggtaatagcctaatcctcgttacttgtattgacttaagatcaaggagaaagattccttttcttatagctcttacaatagtatctctgaatatagaattcttagataatagtatagtcttagctcaactgcttttcgaccgatctcttgcccagtgaatatacatcactaattatagggctagtaaccttggagaggaagagtttcccctctcattgaggctgaatacaaggatcatgggattgaggctgaatacaaggatcgtgggattgaggctgaatacaaggatcgtgggattgaggctgaatacactgatagtgggatcgtgtgtatgccataatcacgtaaattgatccctaagttatagggattgtgctgatgactcacg

SEQ ID NO: 268697 - DNA, 660 bp, Cannabis indica
tgttaggggattgtcacgatgttttggtttaaaaatatttcatttaagattatgattcaaatagtttttataaagctttatattttaaggttatgaataaataaatgttttgttgtaaaaataatgagatctcatgcttagttatttttcattaaagaagtcttttattgtctttatcttaaatggttttaaacggactagctagtgtgacgtctcgggaaatcggggcgttacacactattagtgtccgataacaatgcttataaaaataaatgtaaagtttataaccaagtactccatgcatatatgggcttttcccttaattacataaatattagattaacaatgtattagcttctgtaagttgggtgattaattaggatattatctagacatttaagagattagttgtccataaataagagattagtgcactactaatgtcaagggattatgaaaatttggttcaaagcttgccaaaattatataaaaaaaaatgatttatccaagttcttaatcctaaatttaattattcgtaaattgttgctgagttttaaacacgtacaacttttactacaaaaaatagcaacttttagtgacaactttttaatcataatataaatttttagtgattaactgtgagttttagtcacaacaaaa

SEQ ID NO: 268698 - DNA, 1354 bp, Cannabis indica
ccgtactgtattgtaatgtgttagattgtattgtattgtatttattgtatattaatattagtttttttgagagaatatattaccattatttaatacaatactttgtttggtattgacttgttcatagattattgtagtggtcaggtcccaaatcctggatttgggtccggggctgggtccatttagattgtattatattgtattgattgtatattagcattatttaatacaatactatgtttggtattgacttgtattaatagattattgtagtggtcaggtcccaagtcctgggttcgggtctagggctgggtccgttttcagttcgggttcgagtctggttcgggtcgaggttcgagtctgggtctgggtcccgggtcgaagattggggttgatcccagatcttttttaggtacttgtccgttaaatgttaagtcattatccacatattattttcttattagtatatttaaactatttttttaagaaaaaaaataaaaatttaatgacttgaaccaattaaggattgccacgtagtaatttactcaacacttagcagctagatacctacagatgttccagaattataacttaggtattattaatgtcaaaaattaaacttaggtatttatttacaattgggagttaaagttaagcattatttatgctgcaaattactctaatacagtacaatattttattcaaacatagtgttatttattatttaatacaacaaaactccttatacggcctaccaaacgtgcctttaaacttattattttactttaatttttattttcatttatggttttcattttagttttataacttaattaatgttatgttgtttttattttattagtattagtattttttattgttattttgtatttttaaatatgttagtgttttaacttaattattatttttgtgataaattttaattaggtgactaaaatgtaagattatatgttaagataaaataaaataagggtagaaatacaaaaaaaaaaaaaatgtacaccaaattggtatagattgaaaatttaatattattatgtagaatgtgatgcacaccaatttggtgcataatttggtgtgctattaaagtaaaatggtataaagattctactcaaatttgataaaactattacagatgttgtaatgcacttattcatacactaaatatagtgtatagtaacagtatataccatatttagtgtcaactgtagttgcactatcattatttatttttattttatataattattttattattttaaataatgtttaaatttatatatatttagaaaattttattgtgcacctataaaagattgtaccgatacactcc

SEQ ID NO: 268699 - DNA, 633 bp, Cannabis indica
atttatgaaaaaagcccttaaatatatgcatataaaataattatcttcctatgttagcttaacatccaacattaaattagtccatcattgagcacataaaattatctgacctccaaatttggaggaaactccaaacccgagataaaattaaggtttttttttttatttaagcgtttatatattacaaccatattttagctgagattcgaactcagaacctatagccacttgagctagcctcaagtgattaaattaaggtaccctttaaacaaggaaattgccatcattagtggcttacattgaatagtgctggaaagatattgtagtaaagaaaatacacaaaatagaagagaccctcatttatcaagatatcatttcacgtaggtatgagtatgaaaactgagcactggtgatagtacaattgtatttcacaatgtagaaaacaaaatcaaagtaaaaagtaccatgtattatgtgttggctcaaaacttgaaatcaccataaatatcaatgaaacatatcattgcccccaacccctgctctgcttgtgttatcaagaggttgagcccatagtaaaatgaatcccagctaaaaaaaaaaaatgtaaggataattagtaatttttctctccga

SEQ ID NO: 268700 - DNA, 612 bp, Cannabis indica
gtgtaggagtaggtctcatcaaaagagttgtttagacaaacaacacattagtcaaaaaacttgaaaaaggagactgatgtaagcaagtaagaagagaccattcacttacgaagttcacgaaacgtggttgtgccgataggggaaagaccagacgtccagaagaatttatccttgaaagacactttattaggaaaggctaaaagaattttaggttcgcaagaatgactacaagatagaaaaagcccactccagcgttcttccttgatgtaacagccttaactgagtagagaaactcaatctctactggtgtgggacattccctgttcagaattttatacaaaaccttcaaactagcgagaatcctataagagatgggagtcagatggaatggggcaactccaatgtggcttacataatccttgaagtagtctttaagaggaagggttgcccctgcactgatgtcctcgaggctccaagcacccatactagtcgagctagtagtacttgtctaacaactagtccccggattactgcttgcaaagcgcacaggggggtagtgttggaaatattttaccaggatctagatttactaaaaagtatgtttcattaaca

SEQ ID NO: 268701 - DNA, 655 bp, Cannabis indica
tttcgtaactcccttggggtgaattttgatgatgatatcttcagaattacatctggagtgtgagacattacttgatagatcattgaattaacttcaaagtgcaagtttaatcgcatcaattagatcaaatttgactgagttatggctattttactgaagatagttcatgacccagcacccaagttgacatccaacgtccaagttgacatcccaacgcccaagttgacatatgacattaacctggactctagataagggatgtactttaagatgcttaagtgatatttttacatcacttagtctatttatgtgttctggtgaagctggttaccagttcttggagatgttgctgtattacaaaaatgagagactcaaaactctccatttctgggtgagctagaaatgagaaatgcaaagttgtgaatttaatttctctaaattcatagatcattgtcattgtcaaaaactagacagacggtcaaaacagcattagattcggataagtagaacccagcgtaccaggcctcttgtcaacctggcgttttgtacttactctcgagctccaggattttgtttttgatacttccaaggcttctgaacttgaggacgaggttttataccttgtttttgatcattttggattcaatggtcgcat

SEQ ID NO: 268702 - DNA, 1448 bp, Cannabis indica
aaaaacaccccgatgaaaaccgatttcaaagccaaaaactagtgtttcccttgctggcaaaactagttgatcagtttcactatacctgtgaaattggttaatcggtttccctgatgcagaaaagggaaactctggtttttgcaccaaaacccaaccaaattgcctccaaacttattcaaactctccagaatagttttgtaccataaaaataatgcattcaaacaaacaattctcaacaattcatcaaaatattcaaaacaccatgctagaaccaaaaattaggttcttaaactaaaatttctaattccaaaccaaacagccattaaatacacttaatttgaactcaagaaaaccctaaatcaaacctaaaaacataatctaaactcagtttagcacctcagacctgaaatcctaaaaccctaaccaaaactcaatccatacttcaaaaatcaactagagaaagatagagaacttacctcacaacttaggagacttctaaccttgatcaatcctactaaaaactggttgaaatttcaagaaaatttctaatttcttgcttggggtgctaggcctgtcgaaggggaagagagcgacttggataatatttggtttttacttcttttctttctttataagctttatcccttttattttattaaactaaattttaaataaacttatctaactaatataaacctcaatttcagccaaaaatccatgtaggacaaaattaatatccatcactaaaatgactaatttgccccttttataaccttaagactaaaatcaattcctaggggtattttggtcatttctaattttcccgatttaacctacttttcaacattttaacctagtccagtataactccaatataacaaatttcaaccactgtaatatttctgaccaccctgtcgagttttcacggtcgctgaacccaaaaatattttattttaaaagtggtatttacaatacccatataacccgataaaaccttcgtaattaataaattacgtttcattcattcctttactagattgatgctaattaactcataattagtttaagtaagattgtaatcttatcacattatctgaataatcacatatttaatacaatatgcctaattgaacactattatatttttcaggatattacaactctctcctacttatagaaattttgtcctcaaaatttaccgaaatagttcgagatactgctcccgcatctgtgactctaactcccaagtcgcctattcaatcttgttgttcctccacaacaccttaactagtggaatagtcttgttccacaacactttctctttcctatctaggatctggactggttgttcttcgtattacaaatctttctgaagctcagtatcttcatagcttaggatatgagtcgtattagacacgtactttcaaagcattgagatgtggaacaca

SEQ ID NO: 268703 - DNA, 1135 bp, Cannabis indica
aaaaagggttgcccttgccctgtttgcagccgaaagagggaagagagaaagagagttctaggttggtttttctctcaattttccttaattttatttcaaatgaaaaaagagagttaattaattaatcccttaaagaaaactaagtgccatgtgccatctacttaggcagccacctaatcaacttaaaggtaaatgactaaaatgccccttagacttaaaactagggtatttcttaagctaggggtaaaatggtcaaatcccataaccccgctcaaccccgatattttattttctctaaaatatttcccactaagaaataaggttctaaacttacccatgtgatcaatctagccatccatcgcattttccgttgtcgccgagaaaaattacaaaaattgcatatttcacatattaatcaaacaatacccctagagtttaataaaatctccgaaattgagaaattacaactctaatatttatttttaaatattggggtccaaaataattaaattcataaataataataaaataataaaaattagtgctaattgccttttctaatccaatttattaaggcggtcgttacactgtcggacaagcccagaaagagaaagttggcactaggcagtctaagggtgcccttcaaccccacgacttgccaggtgcataggctggcactagaaattatacccagacctctagttgcaagaacactagaggaaagtgcaacaataatagctccgaaagtaaaatcattaaaaaggggaaatgcaacacttcttccacgccacaaaactagaatgataaggaggagaagtacacatgcttcaccctcttgacaaagaaaccgagaccatctccatggccacttaaggcactatcccatgcaagaagccctctcccatcaaaagtaagatgagcaagagggacatgttaaagttttgccaactttggccatgataacaacaagtgtcagtacatgatcagggagattgaattccttataaggaagaataatccccacttgaatctttttgtggcaggtgttatacccgaaattcgactgcacttcagcgagtgacatgtgtcagtcaagtgaaatatgaagcactaaatataataacgattatatcat

SEQ ID NO: 268704 - DNA, 831 bp, Cannabis indica
tatttagagaaagttcgaaagaacttggaacgatttgattaatttaaaatcgaacaaattctaatagaatagaactccagttcggatgccttagcaaaacttgcctcgcagaatgatatggacgaactaaatcttgtttcggtagaaatgctaaaagagccaagtatatgtgaaacagaagacattgagatagtagatagctctccaacatggatgacacctattgtcaactaattactcaacatgcaacttctgaatgaaaaaaacgaggtgcaaaaacttttttatatagtgcctcgttacacaatgatcgaaggaaaactatacaaaagaggatattcaatgcccctacttcaatgtgttcttcccgtagaagcaaacaaaatcattagagaaattcatgaaggcttttgcgggaatcatgcgggttgggaaaggctgtctaaaaagatcattagacaaggatcaataaggacacacatgagtttttcaaaaaatgtgataaatgtcagagattttcacatatacctcgcgtaccgccaactgaacttagaatcatgacctcaccatacccatttgctatatgggggatcgacctgattggggcattacccacgagatgaggaggggctaagtatgcagtggtagcagttgacttcttcactgaatggacggaggctaagccttttgtatccataacctgcaagaaagtccttgactttgtcgtcaagaacattatctgtaggtttggaattcccataaagatagtatctgataatggaacctaatttgatggagacttgttcattgaattctgcaagaggaataaaa

SEQ ID NO: 268705 - DNA, 516 bp, Cannabis indica
acagccttcgtttttgttgaactggccggaagttaggatcgatattcagaacatgtgaaataatagaaggatcgattccgaccatatctgcatgtgaccagacaaaaacgtataggtttactatcaaaaattttatcaattctgattttacttcgagcaacaaaccttttccaatctttagctttcggagcgggattgctggatcgatctcgatctcttctaattcttctacaggtccaacattgctgcttgggtccccaagtcgagggtccacatcttcattcttgtcttgggaaattccctacttgtgaatgttttatcccttgtctaggatctggctagaggatacttccttcttagccttggccactgcaaggttataacctccccgtgcagactgctggtttccttttagacaccctacccattctttgttgggaacttcaggcacgagtgaaatattgatgtgaccgcttttaagtcatatagggctggtcgaccaagcattacgttaaa

SEQ ID NO: 268706 - DNA, 604 bp, Cannabis indica
aagtgcactttggggtcaagtcagggaaatttttgggactcatcgtcagccaaaggggaatagaggcaaaccccgaaaaaattcaagctttactaaacatgcctttccccaagaagcacaaagatgtgcaaagcttgaccggaaaggttgctgccttaaaccgattcattttccgatcaaccgacaagtgcatcccttttttcaacgttttaaagaaatgtcaaaaatttgaatgggctgaagaatgcgaggagacattcagaaaactaaaagagcacatggctaaaccactgattttatcaaagccagttcatggagaagatttgttattatacttagttgtctccgagaatgctgttagtgcagccctagaccgggaagaggaaaaggtctaacatccagtgtactacgttagcaagcgcatgataggggccgagatatggtatccgttgattgagaagttagttagctgcctcctgataacttcaaggaagttaagaccttacttccaggctcaccccatcaaggtactaacaaaccacccacttcggtaagtcttacagaagccagaagcgtcaagaagactcctcaaatgggccatgga

SEQ ID NO: 268707 - DNA, 687 bp, Cannabis indica
ggttgtcacgaggaggtgacctttgattgtcccttcgagggtttcaaaaaatgacggctataatcattacttttattgcattaatggtgccacgtcacaaaactcttcggtttctgtgtaggcgtggccatctttggccgttggattgggcgactctaggcattccaattgccacatgtcgtgatcccaattaatgaggaatttggatatttaaaccctctgattcgaatcaaaaatccccattttccctcattttctttaactcccttaacttccttgttccctctctttcagagaaaccataaaaaacttccataaattgcccagatttttgcttttctttgtgggtttttcctcgattctccagtgctgttgagggcaattcgtgggaacagattactagaagtaaaggttagttttcaaaaattcgctgcatttcgttttctgtttgagagggaacactgttttctgtttttttaacatgcatgagagagtttaggaataaatgtttgtagggaatatgtatgaggctatgttttttaggtaagaaactgggtaatttcagaaaaaatgacctaaaattggcataaccgcatactgtataaagaattcttgaataggtactgtaatatcccagaaaataaataatatttaaatggacatattttattaaatatgtaattactt

SEQ ID NO: 268708 - DNA, 546 bp, Cannabis indica
tatatatggtttgtatatttttttatttagttttgtgaaggtttgtttttttttaatggatgtatcggagatatgcctttgccatgggatggctcaccattgtttcttgtttcctattttaggtgttgttggtagcatttggtgacctttggtgtgttctgttttgtattcaactttggtttttcataatgaattaattagggtgttcttgttagagtcaccctagaaaaataaaatgaaagtttgcttttacatgtaggctctatactataattgatgaaatacaaaaacatcaagagatggaaaaaagataactacaaatagcagaacagtaatacgtttataaacaagtacaaaattcatatgtttatacttgaaggtttgcaagtttgcatgttttcatcttttagatgttggtttactttattgtacagaaaggttagttgatgaatcaaagcacaatttagaaaatttgtcaagagtgaccgctgttgaattctaagcaaaccagagaaagaaaagaaaagagaagaaagagagaattgg

SEQ ID NO: 268709 - DNA, 1295 bp, Cannabis indica
ggtaaaatatatccaacaattattctgaagttgctatctcttgtaagtagctcgacatcataaacttctttctggtcggatgttcaatcttccgccctactcgatgcacatgctgctagggacattaacctccgcctaggtatcagaaatgtgagacacgtgtcacttggtcctcttgccacctcaatgtgcaaaaaaactaaataatagggccaaccaggggtggctagtcagctcttgagagtgaactggtttgtcactttatccccatttgagtgctggggtctttgcttgctcgaatgctaacttggccttccttttagtgagctacactgccacatggcacaggttctgtccacgtaaacatgccacgtcatgaagaaaaaaattaggataacaccctcctacaagcatccagtgaccaaaacagtacttgaacttgttgtcctttatgacaatgtctgtaacagtacttggattcttctatttcagcatgtacaagtaaccaggtgactaactataagccttctactggcgtacccctcacatacataagtgccttctcctagcacctccaagccttctcataactcatcttgatccatagtcctgaaacatattccctctgtatgtcttttgccttgcacttagttccatctgatctgaacttgttcttaatcaggtagccaacaacccacggtgctgcttgacggttatcagcatgtctagaatccaggttacatgtggtcgttgtggagcacagtgacctcaaacatgtcataacatgccttcttcctccccctcactctccacttgtaatttgaatccttgcaagttgcgtaaaaaacattggtgttagacttcttcaccatgaacttaaaattcattttcaattcgaaccttcctactatattttttaattcagtctattttgtgtacaactttccgaagtgtatttcccctaatggtgtaccactaagataagttgtataaatattatttttctctatgtctttccttgtccacacaataggtttaaattttgtacaaactttaaaatcagatggtacagtactatgagtagaacctagtcggctgctactagtacttggtgtttggtgatttttactacaaggggttcttctttcttgctttctcctctggttccttggcggtagtcgaggtagttctaacctcaaagaaggtacctctacaacttcattgacttacaactccacatcaccatccttgttcaaatctaccacaggatcattattgttaaagggagtatcaaa

SEQ ID NO: 268710 - DNA, 1522 bp, Cannabis indica
caacactataggctatagctattttacttcaaaaaaaaaaaaaatacagtataattattaatgaaaacgtatacatgaaaaataaaaggaaaattagaaccaaaactcactcaaaaacccacaaaagaaaaaaaatagtctaatccatgtccattatccaatctaatctacaatattatagaccatataaaaaaagtctcaaagtctacaatatagctacaatataatagtattgatcagaatagtattaatcatccaaatctaaattctaatccatatccatatccatatccaatccatacaatatagatcatttcaaaaaaatctcaaagtccaaatctaatccatatccttatcaaaaagtatcaatctatcaatattgatcatattaaaaagtcccaaattctaaatctaatccatatccatatggattatatcaaaaagttctaaagtccaaatctaatccatatccatatatccatatggatcattatatgaaaaagtctcaaaatctaaaatataactattcaaacttcataaccaaaagtatcaataattcatcttcataactattcaaaagtatttacttcccttgtgtatattgtgttcttctctttgtgtatccattgtctaattcaacaaattccaaagtcctccaagtccaaagctccaaacctttcaatatttttttatattgaaaaaaaggataaattagcaaatgaaaccaataaattaaatataataaagtataataataaaccttttcaatccaaagtcgtgccttgttgttgacttgttgaggttgaaggagtagaaaaagtgcctatagtattgttattgagaatctctataaaatatcaaaagtataaactagttagataataaatatgcatatgtaaaataaatattatgatattaaacttaaattatggaaatcaaaataaaatataacaaactaaaattaccttcttcaagcaatgcttgtgtttgaagtatttcttcttcatccatgtactctcgcacaacaatgggttgatgtgatccgctccaccaattcttgagacaaattaatgcttcgaccatcattgggctaagtgtactcctaaaaggatccaaaatccgacccccagctgagaatgccgcctcagaagcaacagtggtaaccggtatagctagcacatcacgtgccatgagggacaatatcttgtatttgcacccactactagcccaccatcctaaaacatcaaattgttcagttggttgctcagcttcctcttcaaaatacttatcaagttcatttttcatcttgccaccatttttctccattcttcgtgccacgaactcatcatggacattacgagacttcttgcctttaggtcgactagaaacgataaatgaggaagaaccaccatcatcaataggttgagcttgagcatgtgattgagtgattaaaggatcaatacttgatgctgaatcattatattgattaaacatactctgaatcgtttgttccacccctttc

SEQ ID NO: 268711 - DNA, 1039 bp, Cannabis indica
aattaaggccgagtagtggatgagcactattacccgtatcctggataatatgggagtgacgagatttgagaaagtgaattgtgcaaccttcatgttgtaagaccatgcccgcgtctggtgggacattgtgggtcaaacctgggatgttagtgtaatgacctgggaataatttaagaatctatttgaagaaaagttttacaaaatcgctgtgagaacttcacatatggaagattttgtgaagcttactcaatacaccctggagtttgatcggctgtctaagtttgctggtgatctggtgcccacagatttcaccaggaaacagaaatatgtgagaggattgaataccataattagtcgggacttgaagattaccacttcacatgaaactttgtacaagaaagtggtagagctagccttgattgttgaggaggctaagcaacatgttgcgaaagagtagattgtaaaggataccgtcacggcatcgaatcctcttgctagtggtaatgtcagtaaggggaccgacagtggcaaccctgatcacaaatggaaggctgagtcttccagagcatcagggagtattagaaaatttaaaggaaattgaggtggccatcaaggtcaaggatcctctttcagatcatatctagaatattcaaattgcaagattgccattagagtgaatgacgagccaagattgcatcttatatttgatatggattatatgaatcgagtgtccaaagattacctggatagatgtgtgatcgtatttattgacgacattttggtgtactttgagtcagaagaagagcatgagttgcatctcagagcagttttacaacgattacgagatcataagctttacgctaaattcaaaaagtgtgagttctggttatctcgtgtctcatttctgggacacatagcggataaagatgggatcatggtggatgcggctaaaattgaagttgttcgggataggccaacaccaaaatcagctactgaagttgaagctttctgggattaactgggtattatcgtcggttta

SEQ ID NO: 268712 - DNA, 784 bp, Cannabis indica
tgcaggcccaaggcagcaggggggttaggctttcgaaatgtacaacattggaacatggctgccttaggaaggtatgtgtgggatatagctagcaaaaaagattgtctctttgtcaaatggagtcataatgtgtatatcaaggagcaggattggtggagctataatgctcccttggattgcagctgggcatggaggaaaatagtggctgtcaagtacaaaattcagcaacagatttcactaaccagttttgttgtgcagaaatacaagatccaacaagggtataacttgttgtttgctgaatatgataaattaccttggagtaatcttgtttgggatcggcttattgttcccaagcatagattcattctttggttggtactttgggaaagactaaatacaagagagagattaagcaaatacatggctgccatggatgcaaagtgtgtcttctgcagtaaagaagaagagaccattgcacacctgtttttgagtgtgatttcagccgaagctgtctgcaagagttgaagaaaatcctgcaatggaatacaccagccataaatattcaccagctgctgcaagcttgccataacaccaaacgattttcagcagctaggaaaagtatggtgaagactatacttgcaagcttggtgtattttgtttggaaggcaagaaaagaagtgctatggaatcaccaacagtgacttgtcactaccacggtcaagaaagctcagcaagtgagtaagatgagaattaaggggctgcttcctaaaagagctaaggatga

SEQ ID NO: 268713 - DNA, 519 bp, Cannabis indica
aggaaatttgaataccatatgagcgagttggaaagcttggacatccgtgtcagaccatatttacaacaagttggataccataaatggtcaagataccactgcaaacacaacaggtattcaactatgacttcaaacattgttgaatccctaaatgcagcaaacttagcagctagagagctaccaatcataacgctgatggagtcattgagagcatttatacaacaatggacatacacatacaggaaaaaggcacagaaaacaacaacatttttaacatctacagcagagaagaaattagtcaacaactttgtggactcattgacaaaaaatgtaaaatctcttaaaactttaagttgcattacggtttcttaatagtttattttcagtttctggaacataatgatgattttataaagtgacttaattcgcaggtaaagccaataaacgagaccatgttcgaaatggtagaactaacaagatcatgggtcatcaatctcaaggagaaaacatgcagttgca

SEQ ID NO: 268714 - DNA, 714 bp, Cannabis indica
gctggtaaaaattagattttagccattgtaaatgtacactagtaaaactttgacatctttgccagcgcaatttgcaaaatgcgttggtaaaagttatttttaccagcgcagtagcgaactgtgccggtaaaagtgacatttcttgtagtgaagatagagttgcttttccttggttccaaaaagataactaaggaagaggcaatgtggtttgaggctttgtaaaaagtgaggaaatttacattaattgaatatttgtatagaagtttagttagaggctatttataaagtctctttagtttgtaaaattattttttggagtaatgaaattcatctggttcatcaaaaaatcatacaaggaaagtataatacgacctacagatgtgcacttaacaaataaagttgaaatcatgatcacttaaaataaaaccaagagataaaataacagtaacgaacttttgaagccaagctcggggagcttgtttaagaccatgcaaggcctttcttagcttgcaaacttcgccttgcttatgaggaacaccaagaggaggaaccacgtagactttctcatgtaagtcaccatttagaaagggattcttaacatccaatggagatatagttcattgatgaactgatgccactgcgataagagtacaaacaacagtcatttttgcaacaggagaaaaagtctcctcaaagtccataccatattgttat

SEQ ID NO: 268715 - DNA, 1538 bp, Cannabis indica
tcttgcttgagacctggccagccctaaggcttaatcctaggagttggccaactttaggcttttgacctataaagctagtctattcatgcctgggttttgtgatccttgtgagttcttggctgagtcatggaaccctgaccgaccctttcaaggcttgagaaccttggccgagccttggtttcaagtgggtagccaattttctgtcctcctttgacttcggcaagaatctgcctatgtaggcatatgcaacctcagtctcatacgtggtttccttggaaactctgtatgagacttaatggtgagtctattatggatgaatgttcatcttatgactcaacatggcttggatcctgtaaggaactctgccttaactgtagcccagtacgtggcccgtataggagctttgtccagttcttttttggatatatggttctcgcaaggccttggcctcatgcatgtgaaccaatttcatatctagcctcaagggttttatgttgttattttgtcctgttttcgaacacaactattatttagccttaaagccatctatgatggacatatgatcgtcatgactatctttttatggccttgacaggtaagggttcaaatttactttgtcaagccaaagtatgcctgcacgacttagagccatgtttagtatcttattctaagagttaaaattattgggttttgtgccctaaataaaacccattccgatttactaattaataaacaatagaaatcgcttttatgttgcatggttcacatgatttgtttcatgattatacttaatgtataaattctattgagtccaaaacatatgtaaatatgtatatatatttgttcatgattatagtgtcgttagcatagtggaatataatcatgattatatgttcaaaagtttaattctcatgatttgtcagttcactggatttagactagcatgataatcaactataaggtatacttacaccttggataagtgttatgtcctttccagggtattggaaaagtttaccagtatcagatgtatggagtatacattggaagggacagatattgatcttagataagatatcataaacttactgttatatctttctaagtcaatatcaatggttgatcttaggtctatcgatcttaatcctgatatgattaggttcaacttagttgtattatttatgttcttagagttgttcgtggaagctaacttttggttctggtggatacttacatcttgggaacatggtagttcaattgagtgggagcactgatcatagatatggaatctatagcttctataagtatttagaagtgaaacgatgatttccttcgagcttggctgaagagagataaatgattgagatctcatttcattaattagattagtttactgaaatatcatttataggttgctaagtgttttaaggataaaatacattgaagggtagaagggtaaatttgtccctatttagtgtagatcatctatagaggatctttgactattaggattgtaacaatagataatcgtaacgtat

SEQ ID NO: 268716 - DNA, 607 bp, Cannabis indica
gttcatttgttgcatgtgatgattggaagcatgaagaaattttcaccgatgaagtagttggtattaatccagagaaagagaggaagcgatgagagaaagatactaaaattattttttttaaaaaaatttatttaattaattagttattaaaaaattgaaatattttttctttttttaactttaatttgttctagtcattaattttttttttttaattttaaaacaatttttgatattatttatattaaatataccaatataaatgtgtcgcgtgtgcaagagtatacacacaagcaattatgttagctgttaaatgtggtaaatggatggtgtaacaaccattattttcatgtgtggcaaattatgttctcgagttgtgtttggagttcgtggcattatgtttggtgtttatactattagtgatagtccacgtcaataaagatattttgggtgtttaattattcagctagttatagttgtctgtttcgggtttcattatttagttaggtataaatatcatctcttgtcattattttgactaaccctcttagatcggagattaagatcacattttaccttttctctctgttgttctttgattcttgca

SEQ ID NO: 268717 - DNA, 1135 bp, Cannabis indica
ccgatctgattctggattcagttctcggtctaagtccttggttctaatcctggtctgggttcgagtttgggtgcaggtccggctctagctttgggtctgattctaggtgtgggtttgagtttgggtccgagactgtgtccgggtttgcgtccaggtctggaacccgatctgggtctaggttccggtctaggtccaagttagggtcccgagtgcgggtcctagtttgggtctgggtcaggatctcggcccaaatctaggtctaacatttcgatcccagtctgggtcttggtccgagtccaggttcatatcaggatcccaatctaggtttaagtctgtgttttggatccgatccatgatttaggtccaggtctaggtcttagttccagtctgggtacacgaccatgtccgggcctgagtaccaatccagtttgggtctgattcaaggtttgtgttcggttctaggtctgggtccgagtcctggtcacgagtctagtcttgttcaagggtcctggtttggcgattcttgttcagcttctaattttaagtcccaggtctaggtttgggttcgggtttggctcttcatctaagttctggtcctagtttgagtcccagatcaagacatcgactactggtctgttccaggcccgttacccgaatcccgagttaagatctagatcaccgtcacgggtctcggtctggttctggttcaggtcccaggtcccatttctgagtttacgttcgagaacgagactacggtatggttctaggtgcccacccttgttctatgtttgggtctgagttcaggttcgaattcgagtcccgagtccatgtttgggttggaatccaggttcgactcctaattcgggactaggtctgatttggagtctgggtcctagtccggttacggttctagatctaggtccaatttcagttacgattccaagtccaagtcttacttctagtccatgtcaacttctgtttttggtttcaattttgggtcacatggtatgggttcgggtccacttttgggtttgggactttgttcaggtccgggtgtaagtttcggtccttatcacggttcgggtccagtgctgagacccaaatccatacaccgactacgggttttgtccaagcc

SEQ ID NO: 268718 - DNA, 958 bp, Cannabis indica
ttcagaatgattttatatgtcatatatagaaatttcatatttttgaatgttcagtgcgcggcaacattggaatgcgatgtatggctcagtagaatcacatcttggtattttagtatagcggggtggtattgtcagacattggaaatgtcgagattagtcgggaatttagaattttctaaattaccactcagtgccctttttgacttttagtatgggaggggcaaaatggtcattttgccccattagccttttgtcattttgtggctttagttaaattaagtaatttgattttaaatgaatttaattaattatggaatagtgtatttattcatgtttttcaagaaagaaatcaaagtaaggaaaaaactcattttacaccctctcattctctctctctttcgaagtaacctagaggcagctagggttgattaattcttcatcatttcaagtaattctcagcaaagttagtcatttcaagttgtaggtaagcttccaacaactctttctttagtttttttaaaatttatgaaagtggaattctgcatggatgtgttttgagttatgtagttgctgttagggtttaatgttgttttctggatgttaaatatgttgtttaagactgatatttaggcatgtagtagtggctgattgttgagttaaccaagctttgagttttgaaactcaaacttggagctttaatggtggattttgattctgtgggtttagggttattttattgccttggaaatgttctctaggttgtatagaacaggtcggaaaagtttggattggattggggttgaattggtcgagttatgaaaattttggtcattcctgcactgaaccggaattccgattcagcgaggcctgtaggaaccagaattccggttggcttctaggaatttttcccagaaccggaattccggttggggaaccggtctactggttggggcaattt

SEQ ID NO: 268719 - DNA, 772 bp, Cannabis indica
ttcggtgcaggcattgcccttattaacacctgggggcagcacctgaacggaacaattaaattcaggttcaaagcctcaaacaatgaggccaactacgaagccttaatagcctgcctcaagttggcacatgaagtacggactgaccacctggacatattcagcgattccaactagttgtgaatcaagtcctaggcgaatacacagctcgaggtaaaaaaatggaggcctacttgagcaaaatcgaagacttactaagtcagctcaaaggttacattatctggtagatccctaagagcataacggtacagtaaatgcacttgcccgcctgacaagtaacaccattgctgacaaggcaaatttgatgccaatacagttcctagaggaacccagcattaccatcccagaagaagtcgacatgttggatgacacctattccagcttgcctccaaactggagccttactagaaggcaagattaaagcaaaaaagataagaagaaaagttgctaggtacctaatcctagacggagtaatgtacagacggagcttctccatgccactcttaagatgtgtcaccaagaatgaagtcgagcggctaatgatagaagtggatgaaggcttctgcggcaaccatgtcgggggataaaccctatccaagaagatattttgataggggtacttctgatcaacaatgatcgaagactcgatggactacgttaaaatatgtgacaagtgtcagagattctcaaaaattctaagagctccacccaatga

SEQ ID NO: 268720 - DNA, 699 bp, Cannabis indica
caattctgcctacgtggacatgcacgtcatgcgagtaaaaattaggataatatatatgcatttattttttcaaatcaattatttgaacacaaaaaactaataataataataaaaataaaaaataataatcagtttggacgggttaacccaaccaaaccaacaaaatcattgtgcgagttaaacgtttttaaggtgcaattttggcacttgagttggggccccaaggaatgtcgagttttgtatgcatgggtgaggactcacacaccaaaccaccacacaagctcgtcatcgtccagccgaccaagctaagctggcgagcatgtttttgtggtctcactttactttaatcgaaaaattatttaataagataaatatttttttattattcaattaattttataaaggtttaatttaagaaaaaagtaaaagcgaccaatcaatgattcacatttttttgccatgaaccaacgtctttctcgatcacatttttttgcaatttttagagtgtaatagagcactattgttcattgcaagagcaattcgtatacgatgcttgttttatcctgaggacgtcgtgatcaatagactgtcgtacacacttagggaagggctccgagaaatcttaaagaaagcgacataatccgcgattcagccagaaacttcattcagaaattcgttctaatttatttaagttttcat

SEQ ID NO: 268721 - DNA, 764 bp, Cannabis indica
tttataagtaaattagacaaaatgcatcacacaaaaatataattaatcaaagagtaaaattataaatattgggcataccaagtcttggaaattattttatcaggttctagatttactaacatgtatgttgtttaacaatctaaatatgaattttccaaaacaatataattaaacacatataaagtttagaaaaccttacattagtggcagcagaataatatgtctccttccactcagatctctaaaccttattcctttctgtcgtagagtaataacaagatctaagcatggttctcctttatgtgttgaattcttcccaatcttccgcacaaggattgagtacttgacttgctataggtaggtatatactctttcactatagggctcggaatttatgaagagaaagagaaggagattcaaagtctatagaaggaggctctcaagtttctagttgtttgacaaagttagaaaactagaattttaggttggatgagaataagagccatattattgcttaaataggatttcttctatggttagatttaaataatatggaataaaaaaaaagacaaaatttgctaaaaattctcttaagtggctcgccataggatgggccccactagttaaaatttgcccattttatttaacaagttatccgttctttcactaataccatagtttccaatttcaatcctttaaatgccaatactatttatttaataattaaaattaattatcaaataaaatttttatttaacctattt

SEQ ID NO: 268722 - DNA, 593 bp, Cannabis indica
tttttatttttaattttttcactcatatgttatacaaagcagtaagcactttgtgtgcttgaaccacctgaacactgacatagggccgtcttaaatattttgaaggctctgttctaattttaaaaattggaaccctacaaaaaaaatacaatttataaataatagttttaaatattattatatacagtatatatttaacaaaacatcaaaaaaactccaattaacttataaaaattattattaattgcaatacaataaaaaaatgaaaggaaaaaaataataaatagaaacaatgaatttttatttttttttgcttaaaagcaataatagaattgaaaatggatttggggaattgacttagaaatgatcaatgataagttattagggataagttgaaaaatactttttttttttgtcatccattaatcaaaaatactcttttattatattttcttaaaatatacctattttgttaagtgggttgcccaatataccatcactctctatttaagtctacatataatttacattaaccttaggggtctaatggaaatatcatctataaaagtgagtatatcttaaagaaaatgaaa

SEQ ID NO: 268723 - DNA, 848 bp, Cannabis indica
taggaccgggacctagtacccgatccagacaagaatttgaacctcggacccaactcgtgacccggcaccagaaatggaaccagacctggacccgagattgggatccgaatctggacccagggcttggacaaaacctgtattcggtgtttggaattcggacccagccctagacacgaaccctgacaaggacccgagactaaaaccaatatcggaagttaaccgagacttgaactaggacttggacttggaatcataactgaaattggacgtagatccagaaccgtaaccggaccaggacctggactccaaataagacctagaccggaattgggagcatgacccggatcccaaccttaacctggactcggggcccgaacccgaacctgaactcaaacccaaacattgaactagactagggacacagaacaagggtcgggacctagaaccgcaccccagtctctatccggaacccaaactcagaaatgggacctgcgacatgaaccagaactagaccgagacttgtgacagtgatccagatcttgattgggattcgggtaacggagcttggaatagacctgtggcctgtgtctagatctgggactcagactaggacaagaaccctgacctagacctgggaccataaattagaacctgaaaaggaatcgccgaacaaggaccctagaacaagactaggactgtgaccaggacccggacccagaactagaaccaaatacagacctagcctcagaccaaaactaagactcgaactcgggcccagacacggtcgtgtaccaagaccggaactgagtcccggacctggacctaaatcttggacccgatcccaaaca

SEQ ID NO: 268724 - DNA, 792 bp, Cannabis indica
taaacacacaagtagatgggtggagcatgttatagtatttaataaatattataatataatatatatagattaaatataaaaggtatcaaaccaagaagtgaaaatattagtaacataagagggtggagttagttacattttataacctctacattatcactaagaaagtttgtaaagagaggttgaacaacttaattttttaaaattcaaagctataatataatcgttggagatatttttatcatttataatatgtgtataagtgataaaatcaagtgagaatactttaaaatgctttagaaagttatttacaaaaattgaaaaatttagtaacagttactagttactgtttagttttttaatttgaacattttttgacaatgagaatgctttctaacagttccaataactttcaaatcacccatttaatctcatttacactcaattaagagatgataaccgtcataaagtatagggtattgaatttcaaaatgtgtaattataaatacaataaataagtgcctaatgtattcatataaagaagatgatagtttctatatccaaaaaacactttgttagaaatcttaaaggtttgataattctcaaaactatttttatatgagaattttccatgcttaaaaatagaagaaataaaattttggacaaaagtattatatattttcaagtctgacaatcttcactaatttacactcaaaaatattttatattgcaatagaattaatattttaatttatcttccatgtcaaatatctctaagagaacatacttctt

SEQ ID NO: 268725 - DNA, 2025 bp, Cannabis indica
ttttttcgccccttttttgatctcctttgtcactatttataattacatagtggacggttaattacaaaattgactttaatatgtttacaacaatcattcctaaaatcatggaatttgattacatatcacgtagtgtaaatgtgatttatgatttgaaatcatatagctatgattttctcgcttaaactgggtcaaaatgatggtgttttaaatacgtctttaaatattgtttctggagttgtctcaacagaagcttggttccagtgatctctatagcaagcttaggccatttttccttctaaggtcgacgatccatgtcttgtgtcgatcgtggttcttatttacaaagagttctttgaagctcatttgaatgttagcttcttgacttgccagggttgtgagcctcgctaatgctaacgggatgaagttatatgaggtcttcccctaactagacgggcacctcgcttactttttcttgagttgatccgtctgtaacacttagtttgtacactaaggacttttgcaattgatatatgtcgtttttgtcttccaatgtgtgtagtccttgatgcctcgcaattcgcattcaatgacatattgtttctcgctaatatgctaaataccagtttgtatattagttccttgcctaagaccttatagtctacaggttacaaataaactctgatacttacgtaattaatgacttattccataaaaatcgattgcactgatccatattccctttatcttgacacgtgtcctccactgagacggcaaccgaattttgggtataacagttaggttctagttcaattgtattatttgtgttcttcaatctatttgttaaagtcgaccaatggatcttctcgtgacatatagattaaagatgtggtagttcaattgagtgggagcgctaatcatagatacagagtctatagcttctatctggacatagaagtgaaataatgatttccttcgagcttggctaaatagagataaatgatagagcgctaattttagtgattatataagttcactgtaatatcatttataggttgctaagtgttttaaggataaaatacattgaagggtgtaacggttttttttgtccctactcaatgtaaatcatctataaggaatcattgattattaggattataacaatggataactcatagagtatttatatcgtggaatatatagagcgttctatataattgagagtgcaattccaaatctatagtagtgcaaggaagaattaataagttagaggatttacttggtaaattctagatctgcttattggaagctcagttatataggcccatggtctccatactagttgagacaaactgcttgtaagactcagttaattgattttagttaatcaattattaattctaaagttagactatgtctaatttatgaattttccctaagatatggcttgattgtgaagaaataggatttttagggtttatatattaattaagagactttgtggagtctaattaataaataatctaaataaaaaatttatttgataattattttaattattaaataaatacttttggcatttataggattgaatttgtaaaaagtggtatttgtgaaaaataaataaatggttgagaaaagtgacaaaaatctaactagtgatggacccactaggggccggccacttagtccatttgttgccattattttatcattttttattccaaagaaatcaatcctaaccctaagtgaattagtataaaaaaaaaggtctcattatccaactagtgcttctaatgactctttacctagttttctttttgtgagacaacttgtgagtttgagactccttcttcttcttttccttctaattttcaaaatcctatagtcttcttcaccattaaatttcagcctttagtgattgagtgcatgctcacccatagcaagttagtcctcaatcatagtgtgtaagatgtgaagaatccaaacaactgaagagtgtcgggctcagatcttggtggtact
